United States Patent Application Publication US 2023/0106033 A1 - sequence listing, part 3

SEQ ID NO: 1 - DNA, 6239980 bp, Clostridium beijerinckii SIID27451-B11 (residues 4,159,989-6,239,980 of 6,239,980)
gtacaaatctttttcatattattgcgtttcgtgataaatcctaatatagttccgattaaactaataatcgctagtgtactcatccctaaaacagtacaatgccatagtgaaacccttgccgataattgacttaaattatgcaagaaagacatgtagaaaaagacgattatactcattaataagtttcctataaatagacttaatttacttataaaagctagcattggcttaaaaaagttatttatagtaatcacacctttctttattcatatatatcataagtgaaaattcactcttgactaaaaatcttgctcaaatccacaattcttcactgattgtaatatattttgtaaaggtagtattatttaattttcaaaaatatcaatgtaatttactgcttcaatttttagattaatatatctcattaaatctaaattatcataccaatgagttactcaagattttgttgaataaattcgatatatcctttcttaataacatcataaggattgtttttaaaccattcataagattcttttaatccttcaaataaattcttttgttctgataataaatcattctgtcttgtaacatctaaactatattcataattataaaaactaaaatagtccctttgattttcgtgattagtcacatatactttttccaaagggtttcctaccactttatagcataattcaacaaatgtgtttatatctactaattccgtatttccaacatttaatatgtgttctttcgggttggattctataattttttcgatgattttacataagtcatctacatgaaaaaattgcaatttcatctttccatctttaggaatataaaattttctgttttttaaagcacattcaaatacaaatggctccctatatacattttgcattggtccatataaatatggaggccttaaaatatatgcattaggaactcttgaaagtaaatattcttcagcttcaattttgtcagttccatatttgccccatatggaattcaaaccaatgttttgtttttcagaaaatggttgctcatttgtttctggataaacggcagaagaactaataaatatgtactctttgaattcacctaatgcatctaatatatttctaatatccttttgattatatccacatacatcgattatggtatcaaaagaatatttcactagcgaatcttttaaattatttctatctgaacatattaaattaacattttctatttgctgtttagtacccctgtttaaaacataaacttcataattttttgattcaaaatattttgcaacatacttactaacaaatactgttccacctgtaattaatatacgtttcatagaaccccctccaaatttccatttatattccaattaattataacatatttttaactacccaattattcaatcttcaaagaacattctctagattaatatgtcaaatctacatattgggcataaagaaatatataaattccccacctgaataatgcgattttaccatattatctaatatatatttcttcattagctctattatttcttacagaagcacattttccacttaatttaccttgattatagatgtttaaaataactacttcatattcaaaatttattccaccatatgccaaaaacatctgtctatcattagttgtaccaattccatgtaattgaacttgattatttacggaccaacttaagtcatataaatcatcactttgatcctttcttataattttcagatcaaaaacaggagattcatattcttttataaagtacctaaccttataatttccttcaaaactttcgcttgtttcattccttaatgcaatcccagaacctaatgtatcgaaattctgtgttgaagcccaaagagctgaatttgaccgtaaatcaccgatttgtttatacatgccaactccagccattggaacttgctttaaacaccttgatacaagtaatttgtcatcgatcaatattccaattccagagtactcataactagaattttctttatctctcctccaagtgcatttatatgtttcacctatcttttcaacactaagttttcctttcccatcattagatttccattcacctaaaatacatttttctttataacagtccattatttcgccctcaccataattatatttaccatactaatagcaatttaataccattatagtaaattatagcatagtacacagcgacttatggtacaacttataaaattcatagtttattaactattgttaactaattattctataaaatgtaaataacataccattcaattttcaaagcttaatataattactcagaaatgataagatttgtaacatatccataaattgagatttgatgaacttttgctgcatgttcgttattgtataggaaaataaatttcaatctgtgattcttcatcttcagctcctaaaaatttctctgtgtagcattccaaatcatctctattatcaagttgaaaactactattaggaaaccagacaccccaaatataataatatgtagaaattaagttttttactgtacctttgtgtatgaatttagcatactttccgccgctaatttcttttaattccatcccttctggaatattactgtcacccgatgtttcaattcctataaataaagtagtttcactatttttattaaatgtattttgcaggcatgtatcacttgtttcataaatactatatctgttattattcattgaaatatacttttgcttctttaattgagcactcaacttttcccacatttcaatactgttgtttttctcaatactcatgtaacatctaaatccaacaacacatttaggttgaaatgttactatttctggttgaagatttgcataattggattcagtgattttatcaatttgcattggattatgatttccaatcaagacatcaataccattttttctatattccatcggtgtaattccatatctcttcttaaaggctcttgtaaaactttcagcagactcaaaatacagtgaaattgctatatctaaaatccttttgttactatgtacaagattatatgccgcttgagtcaatcttcggcttctaatatagctgccaatagtttcacccatcactacttgaaaataacgatggaaatgataataagaataggaaactgcactcgcaactgattctacagtcaatggctcatacaagttcgtctcaataaatatgattgctctaccaataatttgcttgtctttcaatacagtttcctccttatttaaggcataatattataaaaatcttttcccgctttttcacaaggaagattcacaataatttcttgctcttctagcttttctaccataaaagttttccattcatttgcttgtggcgaaccaaatgtcatttctatttttttctcggttgtattaaataccatagagcgtaaagttccaaaaaattcaggataatagtggcaacacaatccttttggataagatgtagataagatatcttttaaatctttttctgatattttttctttttcacaaaacattttttctattgctttgtaacgaatcaccgagttttcaatcaacaacttttcatatggctttatctcaggtaaaactgtatgatttgtagaaataagaaatttctgcttagattcattatccaaaatacgatatgatttatgaccatctatacactgtaacaatgcaattttattgctattatcagcaagcattagatttatattatatccaataggtgcatccattgcccatgcaatagcttcctcaacatttttgcagttttccaaaatacttcgaataacaacccaaaaagaaaacccagttattccagctttctgtcccccttcaaaattcccaacaggtaatccattactagctttacaagctgccaatccatattcattcatcccatcgcatcgtccgaataaattaagtgtagaacccatgtaacgatatttccctctaatatccgtatacgcaaaacacatctcttccatctcatcattaaaatcgtagttacgtgccatcaaagtgtgtccattttcaatcttgtttggtactgcagacattaaactacatccacgttctaaatatgtcattgcataaaaaattgcttgttctttggaaattccaactgtatctacgaatccttcgatttcctcatttacaccactgcaatatccatcaagcaaattgaatatttcttttaatttactttgcggataggcattaggtggtaaaattatcttttccaataaattaggttcagataaaatccaattcccaatctgtgttccaacctcataacttgttcctacaaaattctttaagtatgtctttgtctttttcataagaaacacctcatctttcaaaagaattataagctaagataagatgacacacttgatattttctgcggattttttatataatcttttatcaaagttaccatttaccaccacttgattgtaacatattttgtaaatatcatgctgttcaattataaaaaaacaattattaatacaccataataactgtttagtaaaattatataaatacctagaagctatatcttgcttattgcattttccataatatcagtgacaaataatattatttttaattcacgacttattattttcggaataaaatttcaaagcctttccaataaattcagaggctcccttctcatactttccatcaacaccttttatgcaagtatcatttgataaataaagatctgcaacataccctaaataattttctcctacatctactttaaaagcttcattctgtttttttatttcatttgctatatcatgagtaatttcttgaacttcttttgaatgtggatctctacttagatctgatacaagctttttatatagttcttctaatttcggcaacttagtacccgaagatttttttagagcttctccgataaatttagatgctccatttccatatttcttgtcaactaattctgcccattcaggtaatactaaatatatttgtaccatataaaaccagcaatcgtctcctctttcaccattaaaaacctcataatcttttttagctgtacttactatttcttcagcaatttcttgaatctccattgaagaagtatctttacttaaatcagatgtaagttttttaaataattctttcaatttggtattcttatcttctatacaatcttttttaaattcatcatattgctctgctaaagatgatgtggcactgttattaagattgttttttacagctttagcataccttttaatacttccatattgctttatagcagtcttagcaatctcatcttcctttaacttgcatttttcaataaactcattatatttatctatacttccatatgttttaattactttatcttcatgctcttttttaaattcttccaacacattataatattcactcatatcaaattctctaaaatccatagttccttctccttttaatgttttatttataagatctattaaaccattcaatctttttctctttaaaataagcagctttttttggttttctagtgcctgcattttatcaaagtatggacttgacattatatctttaatttccttcaaaggtatatcaagctctttaaaaaacaaaatctgctgcaaagttttaagagcttcatcatcataaagcctgtaacctgtttctgttatttcactaggcttcaataagcctatttcatcataataatgcagtgcgcgcacacttattcctgtcaaatccgaaacttgttttactgttctcatttctacacctcagaatttaattttagagccttaaatattatttactaatctgccggcaaaaaattttggtaatatatctaatctctatttttatattacactatgacgtggtgttagggtcaatactacaaaaaaatatcgcaaattcattcttatttatgaatagtgcgatatcctaatttattatttaatttttatatataataacatctataatcaaatcttctaaattaaattttatcaatcaaaataaaataattcttcaaattttttatctaacgcgacgcaaagaacaagcgctaattttgcagtaggattaaattgtccagtctcaatagagctaattgtatttcttgatacaccaaccatttctgccaattgagattgagataatttttgctctgttctgactttctttaaattattatgcaatactagttcttccatctgttcctttttaaatgctgacaattaaaaccaccccatgccacttccaacaattgaagccataccagcaattgccccaataatttctaaaatagtacatactaaatacactttcttatctctattataataataaacggttccgctttgcccaatcattgcgatcaacaaagctaacgaaaacactctgtaatctgcaaaagctctgcctgttataagttcttgtataaaaagaatcattgagaaaatagcaaatataataatcactgcaaaataagaattctgatttgctgatttttgaatatatcgctcacgttcatcatttaataagttttcctttttacttcttgctaaaatttcatctctattcatatatattccacctttcagcttttgacaagtatacttggtattctcattatatcatgccaagttttattgtcaatgcttttaccaagttttatttgcattatgtatagaccctctagattactctccatttacaaatttcccatcaaaaacgcaaattcaaattcttgaataataagattttaaaattgtttatttgcttttttattgattcgttatgtagaacagttgtgcatctcgaactacaatatccatactcttataatataaacagaaataagcaataagtattctcacagtaattctcaaatttttgtttgaactgttttatttatacaatttattgcgtaaaaaaagacgtatcaaccgttgatacgtcttttaagaatatttagccacaacatgttacattaatttatcaatatcccctgactgaatgtatttaatatttgctttgatcttttcatatggccaatcccaccactttattttcagtaactttaaaattatgtcctcgccaaatcttttctttataatttttgcaggtattcctccagcaatagtatacggtggcacatcactagtaactattgccctagtaccaataattgcaccatcacctattttcacgcctgacataattatagcgtcatagcctatccatacatcatttccaattacaatatcgcctttattatcccaagcatttgttataaggctaacatctaagtcccattcctcataaaatattggaaatgtataggtagacagtgatttcatcgtgtgattcccactagtcatgagaaactttgctttacatgcaattgaacaaaacttgccaattattaatttatcattgtttataggatactgatatagtacattattcttttcaaactctcttggatcattataaaaatcattatatattgtataatctccaacttttatattagccctcgtaattacatttttaagatatatagtttggtaatcattacttcttggatatattctatttgcatttggaatagtcatttttagttctctcctttatattaagtttcttttgactattccattactacaatgcatttcttcatcaaatcactcctcgtacgataatttttatttttatttatgattaattataacgcgatatttctttggattacttcgtccacttttggcttagtttcttcatctatagtaaattcaaaactcgaattgatttttaaaaaagtgctaactttaaattcgattgtatttggtgatgtccaattataacttttaattttagaccatttataaaaatagccagatttgtaaactacattttctcttattcctaaacttcttaatgatggtattatattagatattgaaatctctataccaagtatactagtaaagatgttattaattatattattcctatagctaagataaagttttatattaacccatgataatatacaccaaaatattaatgatattccccagaaaatgattgttcctgtatctttttttgcttttacaatatttcttccatggatatatgatgtatatatatcctttagaaaaatccatattccaagaataatcattactatattaataaatgaaaatactgaaaatttattcaagttatacaccccatcatttcaaattaaacattattaatctattataacataaattgtaagtatatatttctggagttctatcattcgctttatggtataatttcataaaaagaacttgcataaatatacttgtccaattttaaaataatttttaaaatgcttatagatgtattttctattttattaaatttaatcacttgtctattatactcaccctttatatattaagtatgagataactccggaaacataaaatgattgtccttatattatagtgttttaattattgatttaaatcaaaattctgaagtttacttgatttttttcgagtcatattaaagataatacatagtaaaactattaattgtattgcccagtaaataactgaatacatattaaagtaatttaaaaattgaggaaaacatatagatggaataaaatcatcaatgcaatggtataaaactgggattagcaaacttccctttacatgattataaatccatgtgtatataatgcttaaagaaatagtttgcagaagatatactataaaattatcatatccttgaatatgaaataaaaacattggtatatgccagcaagtccaaataactccaactattacacctgatagcaattggctatacttttcttgaagtattggcaatacaaaacctctccatccaagttcctcaccaagcggtcctcccaaaattaagataactaataaacacgctaataacgataatggattatcaaaattaaaaccaaatatttgatttttgatatgtattttatagtctgcccctgctataagacaaataaaggatggcaaataaaatgatgatattgaataaaaaagtataaaaacataaaaaactggattaaccttccagatagttaacttttttaagaattttcttaaccctattcttccataaaaataattagtaaaaattatagccataagacttggcattaatgaaccaactgtacgaaaaattgcatttaaactcaaactgttcgatgtaaatgaaagaatccaaaatatccacgtaaggaaaaaagtactcattaaatatacaacttttttgtgttcattaaccctttctataatactcattttcaagttccccttctatagtttacgtccattcgtaattttaaaatcaaagcaaattataacgttgctcctgctaaaaattaaaataaatataatatttattttacattatgctgttttggtattctagattcacaaggtacatctatctgacactttccgcagccatatctaggcttatgtttttccattgttatgtccaaaaattcagagcatataatatgatttttcccattttctatagatattgcattagctggacaattttttacgcatttaccacacattgaacagtactcatatatattttcgtattttcttttatcaggtgataagtataattctgtgatgatgctgccaagtcttccagatatacctttctttgttataagtcctttagaaagtccgaatgttccaagtccacatacaaaagcagcatgtctttcagaccagttgcttgtaaatttttcttcatgatttggatgattagcatttgaccaaaatctttcatctaaagtaggtacgatactgttatatcctgcattaatcaattcagactttaaatgcatacacaacttatttaacaaaccctgaccttcaatacgtccatgaagccattcttcagaaggccatgacatattccttctatttccttttttaaccgcttcgctaaatggtaaaaaaaatgatataacagtctttgattgtggtaaccattctttgggaagcatgaagtgttttccaattgctgatggttgttttaataatttaaaatactcatcatcaacagaaccaaatgccagaattggggcatcaaaaatcttcattcctacaacattttccgaaatagctatttcctttgttatatagttatcttgtgaattctcaacaaagtcctctgcggtttttataaaatattgttcatccatctctttcccatccccctaatttatattactaatacgccatttagttttactatataatctattcaaataaatagcccatcatcttttcaggattttctaaaaactttcttgttatcatatagttatcagtctttttataaggagttttcgtaattccatcatcatcaataacaaatatatctgcacctgggtacgccattaatattggtgaatgagttgctataataaactgtgattttttctttactagttcattaataatagtaagcatagccatttgttttataggtgataatgcagcttctggttcatctaagatatataatccatttccactaaaacgatttgtcattagtgtaatgaagctttcaccatgtgacatcttatgtaatgatgtacctccataactctttataactggaactccctcagagctttctaaatcgagtttttctatttctgtagctacattataaaaactttctgcccttagaaagaaaccatcccgaggcctctgcacacctttaactacagtaatatatttatataaatctgaatgtgtttcccttgatgaaaaacaaaagtttttagttcctccttctgcattaaatccactattaacagcaatagcttctagtaatgttgattttccgctaccattttcaccaacaaaatatgttacattgcttgataagtctaggctagttaagttattaactacaggtaactctttaatatagctgtcatctttatgaatttctttcttgagacgtatttcctttatatacatgttatcatatagcactcatatatcacctcattgttactttcctatttcagtgtatttattgtttttaaatataatctataaatcttattcactcatccacaatatattaagacacagctcaaggataggtttagaactagatattatataaattttatgttgttgtttcctcaaatgcatcaatttcattattacaatttttaacttttcgtttcattaaatataatgttaatgcactaacaacaagaaaacctagtatagagactatagatgactctattccaaactctccgcctgttagtataactgactctgacgctaatttataatagtaaatcggtttatcatgatatgaactaccaatcgttaaaattccacctatcataattatattccagattccatgaacaattgcactacaccatatagagccactctcgtatacaattagcgaaaacataataccaacactagttccagcaacaataagtaataatatactaacaatattaatctttataccaattagatgcattagtgcaaagataaaggatggaagaataatagctgtcactttcccaaagcgcttatccaaagctttcattatcattcctctaaaaaacatctcctcaacaatacctgctcccagacccgcactaaaaatagcacgcattactacatttactgattgaaatgtagtaatattattttttattaattcacctggaaaacataataaaacccctgaaactattactggtaataaaagtgcaattattagccaagttatctttgccctaggctttccaataaaacattcattcatagaaatatgcaatatctttgtgcaacacactctaataaaaatatatgacattccaatatacaatacactaaataatattggagatattgtgtctggcaatcgaaatctatatactatcctacttacttcttttaataatattactgatataattcctaatataatagctaaaattgcttttttagtagtaaaaccattctcaatattttcttgtaattctgtattcataataatttcctctctaaatatacattatttctcttctaaatctgatatatcaacttgttccattaagcaaactccagccaaactatcatctttcaaatttgtactttttacaaaaaaatatttctctggaaataaaatatatgctataccagttagaacagctattatacttgctataattaaatatttcctcttaattgcatttccccctttcgggttatttccccaattaaatttagttctttatataatctgatgcattcttatgctcagatgggtttgaatgtttagagttatatatatctacaacctgtttaatcccatcagcagacatatgtggtatgtatttttcaatatatccccaattacctgttttctgaatgatatctatagctgttgtatctgtttcatttgatgaaatgccacttatagcttctgcattttgttgattatcttggcccatagttaaatacacagcattatctttgttattgaattcaactttaaaatgcatatattctaacaattcatccattggcatgtataattgaggttctttatatatcttttctaaattgctttacaaaatagaagatcatcattgcacctaaaatacatccaagtacaccctctccatttatttttattatatctccacttatcaatccagatgtgtttgtataaatatcaccaagcatcaaaggattaaccacattccacaccgagtgcagaaatagcactggtaataaactccttgaataatagtaacaataagatgaaggaaaactatatgtaaaggcagcaaatgcttggataacacataagaataatggattacctattccagttgcttttgccaaaagaaaaacagcaggaatgtgatacaatccccatactatacctacaattatagtcgctttcgttttaccataatcttttgttaatctaggaagtagatatcccctccatccatattcttctcccaacgctaagaataaaccaacaactacagacactattagaattatgatacttttgaatgtgaattccttattaacactaatatttccaacaccagtaagttgagctataaatgagcaaatacctataaaaacaatagggtagaaaattccaaacaacactgattttaaagttgtgtctttaaataaatttgcttgatgatcatttgtaatcttattaaagataatagctaatattgcaggaatgaacatgattaaagcaaaatcatttttacctatattaggattaataaacaacataattgtaataatccatgtaattaaaagaacagtaacaatatatactttttcaggatcttttcttatagaattcttaacagtcatagctacctcttttctacaacgaataatcttaatatcattgctatcaagttaccgataattaaaacaaattaactatattatttttacatttttcttttaaattcaaaatataaaatattatataaacatatatcattcaactttccagaaaacatcttcataatttactgaatcaaattggttagataatgatctagttctatttatatattgtgtcttacgctgatcttttacggaaaatataagttataaaaaagcctctatcatcttcattttctatattttcaattagctcaaaggatctctttaaattttcaaaatcggttggttgaataagatcctcttttctaattttggaatcaaccttatgcttatgcccaaaaccacaaacaaataaaatcccattatcagttatgtgattttccaagtcttcaagctgctctttacttaacctgtaatgattgattaagatattatcaaatattccaatatcctttaaagaattagatatacttaagtcaacttgctttgcattaactaaataattatttcttttagcaaatgccttaagcctatcaagagctttactactaaaatcaattcctgttacttggaatccattttcaagtaaaaacaaagtatttctaccatctccacatgctatatcaagaacagagccttttttaaaatatgtaatattttcagttaccgatttttctggatttagtggattatcacttctattagcaaatttattatcccagtattctctatttcccatatactccatcttgtttcctccaacaatacattgcacaattatttgccatcctttattaattatagtatattttgtaagtatttaatatttaattttcaaagaaatattaaatactttatataaaaactttattctttttatatagaacttttcagtaaaattttcatagtcatatggaacaaatacgtattcatttcggtgaggtatacgcataagtgcaaatttcattgcggaactctatatagataacctaattataagttagatttatactatgaaatgtattataactagaaataagaattatgcttttggttgagtaggctagggaatcacttccctagcccctcccagaaccgtacgtgcggatttcccgcatacggctcctcatattacaattcacagtatatatgttatatcttttcttaattcaaatatatttacatatactttagccttaggcatattaaaatacttgaacatcctatcaaaactgacccagttataacttcttttctgactccttttatttagccatttgaagactagtcttctaaaaaagtatctaaactttcctaattctctactattgtcagtaattccataatacctataataccctattaatttctgattcagtttcttcattaacaatgtaagcggtaaagttctattgctctttagccattcactcattcttttgatactagctctaaatttctttgaactagtctttctctttactctaaaactaccattttttctagcactacaatagtgtgtaaaacctagaaagtcgaaagttctatctttatagtcttctatctttcaaactcttttaaatttcctatcatagaaagatttctttccaaaatatagtattttagttttatcttctgctacttgaagattaaatttatctaacctctttttcaatacttcataaaaagcttttgtttcgttttcaaattgaaaacaacaaacaaagtcatccgcatagcgtactatgtacgcttgccctttacatcttttcttaatgaagttattaaaccaaatatccaacacataatgtaaatagatatttgccaatgttggtgatattatgccaccttgcggtgtcccttcttctactttattatagattccgttttccattgttcctgtctttaaaaatctacctatgtatctaagtaaattcttatctgaaattctatgttccaaaaatttcatcatccacttgtggtcaacattatcaaagaatcctttaatatcagcatctacaacataatttatattcttctcagatagatatacatttaaaattttaagagcatcgtgacaacttctatttggcctaaatccgaaagaactatccatgaaatcttgttcatatattgattgtagtatcttatttattgctaattgaacaattttgtcttcgtaagacggtatacctaaaggccttctcttgttagaaccaggcttatctatgtatactcgccttacaggctgcggtctgtatttaaaagctttcattctagttataagattgtcgatattctcttctagattcatttcatattctttctttgttaccttatctacgcctgtagctttgtttccgcttaattcataatgacattcaattaacatttctttgttaactaagtgtattaatgatgtaaacttttctttaggattatttttagctatttctgctatcctctcgagttttgtatacaatttttttcttcctctctgtgtaagaacttgtttcccttttcgaggtctataatatgttacaccctttcctccatggtcattactcacttcaacggtactatggtgtaatccgactactcattatcatttggatgcctttgattattagtcattgttttccatactcaaaattagagaataatgagtcctcccaagttgacgtactataactgtgtataccatactacaccttacaatcccgggaaagcgtaagtattcttgcaatagcgattacttacgtactggcttctaagattccaaaattatcgccctttccaacataatgaaatttcgggactactagtttcagcattcgcttgcggtctggtaccttgtttgtctacacttaacttatcacatcactatgatatgcccaagactaactaatgactggttgctaacctttatcatacaggagtcgcacctgttatatagtaataatgagaggtttgctctcattatctttacgcccttgcttggcgttctgaaatgtttcattaggaatttgatggttttgattcttagattaaaagttgttccaagtatgctagttcaaagcgtgcctttgaggctagcatattggacgcaacttgtgatcttagaatcatccagcataatttccttagaaactggagcaatagcataatccttatttcggcgagtcatatgcataagttcaggtcttaattagggtatctgtaatagtatttattaaacaaaaaatatcacaaattcattattgataacgaatttgtgatattgtgatctgtagtttatttaatttaacaactattatcttttcaattgttcagcaaacgactttcctactggatcagcatcagctaaacattcaggatctcctgcaatcagtcctgccttctcatgccagaactcgctaaacattatatatagtgatttaagcctatctatatcgccaccttctgctaatgtttttgcaaggaaatcaatggcgaaatacatggtcttactttcataatatagatgcggatgcggacctggggcatctattacccatataattaagtttcctaccttttgcagaccataatgaggagttataccaagttctttacagaatggaatgagctgatcattaaagtctatctttgaacgacaatttataataactaagtatttagaaaggctatttgtagataaaacatgagcaaaatccacacgccctgcatctccatattccttttcataggcaagatcaataccagtacattctttaaaattagcaagtgcacttggaagaaaacgcgtaagatcaagttgtggattcgatgctattgcaacgctgccagagattttttcagcagtaaataaacccgatgttccccctgatgagactgaataaaaaattatatgctcattaggaattcctaaacgccttgctactctcatgacaagctttgctgtagcgtcacgataatctcgttctttcgtcccataaaaccatccaacagagatgtcagattcaaagtacatcggatcttcaatacttaataaatgtcctttcaaaaacgtagaccatgaccacttatgaaaacgtggaagtggacctttcgcaattgtcttatcatcgcgcatggtatcgagcacaacgtaaagatagtcgtattcgcttgcttgataaaagcattcaaaatgagcaccgtcaacctctgtattgaacctgccttctggaactctatctaatttttcagaatcaatacgcacactttctcctgtgatggctgatgcgtcggcagatctgtatttctcacgtctgcatgcttccagcttttcagcaaaatttctctcggtaccatcactgttgtactcgcatgctatattttcgagaaattctattgatggtaggatgtcgctatcatccattttcttattatgctcagtaaagtattctggattttcttcatcttttttcataacaatcagtcctttattttctaatcttagagtttattaactttcttaattataaagtgaactataagcacattttatcagaacacttgttctaaaacaattgatttatagggatttatataaattaagtggctccgctactctcatttttgatcatgtttttacaatctagcatgctcgtagccattgatataaacgactttaaaacccaaaaatttctttactagcctagatcaaaagtaggatttcttctgaaacattattttcatacaatccatatacctcattgtaaaggaataatatttacgctggattatcatgaataaacctacatctatattttttcttgtgatatgtgaagtatatcataggtcgttccttctactgattttatcttgcttaaatcatctatgaagaaaaatacatgatatttccatttatcaggattgtaaataactataaattcactttctttaatccttggaatatttttttctatttcatctttaaaattattaagacttccctgaggttttatttctctttctatctcaaatacatatttactatctttaattttatatgttgttgtatcaattagtggtattcctacatttactttctgccatccaaaagatgttattatattgtcataaaaaccattaaacaaaaatttatttaacccattactatctttccaaacatataaaggacaatagctattttgcaaattctgattttttcctttttctgttgttagatataatttaaactttaaatcttcaaatccatctgttttatatccgttgttttttactctatcctttattatgctcatatcataatcgctaggtaatataatcttatattgagttgctatcatttctttttatcctcccttttaattttagttccaactttatttttgattcataaatgaaattattgctcaactcgtgcctttcctttcacacttacagtttaactcccattataaaaattgtataatacttataaataatctttaatatcactaatagtgatggcaaatgtaaattaattttaacgaaaggtttctatactatggaaattaatgatctaagaatatttcagatagttgcttatgaaaaatctatatcaaaagctgctttaagacttggttatgctcaatcaaatataactatgcgaattaaattactggagaataaattaaacactactttatttataagaaacaataaaggaactgtaattacacctaatggagaaaaattgcttaagtatgcagataaagttcttgaattaattgatgaagttaatgatgagtttcttactcctaaaatttcttctactattaaaataggtgctactcagactatttctgcatctgttttacctaaattattttatttattccatgagaagaatcctgaagtatctttaaccttaaaaacagaaactcagaaaaatcttctagatatgattttaaagaatgaactagatggggcttttatatctgatgaaattacatcctcaaaaataaaaaaagttattacatttaaagaaaagcttgcactagtatcttctataagcattgattccattaatgctttacaatctcctataatagtaaattcagatgctgattgcccttatcgtaagctcttacaaaaatggttgagttataacaactctaaggctgctgctattattgaatttgattcactagaatctatccttaggggcatagatgaaggtcttggcatatctcttttaccaaaaagtattttgcctaaaaatcataattttttcatttatgatttaaaagatgacttctctgaattagaaattaaatttgtagtcaacaagaatttaaaaatcaatcctttacttaaaagttttatcagtgtaacaaatgactatcttttaaattctcagtaattaatttttaacattatggcttataggtcgtaattattttttataccattagatttatggctaattatacaattgaaataaaaatactatgaaggtatagctggatataggtcaataatttggacacatttttattgaacattgttcacttgttcttttttcaaaattgaatgaaaagactcaatacaggcattatcataagggcatccttttctgctattagagcttttcattttgttttttttttatctattaagaaagtctgtgctcgtatattgtactccaaggtcagagtgaaaaataacggagctgacaggctgttgaagtgtatgcgcattatctaaagcagctatcgctacggaagcatccattgtttttaaaaatgaatatccaattatatttcttgtgtataaatccataacagatgctaaatagtaccatccatcttttaaggtataaatataagttatgtctccaacccatttcttgtttattttattagtagtaaaatcttgcttaaggagatttttacgttctataacttttctattagcttttgcagatctaaatttcttaattactatcgaatgtatatttaactgcttcataaaacgttgaactctcttaatactaattttatgtcctgattgttcaaggattttttgaattttgggcacaccatacctactattactttcagtataaattttaagtatttgatcttttaaagtttcactttccaacgtcctttgggacggagtatagtgatgagagtgataataggtgctttttggcatgtgtaggaccttacacatcaatcttactggatagatcgatttattatcatcaatgaatttaattatatctcttggtcctttgagaatatggctacagctttttttaagatttcaagttccattctaattttttcattttctttttttaacttagaaataacttcatcatctttttcgtctttcatttcattatttctgatcttattgttagttattattagtttcttagatattttctcttttggctgaacttgattgatccagttattaagtgatgttgttgaaacgccatattctttgcagatttctttaatcggttttccagtgttgtagacctcgattatcattttcttaaaatcttctgtataatttccccttctcattcggacacgcctctcttactttaattataatttatttcaagaatgtgtccataaaactatactagcatcaatacgaaacggacaaattaatacattaaatgataataatatatatatttgatttatttaaccaaaataatatttttattacaaaaagtgtatcttttaatcataaagtatagatatttatgattatctatattattccttatatatacaaaatgcattttttattatttatggatttttttacataaggatgatatacttttattgaattttatactaaaaactaagaatgtaaatcaaggagaaactatgtttaaagaaaataagttcaacaatataattttaacacttacaccaattattacatttataattatattttcaattacaaataaaaattatttagtctctgcaatgtatataatatctatattaacaattttatacttaattaaagacaaaagtatttatgatttgctttatgctattttattagtgtctacatttttcgattattcattatatattccacataatgaaaaaatatatatatttcacatagtgctttttatatttacaataatttcgttaaggagagtttttaacgataaaagtatttttttaaaattagataaaaaaattttaacaatttactcaatttggtttatatatatgtgtatcagtattacatgggcattaaataaacagttagcaataaaatatttagcaatatatctaatgatgtttgcctttattatagatataataatatacaatataaataaagaaagactaaaacaaacaattaagttattagtattcctactttcattagttgttattattggggcaattgaagtaatcttaggacaacaattacctataaaacactattattatgatgggataaatgtaccttttattaatgtaataagagctcgaccaatagtattttcttttaatactaataatttggctgctacacttgctatgctatcaccattatttttttattcaatttataaatttgataatttaatattaaaaatttattttttctttgtatcgtgcataagtttctcactaatagttattactacttcaagaacaggcattaaaggcatagagttatcatttgcattatatttaatttattgtatttatagctttaagaaaactgggttaagaggaatgataatcccattgctattaataattagttttacatttttaagatttaacagcataaacttcatgaatattgattctgccgataattcaactaaaagtgaagcaaatgatttacttctaaacaaaatggattcgctagctaatgaacaactagaagtaggaaatgcaggatctttaaatattaggtggactattatagacgatgttgtggagggaatcttaattaaagaaaaacgtttattgggttatggtgtaggtaatgttgaacaatatctaaagacacaaaataatacacatggtgtttttagccctcattgctatgcgatagagatatttggagattttggagttgtagggattgtattgtatggaatttattacttatacttacttatatcaaatataattattggtataaagagaaaaagtattccttgtattgcttcagcaacaggattaatcacattttctatcacgagctttggcccaagctcaataacatatgtattttcatattggatattaattgccatgtcaatatcatgtattcaagtgtataagtgtaaaagtccaatgataaatataaaaatagactagacgaatttcctctagtctattatccgtccttcagggtataaatataagttatgtctccaacccatttctcgttaattttattagtagtaaaatcttgcttaaggagatttttacgttctataacttttctattagcttttgcagatctaaatttcttaattactatcgaatgtatatttaactgcttcataaaacgttgaactctcttaatactaattttatatcctgattgttccaggattttttgaattttgggcgcaccatatctacaattactttcagtataaattttaagtatttgatcttttaaagtttcattttccaacgtcattcgggacggaatatagtgatgagattgataataggtgcttttgggcatgtgtaggactttacacatcaatcttactggatagatcgatttattatcgtcaatgaatttaactatatctcttggtcctttacgaatatggctatagctttttttaagatttcaagttccattctaattttttcattttctttttttaacttagaaatcacttcaacatctttttcgtcttttatttcattatttctgatcttattgttagttattattggtttcttagatattttctcttttggctggacttgattgatccagttattaagtgatgttgtggaaacgccatattgtttgcagatttctttaatcggttttccagtgttgtagacctcgattatcattttcttaaaatcttctgtataacttttccttctcattcggacacacctctcttactttaattataatttatttcaagaatgtgtccataaaaccatactagcatcaagccttcaaacccgcattatttaagcatattctgaagaatatttatggtaaaccatattagaatacagtggttttataaaattctattctaaataaatttacctactataaaatatttgtgctactttaaatatactaactgtaagtatttactcatttaaagacgcatacatttctgctgctgtataaagatagtaagaaagtccagttaattgattctcaagcattctcctatgaaaatcatcgtctaaaaagaactttgcttgagctacaaatgattttgcatctgtgctatgaccatgcttatttagaaattcaatatgattttttaatgtttcctgtacacttgtatcattagcctttacaccattttttagagcatcttttatatagttcatgaactgctgtgcttccatagctgcctcattcatattgttaacttgagcttcatctacctcaggcatatcatatccatacttacctttaaggtagtttttctgatttgaaagtgcatccttccattcctctttgttgaatcccttaaacattgctgacttatccataatttctcctctcttaccaaggacaattgattcatttatagtctttagcaaacgatcagtcctctgcttgcgcgcaattaacagttcctgttgtttaactaaacactctaatcgattcggctcatcctccagtgcttttttaatatcactaagagaaaaatcaagctcacgataaaataatatttgctgaagtcgctcaagctctctttcaccataaagacggtagccggcttcatttacctcatgtggaactagtaatcctattttatgataatggtgtagtgcttttacagtaactcctgtaaattttgaaacttctttaaccgtgtatagcataattcttcacctcgtttataataataagacctcctgtaaggtgagggtcaagattatttctaagcttttatttattaatatatatattgcaattcacaattcacaattacggataaaattcttgcaatatttttagaattatgataaagaattatttttgcaatatatatgattttcactgccacaaataatttgtgatacattttactaatgaaatattattcaattattaagaggattcttttgatttattgcatcaacgctatatctcacacagatatataaataattacaagttctctttattctatagaccaatttgctcaatccagtttttgacctgctgttcactaaaatcactcatagcttcaaaaccaggaaggattgttgatttctggcattcttttgcaatgttaatttcaatttgtccaaaacctcctccaccatgagtgcaaaaaggaataacagtctttccctgcaaatccacttttcttaaaaaacttagtattggtggggcaaatgatttaaaccaattgggagtacctaaaaaaatgtgctcgtaagacttgactggttcttctccagacaataatttgggacaatatccattttcaatttcattccttacttcctttgctgctgtattataattgaaagcgtaagatttttcaggaactaattctctaatatctcctccagtttgctttgctatttcttctgctaacattcttgttgtatttgaaaaagaataaaatactactaatattttgctcatttttacctccgtaaatcatataagtctttatattatatattaataatgcaaatgctgccaatgcacatacagctatcacttgagaatatccactcattgcagatatttctcttataggctcaacagataaacataatacctatatgttattaatatactcataaatatacctaattttcccgatacacttctcatcctcataatctttcatactctctatatttatataagctcatttctgataaagcaaagctttattcttaaataagaagaataaacaccaattataaatgttccatagataatataatctattataattattgcattatgggctccaatatatccatatatacatacgatacctagaattattagaaatattactgaaatatattctatttatttttaaatattatattgctgcatatatacttgcgtatcttaataccaattatatatattcattttttctctgattctatatcaatgcctgccaatttcattaagtatatagcatttcttgtaggtgagattcctatcttaagcttataatcaaagtgaatttcattatctgtataatattcagaaaaatgatagtttttaatctttgaatttttattattttccatctctcctaattttaaatcatgagtagatacaaatcctaaatttccagttttgcataattgctttattaaaattgtcgctccaacaagtctatcttttgaattggttcctttaaaaatttcatctaataaaaataagacttgcttaccttcttttgaagctttaacaatattcttaatttttagtatctcagcataaaatgaagatatactttgtcctagattatcgcttatcttcatgcatgtatataaatccataatattacaagaaaattcatctgcacatactggagcaccagcgtatgctaatacaatattaataccaatagttctcataaacgtacttttaccagacatattagagcctgttataattataacctgatatggatcttctacatttaagttattgcatacacgtttatcccctaaaagaggatgaccaatatttttagcaagaatctttgatgatccatttataattttgggcatgctccaatgaggattatcatatttagtgccagcaatactacttagagcttctaactctcctattgtatctagccacttttgaaaattatcccctgattttatccgccacaattcaagtgaaatagcgagatgatattctatcataagaattggatttaaaatatgatatagaatattacgtctattagctattaattcacagattttagaaaatgagtcaatttgcttagatgcactttgtccatcagtattataaagtttttcacataaattcataatatactttgaattaaatttatgcccttctatatacttaatcatatttttatatgttactatgctatttttatatttctcagcaataattaaattttttcttctatcatctctttttataattaaaatgatacattgaataaaaatcaaaaaagtaggaatgtaaaatggaactaaattaaatattttgggcacaaatatatgaatatctaacagaaacgttagtaaaaaatccattattttaagtatcaatgttaaggtagttattgtagttattattgaaagaattcttaatccccaaatcacttctttttttattacaaagtcacttctttctttcatccataaaaaaagttcatctggattttgtttattgtttgaaattatttctccctctacctcaagcctttgcctaaaatttatttttggggccagttctttgacggcagattgcctactgtatatattttgctcatttctaggtttttctgttaagatttcttttagtttttgtcttccaatgtaagtatgtgatgcattcatccattggaataatgaccctttcccaaaaacatcaagatcgtatgaataattatggtttttatctataaaatcttcaccagtatcctcaaatgatttccactccccagttaatctttttatagatgtatcatttacgtcatataatgcattgatatacagcttcttacttttaattacttgatacaaagcacctgaataacaaaataaaagaactgttattaaaattccaaaataaaataagtaactgttgttctttatatatgatattattaagattgcaaatccaagtaaaaacatacaaaatcgtaatatacttatattattaagattcttttgctgccttttgagtaatagaaaatatcgagattttcttttttcatacttttctttttgtgatatcactcctactccccctcttaggattaaacaccttttaatgactattcttctttaataattttgatacgcttctttatattgaattgattgggtatggaatttagcaatttatcttctcttccagtaaattgtattttctataaaatatcggcgcatctatttgattatttttaccgcagtcatatacatttttacatacatataataaatcatttatattattatgaagagtcataattctacgagtcagctgattatttttaaacattcttttcataaccattcctgctaattttgaaggcattttataggcaaataattcattattataattttttagatttacatttctagatgaaattatttttacagtttcccttatagttaatattgtttctgataaaattttagaggaatccatcagtttttctgctgcctcagttgtattttttatatcgccatattctccagcgtttgttataactgctgcatttatcgccatgtgaatccaaatccactctagcatatcaaaaggtatttcagctttaatatggcaatcagataacaattccaataacttatcataatttttaatatttgttttttctttgctttcaagcataatatgatcaaatatacagcaatttagttcatgatcacttatatttccacctgctactggataaccaagtatgaactcccatccattaaataaattttcaatataatttttatcttcccatattccgttgaaaattatcaaagtaccattaatgccattctcttttaatgtttttattacgccttcaatttttccagctggaacacttactagtatgaaatcgtaagaactatttttatttgctatatggatcttataattatcatttttttcttcgcctttattattaaatcttccatctaataacttaacatttatattttcaggtacaaatgattttttgctgtctcttattaaatgctctaccttgtgtccctctttttgaaaaatatatccataagttgtcccaattactccaagccctattattaaaactttcatttttacacctctaaatctccatttatattccagttaattgtaacatattttgtaaatactatccttttatgttttcaaaaagcattatttcaattccataaaatgttatggagttacatagtaagcgttcaatgaatctataatctactatacaaaaaaatcgcaaattcaattttcttgaataatgcgattttagaatttattaaatcatactcttttttgtaatattgtttttaggctataattgtgaaatggtaaatggattcacaaagagcaaataaccatttgatctcgaaagtttatccatcttttttattatttcaccagctttatctccaacagtagttctttcaagaaaaatcactcgacagatcccactgactacatgttttaaaacaacctgaggaatttgatttttgctcaattcattttctccatttaatataatttcatcaataattttatttttaggttcatatatttctttaaactcttttaataagatttttgcctgctcatctatctttattttttccttcttcattaatagtcacctcattgcctttaaaaacatattctagattattattttcacgttataatttactagtatgactcaattatagcacaaattgtaaatgccaatcattaaattttccttaatctatttttactaattactacataaaatctgaatattacttagttataatattttattaatttcattatctattagaaatattataaacaatctttctcataatatttaataaattttctctttcttcataagtatctaaagaaatcattatttttccataaacctcttcttcaaattttatatgctcctcttgcgctttttccccttcttccgtaagctctaatttataagatcttctatctcttttactaatagatctccttataaggttacgcttttctaatctatcgatcatgttagtcaatgtacttttaggaatattcaatatttctataatatctctaataataacttcttctttctcggaaataattctaattatagatatttcattatcactaagtccttttattctagtatatttagcttcaatatctttatagcttgattcaaataacatgcgatgccataatatattaaattcatctatttgctttttacaatctttatccatattgtcactccaatctattaatgattatttttttatcttagcgctaattgcaaaactcttataattaatctttttaaaatcaaatggctcaaatccgcattttactaaaagtgccttaatttctttttcagaatatattttataatcaccattattagatattttgcaatataaatttataaattgtctacaaattactggtgccgttggatcccccataattaataaaccacaattctttaatactcttttcatctctaataatactttttctgggcttggataatgatgaaaggatgcattacatacaattacatcaaaagaattatcttcccaaggaatatactctgaatcaccaactttcaattcagctttgtccccaagatttttcttagctattttaatcatattttctgagatatcgactccatataaaccgaaattataatcagcattaagctttattagtacattacctgtaccacatccgacatctaatattttttcaggatttgcatttattactctactaataatctcctcatacattggagctacaaacttcccatcactgctttcatcataaacttcagctgtcctattaaagtttattttcgaattttccttaaatatgtttttattattaccttccacataaatcactccccataataatagttctatttcagtatagttccatatgcgaactatacttagatactactactatcaaaagtaaaatacaaccattttttatatattttcctgaaaatgcaaaatatattaatttatatcatgattaacaatgcacattccacaattcagaattatggcaaaattcttacaatatttttggaattatgataaagaattatttttgtaacatatataaatacaagaatattattagttttttagttgaatttcatcacttttgttgcatattactaaatcaatgattttccttatatttaggcatcaaaaaatcactagacattgcctaatgattttttgattatataaatattgtattaaattattaactaacatttttatttaacaatgaacgatatatcaaataatacagtaacaaaaaatttgatatattattttaaatattcagtaacaaaatcagtaaaaagaataccttctaaatggtcaatttcatgacaaaaacattttgctaaatctcctgtacccgttagtattatttctttaccattttcatctaatgcttgaactgtcactttttctggtcttaataatcttccaaatacatgtggattacttaaacatccttctataacttcttgacttccttcttgtttaataatctttggattaactaattttattagaccttgtcccatatctattacaactaaccttttaagtattcctatctgcggcgccgctaagccccctccattttctgtattatacatggtttccgccatatcatctagaatttccctgatcttttcgtctaccacttcaacttctctacttttctttcttaaaacttcatcaccaaataatctaattttccttaatgccatttaaactacacctctacttaattgtgctcttgattttctttcactttgttcaaaaagaaacacttcctctattgcacaatgaaatatttgggaaatatcataagctagccatatagatggctcatatttttctgtttcaatagagtttattgcttgtcttgatactcctacaagagctcccaattgttcctgggttaatccaatagcttcacgaaattcttttagtttatttttcattaacaacaactcctgtcatgtctaccttacataagagtatattccactttaaatttaatgtcaagttaacattacatgatgtgtgtctttgagttccaacttttcaaattcagtattattcattatactgtccaagtggtattgcactataaatttattaagctaaattttctccatccttaaatgctcttaaagataactcatcaaacattgctaaatcaggattatgactagttccacagtaatgaatgctatcctctaacttccagcccaattcttctaacatattattagcaaatttaacgccttgctcgcctatcttaggatcaggattcccttgagtaaatattgttattaactttttacctggatattttgccttataatcacttccaatcattggaaatgtacgatcaaaccaaactttagattgtcctgtaattgtataataatatattggagaaccaaatacgatagcatctgcttccttaatggcatcatacattggctgcaaataatcattaactgcacaaccatcgtgcgtacggcaatacatgcatccttgacatccacgaattccagaatcatttaaatcaaattcaataacttcagcacctttagacttagctccttttgcaacttgttctaataattttgcagtatatccattctttcttggactgcctttaaaaataactacctttgacatatcttatctctccttttaaatataaaattctctaaattcaatcaattatctattgactgactttattatattaagtaacatataaaccaacaagtacgcaaaaaatgtttagctactaatatttatataagtaatggaggttgcttttatggaaaattgttctattgaatatgctttaaaaattataaatggaaaatggaaattattaatcatttgggttatatctcaaaatggaattgttcgctttaatgaactacagcgaaaagttgatggcatatccagtcttatgctctcaaaaaacttaaaagaacttgaagaagatgctctgattattcgccatcaatacaatgaaattccaccaagagtagaatatgaattatcagaacttagtcaaaaactcatagttgctttacaatatcttggagaatggggcgaagaagttcataaatataaagaaacatctgtataattaataatcaaaagttttcttcaaccatgaataatatacttatactaattcatagctacatgcttttttaaagtttcgcagaaaaaaatcgcatattcatatttttttgaacaatgcgattttctgcttattttatagcatgatcctattaaattttcctaataaattttatgaaggttactaaataatctaataagataattattaaaattatatgtatctgaaataaattctataatcatctttacaatactacctttgacatatctaccagttctttggagtttgaggtaatctcttctaaagtagccgttatctcttcagtagctgctgcttgtgattccgctatcatgtttgtattgctaatctccttaataacttcatcaatagaatttctcatttcaagaagcaattgtgatactttttttgacgattcactgctcatctgcgaaagttttctcatctcacctgcaacaactgaaaaacctcttcctgcctcacctgcccttgcagcctcaatagctgcatttaaagctagaagattagattgagaagaaacactggtaataagatttaatatagtatccgtttcctttattttttcttccgttttttgtgtcgaatttacaatattattcattgaaaatgaaagtctttgagaatcagtagccacttcctcaatacttgcacttgtctgttgcagtgagctaaaaatattctctgctacttcttctactttaaactgtttatttaaacttctcccaattccaactccaccaataatatttccacttgaatccttaattggatatgaaattcccttaaatgatactccaaatatttctttgggcactatcacactgtgtaccttaccttcttttatacttttatataaaggttcctcaggactcaattcttgtccaactttaataggcaagttaatggaatcaccatcacgataatatataaatttcttagtatctgctacagcaactgctatatcatcttgtaatatttcttttaattcaggaataacctctaaaaatgcctcaagtctattttccatatatacatcctccaataaattcaatctattataggtatatattcgataaatctttctatattccttgtttttttgcgttgattttgaaaatatatcattttattttttagtattattaaatttaaaattaataattcttttgaaaaagatttttttactttctcctttaaattcgtctactatacttattatttgagtaattatagattttctttattatgagtaaatgtttgtcataccgaagtcttagaattctcaaatcattccaaaaccttttaaagttctaacataaaaaaacttcagcttactattgataccactccattacaaggtgtgtaaaatattagaagtgaagctctttgagaaataacctcacttcttattttttcatataaacttttatttaattgtaaaactaagacatagcttttagcgatttagttctattttagaattgcttagtattttgaatataaaaatcacaaaagcattttcttaaattttaaatttttgaaccataagattaagtttttcagctaattctgcttgaccttgtgctgctttagtaacctcttgaataccagtatttgtttcatctatactagctaatatttcttcagagcttgcagcggactcctcagcagtagctgatacattctgaataactatatttacctgctctatggtttctgacatctgttttgctgcagaagctattcctgaagccatttcattaatatactctaaatctttttcatactgtaatccagtttcagaaagcagcatatagcttggtttaacattacttagcataaattctagcatatcatgcccgctttgtgtaagattatcaaatgcgctctgcacttgaactaccatattctgaatatttccaactgcttgagttgactgctcagcaagttttcttacttcatctgcaactactgcaaatcctttgccctgctcacctgctcttgcagcttctatagctgcatttaatgcaagaagatttgtctgttcagctatgcttgcaattgaatcagccataacctttacatcttctacaacttttccttcttcaatagccttagttatatttgtctgttgtttttcgtatatagagttacttacgcttatttcattttctgctttatttttaatacttttagctctactcgttatttcctttgaggactctttagcaccatctgcgctttctgaaagtttcattgttgtagatccaatttcttctgtagatgcagatacttcttcagtaattgcactcaaatcctgagttcctcttgctatttgatttatagattctgtgactatttccatcttagatgaaatttcctcagttgtagcagataattcttcacttgtagcactcaaatcactagaactatttattatttcagaaattaacatcctaattttatctccagctaaattcagggattttgctagcattccaatttcatctctactatctatatgtattttatttgttaaatcgccctcaccaattgcctctgcaaatactaccactttttttaattgatttgaaattattccagagattagccatccaaatatgatagcaagaagaagcccaagaactgttattatgtttatcgtatataatgaaactttaaaagtagcattattttcattatacgattcatcagcttgtcttagatttatgtctattaacttatccaaactagtaaatgctttttttctagcttctgttacagcatcaaattttgcatcagcttcctcataatttttttctattgaatatttaatcacaatatcacgagctgctctatatacttcgaaatccttttgaaattgtgaaaaagtttcttcctcttcctttgaacttaatgttttttcgtattcttctattaatttcgtattagagtcttttaaagtatcaatctctttaagaatagaatcttgctgttcttccctatgctgatatacaatctttagcaaatcagcacgtacgcttgcagtgttcttttcaatgtctgttaaattctttatagtttttaaatcgttatcgtgcatactcattgcattagaattaattttgctaagatttactatcccaatagctccaacaattccaataaataatgcaatcaatataaaacaggaaataagcttctgccttgttttaagattatttaaccattttctcattccaatctcctccattttttcatctattattccttattatataatatatttatatttttctccatcttttttaccatttttcgtcaatatataccatattaaaacgttaccaaataattataatgaatttatcgcctataaattagtacttttttcaaaaaagcacaagtaaaaatataataaaatttgaaatttcaaaattataacttattaatttaaagtacatcatatatttttactattatgaacttcttgtaacctggtattatcatacatagctaaagtatcgtatctaattgcaaagctaattattaatacatccattattcctttaactctatcatcttcttttataccacttatcccttcagacagaagtataaatcttatttcataattataaatgttcaataatttttactctaaagattactatataccttgcttttttgcgtaaattttagaaatatattattttattttttagtattgtttaactttaaattaataattccttcaataaaattatgcaacattttaaatataaaaataccgtacattcatctgaataatacggtacttaaaatcttatatttacttttctttattgtaactcaaattctgcaactacatgtgaataacccattgagttttcaatttctgctaatattctatattttcctgctgtaagcttgttaaagtctttcagtatactcaatctacaaatatccatccctgttccttttgctggcaaaattgcttctaaatcactaaaagcagtatgttttgaaaactctaaattatgccattcattattttcaaacttatctattttataatattctccaccatgtccactttctaaatccgtattatttgttatatcaaccctgatctcttctgtaccgacaggatacacacttttttcggtcttcatagtaatatcttgtaattgtgatttacatttagttgtatctaaagctccatctgccccaaaataatatccatcgacagtttcattctttgcgagaaccccttcaaagctaaagtaataatactttccattaactaatttccatcccctagatacactattttctttatataatgtatctctctcttctataggatatccagctgttctcaaagtatttttaaattcatccatatcaaaacttttatccttattagttgtaacattattgggtgcaacctgaatccacgccccatcagatcctattgtatatccatcaatggttgtatcatgtaccatatatccatcttgtttaaaatagtaccactttccattaatctctttccaacctactgaccatgaacttccttctgtattccaccaaccgtttgaatcctgtctccattctgcattcgctccacttgaattaaataccgatgcaacacctactaataataaggccgctattactcttaacttttttacttttttcataattttccctccacttatatctaatcccacttttcctcatataatacaaatatttcatattgcttcggtaccattatatcaaatttcaagcaatagattcttatttattacactccaaacccacagattactatattaatgtgcataaagttaagatagctttgatacaaagtaagtattttttatttcatgttactttaaaatttctcataaatatgattatatattaccctcacatgatttaaatattgatccaactctactatttaaatcaaaataacctgtatccattaatattattggtttaactttcagggcatttggtctcccattttccaaacaatcttcctctgcatatgttgccacaatctcaccaagaaacattgtaaaatcaaatataggaatggtttgtatcactttacacaaataatttattgaacattcctttatcattggtgcatttcctgcttcatcatagaaggattcaaaaacatttgatttatctactttgcttccagaaacagttccacaataatcagttttttcaacgtcatcggatttaggaatatttacagtaaaaaatccattttctaaaactccagatgttgtataatgtgagtttttcaacgatatataaagtacatttttttgacttacaactccatatgctccaattgtagcataattaggttttccattaacagtagctcctgctaaaacactgataaatggtccaaatggaatattagctatctttttctttgtcatattcattctcctatctaattataattttgttgcaacaacgaaaattatatagtataagataataaaaatatagactttttctttcttatgagttatcatatagattaagtattcccctaacttaggatacttttttgttttaaaatttgttaataaatacggtaataattttattaataaattagcctaaagctgatttcttgccattaatcaaaaagtgtaaagacaagcttgctaccgctaacttatatttattttcatatgtaatagaattagtatccttcataaaattcttaacctcttttaagctgatacctgcatacatagctaaagtatcgtatctaattccaacgtcaattatcaatacatctattattcctttgactctgtcatcttcatttatactacgtatcccttcagacagaatataaatcttatttgataatgatgaaggctcaggacactttggattccacaccaactctctattgtttttaatagaatccattgcattagcataaaactcattcaaatctctttttccatccatataatcttttagccaattataatcaacatttatcattctactcaaagtttcaagttcaattttataatcttcaatcaatttttttatgctttctcttgttttatcaatctgattagaatttccatttattaattccatatcttatcacctaattctgtaatatatttttatatttttttaacaaacatttgtgaaaattagttattcaacactctcaattaatactaatcaatcttacgataatataattattcatcaatctaacgccttttcataaagtattctcttacaaagtcaggaaagtgtatcgctatattatatgacatcggaacagcaaccttataacgaggtttaatcctacttttcgaaattatattagcaataacttttgctgcttctttaggatcagttaaattttgattatttctatatttagcatctgcttcataaaaagttgaataataagaatcttgactagtcataagattatttgaattattaaccatagttttaaaaaaatttgtttttattggtccaggttctattacagttgcttgaatattatagttgtgcagttctaaacgcaacgtatcacttattgcttcaactgcatatttagatgcacaatatgcaccattaataggttgaacaaatttccccgaaattgagccaatatttataattttgccaaattgtttcttacgcatttccggaacaactgcctgaatcatattaattattccaaatacattcacatcaagcatgctttttacactatttatattgatttcttctaaagcacctctagttgagtatcccgcattatttacaagaatatcaattttcttaaatcgtgctatcacttcctccatcgcaactgaaatagattctttttgggtaacatctagttgtagctttaatgatacagttaaatcttttaaagcttctacctttctagctgttgccacaactatatatcctctctcagataatatcttgcaaagttctcgtcctatccccgttgagcatcctgtaattaaaacaactgtctcatttttcatataaattaacccccattaataaaatctatgtacatcataaatcacatggaggttagttgcattatcatttgttaatattaaaattttttcttaatctactaagtgacacaggggtcattcctaaataagaagcaatatgatattgtttaatacgcttttctaatccaggatatgcattaaggaactgcttataacgttcaatgctatctaatgctttaaaactaattgcatgttcttctttcataataagaacactatcaatcatctttttgtaaaataaaagtagttcataatttccctcaactattttttcaaaatcagaaatttgggctacaataatttcgctatcttctaatgcttgtatataatacatagattctttttgagatagatgtgctacatatgagaatagtaccccaccctctttgtaaaaatattttgttgtatctttgcctgctttatcaatataataagaacgaaaaactcccttaacaacaactcctatttcagtagacttctcaccttcctgtaaaaagaacatatctttttttaatagctttggcttaaaaattttctttaataaaattatgttttttccactgagtaaaatctcattgtttttcaaaatatttatccataaatcatcgtatacatttttactcatttaaagccctcgttcctttggtttgaaataattattcttacaactcttatacttttattcttctttagtattatccaatcacaatccactaaaaatattgcaaatttattcttatttattaattttacttatctagtactgcatatgtcatatattcgagttaattgcttttctaatgaatcaattactttgtcataatcctctgtttctacttcattaaattccaatgtaactattttcggatttgtacgatcaagaacccactctaacaatttgtagtcctcttcctccatggcctgatgtgtatccattggaaaaccattttcatcattacctgaaccatttgtatgaatttctacaacatgatcaagtggtaaccttctaatataatcataaatattccatcccctatattttgcagtaatcttcgcatgagttatatctagcaagaaagatacatcattttcaacaaccagtttataaatctgttctggcattacataaggatagaggtcaaaggcttcacggtcatgtggtgtatcaggagaattttcaagtaataatggaactgataaactctttttaaagaactgaatttgattagacatgcgtttatatatgtcatcttctgtcatacctgttaacatgtccttagatcttatagcaagatgaagaccataatgtggtgaattacatttctttataatactatttgcagaattaaaatcaattctcgctatatcattcattcctgtgttttcataatagcctaaaccatgtactaaaattggtcgcattgaactcatcgttttgaagtcttctttaaaattcccatatccaaatgatttaatatagtctattcttatcgagttcttctctataagaaattttagtgcttttgaccagttacacccaatatacattttagaatttcctccctatataattacattatttatttgcatatgttaatactataattaactaatgaaccattttatgtaacctaattatagcatattttataaaattttattattcaatttttaaaggatatctttataggatccttaataaaatttgcatctttgtattcttgtttgaataacccaatcttaatctttaaatataataatgtaattgtcgttcttgctgccaatctccatttatcctcatcataatcgcggataagtttaataatcatttttttctcacataaaattagtcatttctaacatatagcatagtaaaaatccaaagccctacaccgcttattataggcaaaatgtatgctggtataagatttatcaaggtgccagctataattagtgcaatgggtaaagttatttttgctatggtgattcctatactcagtactcttcccctaatgacatctgaaatagtttgttgcaattcataaaatatagctatatcaattactgatatggatattcctgctaataacattattgagcaaaaatatattacataaaggttattattatcatagattctatgctgtattataacggagacgcctattgctatcatggaaattgataatatattagtcattacttttacgattttctgatgtgagaatttattcagagcttttcttattataagcgcgccaacaatcattcctattgagaaaaaagcttgtattatcccaaacaaattagaactcaattttaaaatattatttactatataaggcattggtacatttattgaaagacctatgaagaaatttaacgcaataaatgttccaaacatattcactataccttttttacttcttaaataggttattccgtgaattatatcagtgaaaatattaaatttttctccatctttttcttcatttctgtgattaaataggaaatccataaataactgaagaaatgcggatatcccaaaagaaaaactattgattattatgaaaagccttatatctaataaagcgaaaatcatcccaccaatcattggcccaagtatggaagatgcagattcaattattttgctaatagaatttatctgaagtagctttttttctgatactagatttggttttgcggtttcaatacttatcccatatatattagaaaatacattcaatataaatgtacttaaataaatcatagataaactcaaaggatgttcaatggttagaatgtatagaacaagcaatagtataccatttaaagtatctgtaattacagcaagtagtttcttattaattttatcagcaagcactccagcaaatggatttacaagaacagtagataatgctcctattactagagttatagcaaaatttagacctgaaccagtaatttttaatacatacaagctaatagcaaaattatatatagaagttccaaatacagatataaagcttgcaattgaaaataaaactatatttaataactctttattcctcgaaaaattttttagtaatagaacttttattaacattgttaatctcgctttctcttaatgataatctattttttaaattcaatttaattttaaatagtagtgttatcaccatatcaataggttaattaacaaagtttaatgataaaataaataaaagatagggttaaccctaccttttaccaaagattaaatatgaatatactttttctccatctctaaaatagctttcatattttccacctttttctatatagtttgatacattttcctcaaaaatattatagtcaagttttgaaatctgttctttaatattatttaaaataaaatttttccgatatttatcttcaattaaacagtttgctgcaaaatttttgaataaaatataggtccctattatatttgaactatcctttacatatctatcagctacattcaataaaaactcttcatgatcaaaactgtaattgcttgtacctgaaatgtctaaaagcatatcagcagatttatcttttataggaatttgctcaaaatcagaacaaataaataatatttttttcttgcaatttatactctccaatatactttttaaaaataaatgtttatttatatcattatcaacagcaatgtatattgaattatcgggtagatttctataaacatttcttagaaaaaatccaattcctgaacctaattcaagcaaaactttatgttgcaaattttgaaaatcaatctttttataaatccaatccattccacgatagacattatcaagataggttgtatcagtagaatttatataatctgtgatgtaattaaagtcaaacttaaaatcagaatctatttttatattagaaactctcaatattccatcttcaattatgtattcctctccacaagagcaaatcaatttcccatttgttacttggttatttgctatatttccttcacgaagctttaaatcctttttacatttaaaacatctcaaaagatcaagagctttaaaatctatgcctataatagatttatctttaatttctacatttgaaagcaaatctagttttgttttaagcttttgcttcattaatttaagttctcttattttattttctatctctttatctttgtttacgaaaaatgctttaaaacattcattttccttatatcttgtaagctttgctaatcttttaaacatgaaaattgatttaatttcacttaatgaaaatcccattcctttaagtaatagtatatcttccaaatcactttggcatctatcatcaaagtcatattgccctccatgtttttcaggcattatcaaagtcatatttatataatgacgcacagtatcaatagttaaattgttagctttaacgaatttaccaatcttcatataattcctccatctataatgaacttcgataacatctcttttaatttctccgcatactattcaattaattaaattttttttaaattatcattgcctactttgaattgaatatttagctatgttctcaccttgcagattctttgatagactgcttatatgatttactaataatattttagcataaatgaatctgccataaaatttgattattatagaatgaactttcttaatcatttaataataattctgatttgaatattataacggcgtttcctgaaactttgacttctactggttcattatcttctatctttacctcgacttcgatgataccaggtctatttatggcctctccctgcttagctttaaatctaaataaagaattattgtgcttgacaagattgtgatgaacaagatatgcgcctaatggaccatttgcattaccagtaacaggatcttcattgatacctattgaaggtgcaaacattcttccgtgtattaaaatatcactctcttttgaatcagtagtaaaaatatagtatccattacatttaattacctcgcttaacttagaaagtgcactataatctggctgcaatgtatttaaggtttcaatacttttaatacctatcataactttagaatgacctgttgacactatttgaattttataatcatcaagtaaatcactttcattaattttaagtgcttttaaaagttcttctttgtttataccatcaataatttcgccaaattcaattttcccctgtgtcataataattttgtaatcattattttcttttattatatcaacaggtaaaattccagcgcctgtcttatgataaatccttgaagtttccaattcattttctatagcacgtacataatgacttgcaatagttgcatgtccacaaatcggaacctcgcttgtaggtgtaaaaaagcgtacttgaacatcatactcattactatttgaagcaaaaataaatgctgtctcagaattgttaagctctctagcaattttctgcatttcataatcagttaatccatctgcattcgatatcacccctgccggatttcctgtaaatttctcctttgtaaatgaatcaacttgatataaattatattttcttgccatgtttcctccaaatatactttaatttataggctaaaccatttctttaatttatgggaattaatacctatccgtaatataattaattatagttttactttaattcacttacaagtacgcatttaaaaagtaagatttatgtttgggttgaaaaaataattatcattaacattcttcttatgcaaaataatgataataactagtattttttgagtttctacatatcacttctatgatactcgcaacataaaataaagaaaaatgcattttaacaaaggagaaagaaaatgagattaaatggattaacaggaagggtaataactccctcagataaagagtatccaactttgagacttgaatataatctatctattaataaatttccattagctatcgtttattgttatacaccaacagatgtatccaacgctattaaatggtgtagaaaacatcatgtaggacttcgcattcgtacagggaagcataattatgaaggctattcaacagataatggcgtaatattaatagatacgactcctatggacaagattgaagttaatactaaaaatgatactgtaaaaattcaagctggggcaagacttggaaatatatactcaataacttctgaaaaagggtatgcctttaatggcggaacatgccctacggttggaatttctggtttggtactaggtggaggaataggtttatcctgtagaaactttggcttagtatcggacaaccttatagagctgcaattggttaatgcgaaaggtgatctaataactgcaaataatcatataaaccgtgatttattctgggcctgtcgaggagccggtggaggaaactttggagttgtaactagctatacttttagacttcataaggtaaattatattactcttatacagcttagatggaataatatttccagggaaaaatttattaacctatggcaaagctggctaagaactgctgataaaaggattagttgttttgctggtttaagtaaaaaaggcatatatttaaatggattcttctatggacctaagtctgaagctgaaaagattttaaaagagtttttgcttctcccaggtttactagataactctttaatagaatatgtaccttttatagatgctgttaaagccattggtgctttttatgggcctcctgatagatttaaggctactggaaggtttgtttactgtcatctaaataaaacaaatatcagaaatttaattaagtatatagattgtagccctggagatgattgttttatcagactttatactttaggcggtaagataaaagatttctccagtgattattcagcttactactatagagatgccagctatattattggaataacagcagattgggaagaatatgaagatggcaatgtatttaaaaactgggtatcaaaagtttttaaatatgtggaaaccataacaaatggctcttatgtgaatttcccttatgctcagcttaaatattatggctatgaatactatggtgagaattatggaacccttagaataataaaaaagatttatgacccagaaaatgtttttagattcccacaatcaatagaaccttaaccccataaaaaatagtctgctgattttaattcagcagattattttctttcaagttaagttactgaaattttaaagaacaatttctatttaacaatctcaatctggagttgtacttcctgaattgcttgtatatattattagttaacaaacatataatatctctaaatcaaacttatactttttcagctacttatgatacagtaaaccgtatcactagaaagttatattaaatttttaagaacttatattctataaacttctattgcttataaccttctccttagattcttctgatgtaagttttattacataacaaataatgatcattgctgtaaatgcagatattccatatacaaaaccaagtccagcatatccaaatttattaatcgcatttccgccaacaataactccaatagtagtcccaatatacataaaagaactatttaaactcattacagttccacgtaatgatggtacaagctcgcttattattgaattaagggcagctagtgaggcacctgcactcatcaaccatacaagaatacaaggaattgccaaactaatattagtagatgtatatggtagagtagaaagagctactgctaaaattgttaaccctataataaccactcgccctttaccaaaataatcacctaataatccacctgataaatttcctatcaaattcccaaatccaaccacaacaatgatagtacctattgcactaacactcatattaaacgaattagaaagccatgctcctaagaaagaatacattccaaaactagcaaacatcataaagaaagtaacaagtaatccaaatacagctcttttatttgttaaaacaagctttaaagagtgaataagatttaaagacgccgtaggcttagttacttgtgtagtggaattttcaattacaggaaatgaaaacattattaataaagtaataattgcacctaaaataccaataatatagaaagaaaaccgccatccggcaacaccagctacaaaagcaccaagtggaactcctagaatttggctaatggaaagtgcagctgtcacaactccaacaacgcggcctcttttttcaaaaggaataatgtctcctattgctgcccaaacctgtggtgaggttgctgctgcaatacctgataaagccctaaagacaaataaagaccaaaaatcccaagcacatccgcatagcaatgtaaaaatactaaaagccaatattccccatttaagcattgctcttcttcctactttatcggataaaggaccaaaagcgaaaccacagattgcataaggaagagagtatgcaattactaaaagtccagattcagatactgtaacattaaaatctctgcttaaagttggtattagcggagaaactaaaaatgtatcagcaccgattaaaaaaataatcataaacaaaataaaaacaatccaatttaaatttttcatattctctttattatccataataaaatatcatcccttcaaaacccttttatttcatatatgaagtattttattagaatgaaagccacattaatattaaagttgtcttttattaatggaaatacacctctttgtattttttattgaatccttttacaaaaatacttcatatatgaagtatttctctaaaagaaaaaccttattaattaaggttatcttctatctttgcaagtaatttatataatgtttgctgttcttcttcacttaaaacgccatacatatcaaataagaacttttgatacgcaatgtccattttagaacgtaccccaattcctttttcagttatagaaaccaatgtttggcgcttatcagaagaatttttaaaggttgctacaagttcttgtttttccattcttcttattattgttgtcatattacttgcagcacattgtactttatctgttaattcagacatagtaattgtgccttctaatggtatatttcttaatactccaaattgaactcctgtagcttcatatccagaagttgaatcaacaaagttattaacagaaacatcattaacatgacgaattttcatgtaaatattacgtaataaatcttttgacatatttttacctcttaaatacttcatatacgaactatttttataataaaacttatttaattctttgtcaatattgttatatttatatattacatacaattatttcaaccttaatcaatacttggttaacatattttttcattgttataaaaataaatactctctcttaattcataattaatttataaactaagacatgaattgtctttatgttatctatatgatcaatattattatataaagatttttatattaatcaacctcctgttcttctcttaatttacttattttagtctatatgatattttatatataaataagtatgtactttatggaaaatgtttatcatattttgtttagaagaatgtttaaataaaataattattatttatgaagctgtactatatgattttatatattaacagtatttaatttgtaggagtgtaaaaatgaaggttagtataaacattatctcttctgaattagaggaagaagttatttttaacgtacacaatgttcaagaaaaagttactgaagccatagaattactgacatcatcaaatgaagttattaaacacttacttggaagaaaagaagaaaaatattacaaagtaaacgtggatgaaattttttacatagaatcaatagatagaaaagtattcatctataccaaaaaccaaacctatgaaatttctgagaaattgtatgttcttgaggaacaattagctggcatgaattttattagaatttctaaatctttgcttctcaatattgataagatacactctttttatccaaagttaagcggaaatctagaggctcttttaactaataatgaaaaagtaataatttcaagaagatatgttgcaaatttaaaaaacaaattgggaatgagggatggcaaatgagctttaaatatttaaaagaaatattaaaattaacctcagtagtttttacagtaataacattatttcagcttattaccaaacaatctttagataatgaaaagctttgtgaattattagctttatcgttatcattttcattaataaagatagttatcaataagtatattatttctaaggactcaatatttaatccattattatatataattataatttggttaatgatcactgcatcaaattatctttttaactggaatatgtccttattattaatgctttcaacgtttattgaagttatattaatttacatatgtgtacgactcattaattatcaatatgagaaaatagacgttaaaaaaatgaatgagattttagatagaaatagaaaaaacaaaaaccaacagtaggcttctgcttattttatattagttttaataccgcttagttatataaatataccgcttacgtaaatacgtattgttcttatttaatttatattgtactcttacaacatgatatgaattaagaaagaaggttatattattatgatgattattaatattatttcagaggtatttagccaaactcctttttatgtttgggttatatttatttatcttttaaagcgtggaattaaagctagtaaagatggtgagttatcacttcctaaaatgttcattatgccatctatttttattatttggggcttagaaaagctactaacaaactttagctatataagtatttctatgattttctataccatttgtatgtgttttggtactttaatatcatattatttatattctcgatatagaaaaatatatataaaggatggctctctatataaaactggatcatatttaccactaactattatgatgactaatttttttgctaaatatctattaaatgttgctatggctgttaatccattgctgtacagtacacttttctttaatgttttgtattcattattatctggcttttccgttggattatttatcggaggcattttacaagcatataaatcttattcgaacttaaaagcattagcttagatatatgattaacacatctaaattaaaacttcacatgtattttatcagttaaatcccctactaaattaatatgcttcccctataatagacagtaaaaataaaaaactgtttttataaagggagcatatcaatttctaacttatctgattcaccaatagtctttacgactgaagttttatctcctacttttatcttgtcaatacttaatccttgcattattttaacctcctattattttaatctatacacaccgaaatgtttagaggtcaacggcctccttacatttcagctctccttttatctgatatctaacatcttcaataaattaaaccaaattcagcaggagtataactccacctgaaaaagttctatattattcagcgctctttatttcattaacttgatctattaattctggtattactttagtaagatcaccaactattgcatagtcagcaattttcattattggagctgaatcatctttatttacagcaatgattaaatctgaatcttgcataccagcaacgtgttggatagctccagaaataccacaagctatatatatttgaggtctaacagtcttaccagtttgacctacttgatatgctccatcaatccatcctttttctacagctgctcttgatccagctacagttccgcctaaagcttctgccaattctttaagtaattggaagttttctttatttccaactcctctaccacctgatacaatgaaatctgcttctgctatatctacgatatccttcttagcttttatagtttctaaaactttagttcttacatcgctatctgctaatttaacatcaactctttcaattttacatttagatggatcagttgtaatctttgcaaatactcctggtcttactgttgccatttgtggtctatgttctggacaagcaattgtagccattaagttaccaccaaatgctggtcttgtagctaaaagatctccatttgtaacatcaacgtcaattgatgtacagtctgctgttaatcctgttgataatctagcagctattcttggacctaaatctcttccgatgaaagtagctcctacgaataatattcctggttttctttcatttgctaaatcacaaataacttttgtgtaagcatcagttgtatagtgttctaagtttttatcatcagcaactaaaacttcatctgcaccgtgctctgctaaagtttttgttaatccttctatgttgctacctaataataaagctgtaagatttactcctaattcatcagcaattcttctaccttcaccaagtagttctaaagatactttttgtaattcgccttctctttgttcagcaaagacccaaacgcctttgtaatctgctatattcataataaattaccctcctattatcttagatgtagtgtttttcttttaattttcctacaacatagtatgctgcatttttaggtgcttctcttacgatttctcctgcacctttaacttccttagtcattgacttcttaacctttgtaggtgagcctttaagccctaattcagctacatctacatctatatcagctgcgctcataactttgatttcatcatctgaagtttcgaatatatctaaaacattcatatatcttgtttcatttaattcttcgattgcagttaatagacatggagttttaacttctactacttgatatccatcttctagtgctctatttactattaatgtatttccttcaactttaacgtctttaacgtaagttacttgaggaatgtttaaatgttctgctatttctggccctacttgtgcagtatctccatcaattgcttgtcttccagcgaatactaaatcataatctaatttagctatcactcctgcaagtgcctttgaagttgctagagtatctgctcctccaagtgctctatctgttaataggatagcctcatcagcacccatacataatgcttcccttaatactgctttagccattggaagtcccatgcttattacagtaacttttcctccaactttttcttttaattgtaatgcaccttctaaagcatgcttatcttctgggttcattattgatggaacaccatctcttattaatgtaccagttttaggatcaatttttactgctgtagtatctggaacttgttttacacaaactactatattcattctaaaagtcctcctatcttaaaattcttcctgcgataaccatcttttgaacttctgaagttccttcgtagatttcgcatattttagcatctctcatcattctttctaatgggtattctttagtgtaaccatatccaccaaagatttgaactgccttagttgtaacttccattgcaacatttgcagcaaataatttagctcttgcagcatctactgagtaaggctcaccatcttgcttctttgttgcagctaggtatactaagtatttagcagcttggattttaacatccatttcagctatataccattgtaatccttggaatgctgataatggtttaccaaattgttttctttctttcatataattaactgcttcttcaaaagcaccttctgcaatacctagagcttgggcagctataccaattcttcctccatcaagagttttcattgctattccgaatcccttaccttcaacacttagtaagttttcttttggtactatacagtcttccataactaattcagttgttgaagatgctctgatccccatcttattttctacttttcctattgagaatcctgggaatgatttttcaactatgaatcctgaaacacctttagtacccttgctcttatctgtcatagcaaatattatgaaagtttctgcaactccaccatttgttataaagatttttgaaccatttaatacataatgatccccttctaatacagcagttgtttgttgagctccagaatctgtaccagcacctggttctgttaatccgaaagcaccgatttttttgccactacaaagatctggcaaatattttgctctttgttcgttagttccattttcattaattactgttgcacataatgatgtatgcgctgaaagaataactcctgtagtaccacaaacttttgataattcttccacagcaattatatatgaaagaacatctccgcctgctccgccaaattcttttgaaaatgggatccccatcattccaagcttagccattttttcaacgttttccatagggaatctttctgtttcgtcgatttcagcagctattggcttaacttcatttactgcgaattctctaaccatttgttgtactaattgttgttctctagtcaacttaaaattcattaaattatcctccttgttaattaaacctatttaatagcagataaatatatataaatctttaatatattatcaattaaatactattcataactttaaaatttattatctattcttaaaattattttctgatcttctcacaagttaagaaatctgttgctcgattgactcaaagacaagttactaagtattaaattgcttagcatttgaacaaaaaaacagatatttatcctttgttagaataaatatccactcccttattataatatggaaaatgctctttaaatcaaaacgtgaccacattgttattaggcatttcaagtcttatttaaattaatatataaagttgactgcaaatagaatgtacttcttccaacatatacataatatatccaaagtactattgtacctttaggggattctcatcctttattgtactacacagcattataaagttatgtatatattctgttaaatgcttgtttttatgatatgaaatatagaacttccttgtaaagttatattcttctaaatttatttttgcgatttttctattttttaattcgtcttgtattaagtattgagataaaagtgctattcctttattatgaattacagcttcttttatagaatcaatacttttgcaaatccatgtaacattaggaataatatgcgattcatcaaaaatatcttgaagcattttttgagttctgcttccaggttcacgggctattactggttctgagcttaattgattaattttaattgtttgttcagcaaggggattttctggatggcaaacaagcattagtttatcatctaaaaaatcaacatatgttaactcactgcaaggagattccatttgaataatggctacatccaaatcatatgataatatcttttgttctatgtaggagctatttccaatttcaacttgaatatttacggaaggataaaggttctggaatttctctaatattgggtaaattaatttatgaccaattgtgctacaaactccaatgcgtactagtccttgataggacagatttctcatttttaagttcatttgccctaaatcatataataattgttttgcatggaaaagcaattcctttccatcccggaaaagaaatgttgcatcatattgaagattgtcaggtactcatacctgaacatattaaagtggattgcagtttgctttctatagcaaaaaaattaaagttggtacagacgggtgcaggatttgacaatgtagatatagatgcctgcacgcagcacggaatttgggcggccaatgctgcaggagttaatgcacaggcagttgccgagcatgtaatggcgctgatattgtcttattataaaaacataccgtttcttgattctttcatgaagaataggatagatgaaaatgaattgcagatctgaacctcttccaattgaaagtgaactccgaaatctaagaaatgtgatacttactcctcatacagcaggcttgcctgatagcctcaaattccataaaaaaagatatgatttcttcgtgaataatataaagcgtgtagagaatggtgaaaagcctgaaagcaagctaaatcaattatagctttgttgcaatgaaaataagagccctttattctactttgtatatgaatgctatatacaaagtagataaaacctttttatcatataaattatttcctatatatcaaaacctatttgaacttcattattctaatcttcaaaagctttcatataattaaaaacttctttcactccaaaaataatattattctgctgacaggtgtctttaataattttcattaatttttcatgattcttacttaacacctcataactattcccatattctcttatatatttttcttttaaacctttaaaatgcttatctaaattcttataataatattccctatttccatttcttaatgttaatccaataccaaatactacaattcctttaactttagcttctatacaataatctaaaattcctcttatatttttctctgtatcatttatataaggcaaaataggacttagccaaactactgtaggaattttgttatccctcattatttttaaaacttcgaatcgttcttttgttgtagaaacattaggttcaataatcttgcataattcttcatcataagttgttaatgtcatctgcacaatacactttgcttttttatttatactttttagcaactctaagtctcttaaaattctatttgatttagtttgtattgcgagtccaaatccatacttatcaattatttctaagcattttcttgtattttgaagattttcttctagatgaatatatggatcactcattgcacctgttccaatcatgcacttttttctttttttcttaagtgcgtcctctaatagctgcaacacattagccttaacctcaatgtcttcaaaaatatgatccattccataacaatgacttctggcgtcacaatatatacatccatgagtacatcctctataaatgttcattccattactactagataatataccttttgccactacatcatgcataaaatcgtaactcccttcaaattaacactgtacaattaacaattaaaagtgattaaccttatcggattttttccaatagtttctgaaataaattaaatccttcattccaatcatttatattggattcactatttatatgcccttttctacccacagatattgtttcaaggccccattgtttacctttttctatacaaaacagagatgaggaatattgatcgttctcactataaattaacattccaggcaactcaaggttatcctctggcaaatgttcaaatgaatctaaaaaacttggaaattgttccttgtttggatcaggtggagccactaagaagactgctttcaagtacttttgtatcttaggcatggcttttacagtaagcaagcagccaaggctgtgtgcaaccaatactacatcacatctattttctcttgaaagattttctattaaatttttttcccattctttatatattggataatcccattcctcttgggttattcttttaaatccatattttttctcccaaatactctgccaatgctctggcccagagttattaaggccaggaactatctttatattcattattaacacctcaaaccatcttactttttctaaaagatttcatttttgtaccaaattctaacatacatatatgctaatgtaaatgcagttattaaaagcaaatataaattgaatattgtgctttccctttacatttaagcatttatttttagtatgctcaagctacgtttttaacttgatgattagattattataccttcaaaatgatccatttcatgttgaattatttgtgctgtaaatccattaaacacttgctttttcttattaaagtttctatcaagatacataacctctatcgtttcatatctctttgtttttctaaatccaattaaagataagcagctttcttctgtttcataaatcttttccttttttaatataactggatttatcataggtacaataagattgcctacagtaaataccaatatgcgcttctttactccaatcatattagcagccaatccaacacaatgctctaagtttgctcttaatgtatctattaaatcatcaattactaccatatcatttttagtttcctcttctgatttttgccctaaaaataatatatcttttactattggttttaccatactttatacctctttttccgttatattttttataaagaataggattcagtcttaaaatacatcttataacctaatcctactaaataaatttgcgtaactatatcattttgtataattaatcataagttcttcatttaatacacatctctgactaaaaaaattataacataaaccaatgacagttttaatatcattgatttatgttttaatacttaatcatgtcctatttgttttttaacaagtgtttccctctttttagattctcccctaaatcatttaactctccacaattttattctctcttcaaatttcttatctctcaatataaaaagctgttcttctatcctaaatcacataaaaatcaagatatttttttgaacctccagccttcaaccccgcattattcaagcatattctgaagaatatatattctaatattcttcagaataaatattgcttagaatatatattcttcaccatatttatggtaaagaatattagaatacagtgattctactgactcatttttatttagaagatgcattaaagaaaacttgtaaaacatctgcccactacatttaactctgtattatacttttaactcaagaagacattattatcattattgatatttgacatttgtacttgatagtcttctagtgatatatgtccaccagcaaatttattttctagtattgtcatcttttcagtctttgttaaaactctttcactgtctatgttaatagcatcttcttcaccttctagtggagttaatatatgatttaatttatcatatgcttcaaaatacctaagcccaaatattctctgtgaaactgcatttatatgaataccatcaggattagctgttaatcctgatgctgttacaaaataacaattcttgtgccctttggcaaactctaaaagttcctcatttactttagggtattctggaaaatacgcacctaaaaatccacttcctaaatagtctccaatttcacctataataacaggaatatctggctcaccaagctctctacgaaatgcatcaacaattactgaaaactttttattataaagcttgtaaagccctgaaagagaatcactttcaccttgatgccatagaattcccttaagcttactactttctttagcaagttttgcttgtaatatagcatgtttgaataatggaccatccactgaccaatcatctaaacttgtaccaccatcagcacaaggtattaaacctatttcttcatctttattttttctacaccatgcagcagcaaaagaagccgccggaccaatgccagaataaggtctatcatagtttatcggctccgtcattatttgccatattccattacgcattacctttatacgttcattgcaaattagtggaacatcttttaaaaatcctctaccagccatattggattgaccaaccattaaaaacgaatttatcataattatcttttcctccttgtttatcacttcactttttgaattacattttattgttattaatcgacttatgtactaactgataaatcttccaaattccttaaaatcgaggtttactaattatcatattagctttattatttgaacatattcatatatctaaagtctttattattctagaatttgtacttgaagataataaaatattagcctttgatacatagtacaaataattgtacaagtctagtttattattcaaaatgtatgtggattttgttattgatattatctattctaaataaaaatatcaatcttagtatttgtttaattactactaaagcttgcttttattttatgattttctgatctaatataatagccttaagaatagttataattattctttcctgaacattaacaaaatcgcagtccaatatttttttctatcatattttaaaaggctcccttctaaatcagcctttctcataatttatcccctcaatagtacaatatgcacagatttttcagttatatggttttctagagaataaaaaaacacctatagattaaacacttttttcatgtgtttattccataggcataattttagatatctcttgttttatttattcactatttttcttaccgaatcatatgataaacaatatttctcggcaatattagttattgtcgctccatttttatattgattgattatttcactattacgtttcttataatattctcttgaaccactattttctccccactttcgtttttttctagaagcaggaatatataacaattctccatctacataatttaaaatttcattcaataattcttttggaagcacatctgctgcattgatatatttcatacttctacccctttacttaatcaattaaataaagtgcagaattagcagctaatgcaactttttatcccacgcagtttgttgcatttctactattctgcatgggcataagcactctgtaagttattttcattttttaaatttataaacatacctaccacctccaaagtcctataaatgatatatatgagtataacatagttaatctttaaatccaatgtctgaacacttcaattttctagaaggttatatcatcaagattaaccctgatagtcaaagtctagtaggaatgatgataattagttattaaccacaattgcttaatcagtttctatataaaattctgttagcttataatattcaagctatccaggggtgtataatttatatatattctctcattaattgatctaaaccaacttctgatgttaacttttcaagattattaaatatcttctcttcgtcccaattccaccattgaagcttcagtaaaaattcaattttttcatcactaaaacgctttttaataaacttggctggattacctccataaatagtatacggctcgacatctttcactacagttgaatttgtagaaatgatcgcaccatcaccaatcttaacccctggcataatagttacattttggcctatccatacatcattaccaatcactgtatctcccttaaaaggcagctgttccaatgttggagtgaccttctcccaaccacctccaaagatattgaagggataagttgtagctccatccattctgtggtttgctccattcattataaacttaattccctccgcaattgcgcagaacttgcctattataagtttatccccaagaattcataatgatgttctatattatcataaaatttctcaggagattttttattatcactataataagtatattctccaatttccacattagattttttaggtagattacttatataacaaaccgtctttatatttgcatttggatatagctttttcttatctggtcctgtcatagagtactcactcctttcagttcttttattttttgatttcttacttctttagaatcaatgttatggtcaaatgaatattggtcctcggtaataatttttttaagtttccacttgcctattcggtaatctcaatttatagcctcttctccgctataaaatttctatataaccttctgtcccatttacacgaatctgatccccgtcttttatcagtttggtagcatcctccactcctacaactgctggtaatccatattcacgtgctataacagctccatgagtcatgagtccaccaatttctgtgactagaccttttactgatacaaataatggtgtccagctagggtctgtaaatgatgtgactaatatatctccagcttctaacacagcatcttccatgtttagtattacacgtgctcttccttctataactccagaagaaacaggtagccctggaatcgcgccagctggaatattttctcgcttgtatttacctgtaataatttcaccatcagaggtcataacacgtggtggtgttagtttttcatttaatttatgttcttctttacgcttcattataatatcataatcaagtttatttgtgtgtactactttgcgaagttcctcaagagtaaggtagtaaatatcttctttttcatgaataacgccatcttgtacgagtcgttccgcttctttcattaaagcctgcttataaagaaaatagcggctaatcataccgtattttgggtattctcgataacctataaaattcctgatcaagtcgatatttcgttttgtctctttggccttttcttcaccatcaggtaactctcttaacctacttaataactcttgttctttattcaaagcttcctgtcgcccttgctcaaatttcttttggccagcactcggctcaaagtttttaatattgcttaaaatcatagggacaagtgtaattggtttttcgctgaatcgagttctagtaatgtcaatttctccactgcagcgcattccaaatttcctaagataagacaagattgcatcccttgtttcctttccaccatgaaatttaatcacttcctccaaaaagttatcatcttttacatgttgcaaaaaatcaactatttctggataaggacgtatcgcatctgccacatccattaattctatacccatttccgaagtaatattgtttggtacagattgagaaaggatatctgctgcatttttttcacctaaccactcgttcatcttttcattaatccagagcgaagcatttatagcagacataaatacaactgtactttgtggatcaaataaaatcctctttaactcatttatatcttctagaataaaatcaattaaatctactcctgatttagtttgaattttttgttttaactcctctatggatgattgactcttcttaatcagctcagaaacgattgtcgtatccaattccttttgtggctctgaacctgcagctgatatacttctattacttttaatgtcactcttctcatttggtaagcattttatgaaatctcgctctattatggtcataattgcgtcttctgtgagaggttcaagttgtttcatattatttaataagttttttctgccatctggtgaagccagcattggtgccacatcaacaaaaaatcttccacccgctttaaaccatcgaccaaaagatattaactcctttaaagacattccgagtggcttcaaaggatcggtcatcatttgttgatgtcccacagataaatatacatgttttccatcatcactagcttcagggaccggatataaagtggtaattggtcgactctgaacaatataaaatgtatcattagccaaacaccattctatgtcttgtggacacccaaaatgctcttcaattcttctccccatatgtgtaagtttcaaaatctgttcatttgtcagcacttgactattttgaatttcaggctcaatctccaacttttcggtaccaccatcttttaaagaatagatacctagcttcttagtagatattttcttatctactattttatcattgcgtactctataattatcagcattcactaatccagaaaccaaggcttcccctaacccaaagcttgcatcaatggacaccacttttctattacaagtaacaggatcagcagtaaacaaaattcctgccgccttagggaataccatcttctgaacaaccacagaaaggtgcactttattgtggtcaaatccgttttgaatacgataaattactgctctctctgtaaacagtgatgccaagcactttctgatatgttttaaaattgattcctttccaataatatttaaatacgtatcctgctgacctgcaaaagaagctgtcggcaaatcctctgctgttgcactagaacgtacggcatatgaatctttttcaccaagtcttaatatagatcttgcaatctcttcgttaataacctcaggtatagttatcccttcaattgccttgcgaatttcactgctaatttctcttattttttctatgtcttctactccaaaatgcgataattcatctaataaacctttaagttcttcattattttcaattatttttttatacgcttctgttgtaacacaaaaaccttctggtactaaaatttcagtaattctagataattctcctagattagcgcctttccctccaaccatggaaatctttgttttatcaacctcctgaaagctaagtacatatgaattcatacacattccccttcctattttaagtcggaaccctgagtagtttaattcacttgctcacctgcttatacttccgttaaagccatttaaacttttaatatattctctatatacgggtgaagcaattttctacgaagtgattctgttcctatgatacacagaataagcacatattataagcctgttatttaaaaatttcatatggtataataaagttgaggggaatagtttatttttataaattaaaatatttcactcccagaaatcgctactctttactgccatgtgatttctaaaggatttctatctaccagtcttttaaaattataaagtggataacctactaatagtgcacctgttactaccctatctttagaaatattcagcaatcttaaaagtggtttatattctgccatagaacaatattcaaatagtcctgaccagcaggttcctaatcctaatgtttgtgcatataattgcacatatgttaatgaaaagtgtgtattgtcacgaccaagttctttttgttctcttggagctgttgcaatcactaaacatggagcatctcttaatatggtatctttattattattgcgatactgctctattgtcgaaacagtattctgtacccacggtgaattttttaaagcaccattttctatagattcctccgtccagtcagctataatcgaagtaatttcatgtagaatcccatgattatcaccaatgttcctctacatattttctcacacagaccgcatttggtacatttttcagaattaactttaataaaattattcattcaattctctccttcatcgtattgttttacttaatttatatatttttaggaaacaatatttctaagctagccaccattccttttaatataatgaaatgaaaatctaataatagattatctggaagtccagttttatcaaaatcaccatctattttagctgtaacaaccgttatataatactattaatgattattttatataatcgatctttctaactataacaagtataacctgaccacatcatgtcaagttataatcgctgaattaaagtaaataaataccattccaaaacttgacgtgatgttgtcaagtttacttaattatactgattaagtagataaacttatttaaagggaggtatttttaattatgcaaaatactttaccatttgatattaataaagaacttgagggtaaacgcgtacttgtaacaggcggaactaaaggtattggtagatcaattgttgatcgtttgcttaatgcgggtgcaagaataataacaactacacgaactatgcctaatgatttgccagattctatagaattcattcaagcaaatgttagcacaccagagggtactgagataatcattaaagagactcttgaaagacttggtggattagatattttaataaataatgtaggtggttcttcatcctccacttctggagcattaagtttaagtgatgacgactggttgcaagcctttaaccaaaatcttttttcagctgtacgcttagatcgtggttttctaccatccatgattaaacaacagaaaggtgtaataattcacatatcatctattcagcggaggcttcctgggataatgactatgtcatactctgctgctaaagcagccctaacaaattacagcaaaaatctagctacacagtttggtggaaatggaatacgaataaatacagttgctccaggttttacagaaacaaaagctgctgagcgtcttattgaaagaatggcacaaaattccggaattgactataatgacgcacgtcaagaattaatggataaccttggcggcataccacttggtcgtccagcaaaacctgaagaaatcgctgaacttgttgcatttcttgtatcagacagggcatcttatatcactggtagtgagcatattattgatggcggaataataaggactatatagtctataaagacgatctactaaataattcaactaggcatattgtattatttagtgctcactagattattattaagaactttgtaatccttgctacccgtaatagcttgcatgtcatgaagaaaattctcttctaaatcaattgtcattaaatcgcacaaactacattaaatattttaggaggtaaaataatatgatcataaacaatttattattaaaattaaagaatagagatactgataatattaaaaaaactcaagaagttcttctaagcatgagaggaaaaatagaagttctgatagacatacaggcagaaataaatattcgtcctggtgaaagtaattatgatataattttgattacaaaatttgcatcattagaagatttagataaatatcttattcatccaaatcacttagaagttgctaaatttattggcagtgtcttagatacacaagcatccgtatgttatagcttataaatagtaacacaactacttacatttaaaaataatagttagtatatttaatactaaaataagaaacttataccttcctaattatcttgaaaaagttaatgtaggaaggtttattaaagttaaaaattaattactaacatatcttgattattaattttataaaaatagaactattataatctttttatactttaaaaaaatactatataaaacaatgttgggtgtaaactttaaactcccaaccttgatcttataattattgaatgatattatatttcttatatacagattaaatagtcttaagctatttattaaattatttattattagtatcatataaatttctaaagtctagttttaattaaaatcttacttacttgagttttaattatccttcttacctcatgaagtgctttctttaataccaattaaattaggcaccttcaaaaattgctaacattgcagctattctttgaagatgcctaaatatataaaatatgacgctaggcattaccctataacgctaaattatatcttttttaaaatagttcatcaatcaactttattttttatcatttagtatcatttgttaatcattattatcattatatacttttttaaatatctattcaatatattttataaattaaaagaataatgttataatattaatcaacaacaatactaaatgataataattggtgaggtgcctaaatgtttactgaagaaagacttgaacagattttaaatatacttaataaacatggtagagtaaaagtaaaagaactaagtgaacaatttaatgtttcagaaggtatgataagaaaggatttacaaaggttagagaaagatggggccctcaaaaggacctatggcggagctatattaaatagaaagatttctaagtccagctctataaatattagaatgaaggttaacttaagtagcaaggagttaatctccaagaaggcttttgaccttatagatgatggagatgtgatttttttagagtcctcaagtataaatttttttctagctaaactaatagctaatagtacaaaaaaaataactttggtaactaatatgcctataattctgccactttttaatgacaatgaaaatgttatattaatatgtataggcggtgtatatgataaaagagatggaggcattctaggatcggaagcaattaagagtatatacaaatatacttttaataaaggttttgtaggaagttcaggcgtgaatttaatcactaatagcgtaggtactgttctgttagaagatggtaacctaaaagaacttataatttctaatagtaaagaagtctttttgcttgttgaaacagaaaaatttaatgtagacagcccttatagatttgccaatatagatgaattcgatgctataattaccgattcaaatattactgatgatattaaagaacagttgaataatttaactgttaagctattataagattgaatacatacagataaccaaactaagacctgaacttatgcatatgtctcagaaatgaataatatacttttgttccagtttctaggtaattctgatgggtgattcaaaattaccaatgaaacattccacaaaagtatatcactcatttctgcttggaagatacttcatggtctaagtatagtgtatgattgcgttatctatataaccagcatcaaatctagacttatgagataatccactgaaagtagtatgctttctttaatgtaaaaaaagaaagcatacatatgtttatgtaaaccatctacatgtatgcttctaaaatttttttcatatatactatattacataaactatttatgaaaaaaatagtttattataacccctttttatataaccaatatgaataataacatggaattactacaataactaataaaataattaaagttaataaagcacttttcatctgtatgcaacctaatattatcatacaaataccaccaaatatccaaaggtatcctgccatatgatgagttttattccaattcatttcgctatttaatgtccatggtaatctaataccaacagtataattttgcttgcattttggtaaatagtttccaaccgctacgataataactcctacgactactgatgtaataatttgaataggaattttatatccaagtgcaataaataaggttactggtactaatacgactgaaataattggagcagaccactttcctaaatacttcaatgcagatggtgaattcattttctttgggtcgttattaagcttaaagtgtataaaaatattaattatcgccattaaaaccggcattccaaacgctccaactgcttttggcacataattatctgcaacacctgcataattaaaatgaataggcactacttcaggtaatttatcatatactccaaatgaaagaatcaatggcaaaaaacaaataatagttgtaatccataaaatgttatcttttttcatcttcattgcctccaaattgcgaaaaccaaagcattacttcttcaaataccgatacattgatttcgtaatatataaaatttttgtattttgtctctaaaaccaaacctgctttttttaattgagatatatgatatgaaattgttgcacctgtcatatcaaattcttttgaaatttccccagctgattttttaccacttttcagcattactaaaatttctcgccgaactggatctgacaatgctttaaaagtttctggaaaccccaaattatcatctcccttttgtattctatttagaaatatttctaaatagaatatatcaattcttatcttcaaagtcaatatctatttagattattttctaaatagatattacttaaaaagaagaaccacctctatctagatttggttctccctcattattttttatttaatatttattgtaaattcatctccaaccttttcatattcatcaaaacctggttctttaccacttttttctggcatttttactgcataaggtgtcagaattaatttacttgccttttcactcatatttccaactaatacattttcgtattttagcaaaaacccatcttttgttccccttgttaagtcaaatattactttattacctaaatcatcatatccttttaataaaatagcgtatgttcctctctcggttgaattattaattattttaccatatattttttgtcctaaggcattatctgtatacttttctaatatatatttatctccattttcaatatcaaattcatagtcaagatttactgttttagtatcaattttaagtttatctccattagttttaaattcaaacttccaagttccatttatatcatcttgataatttactgccattttagaaaatataattttcatatttaagtctccgcttaaatcaatatcttttattgaatttaaatcatattctaatacttcttgagtagtattagaatctaaatttttaatacctccgcttgctcctgtaaatttaactttcttattatttatatacagagtcatttcaccattccaacattcgtagtgttttaaaatcctatcggagctaatattagtagatataagtaattcattatcatctaatattacctcatttagtttaacatttacaccattatccatgacagatttattaataacagtactataatcctctaagttcctctctattcctaggaaacttgaaatactttcgctgaataaatttatttttgatatggcgtaagctcctgtatttccaaaagacataccaactagtactgctattattgcagctgcagctattatcttttttccgacattttgttttctactcttttttatagatttcctaatattctttttaagtgattccttttcaatatcattaaaatcttcttttttgtattcatctaaatcgatgtttgcttcattaagcagactatatatgttattcttcatgcttaacacctcttctattatcaatattaaaaatatcttttattctcttttttgccctagataatctattgtatataacttcttttttcattccatattcgttacttatttcattaatgtccatttcatcaacatatagcttataaagcaaatttctgtccttctcctttaaacatccaagtagcgattctacttcattacttaattcattttctaaattcttcgattcaacaccatcttcactgatattcaaatcatcaatattttcatgttgtagatcttttaaatattttcgtttataatcaatgcatttaaatttacatataccagctacccaatttttaaattcatttttactttcgtcaaagctatttatgttgttccaaatccctaaaagaatatcatttatgcattcttcttgaacactattgatcccatatagatgcttccctacaacagattttataatccaaccataattatcaataacataatctaaggctttttcatttctatttcttaattctttaatataattatcttcattcaccttcattttctacctcttcccgtaaagcaagcttgcatttagtaagtttgtacttacatatattaattcgtataaaaaaagaaaaatctatcaaaattataaaataattttaacagatctttctaaattctttgataatatcactttaatatattaaattctattttgattatatgatatttgtttattaaaaatataatttctcaaaggtttatatatattttataatgcacaattcacaattagtgctagaactcttgcaatatttttagatttataatgaagaattatttttgtaatatatatcgctttaagtaatctttttctcaatcagattaagtattgcatttactactatagctaagcctgctgacattaaggttccccatagtattttagctgtatttactgttctaagtccgtctaataaaacgcttccaatcccaccagcattaatagaggctgcaattgtagcaatacctattgtagatactactgcaagatggattcctgcaaagattggcttagtaactaaaggcaacttgacttgaaataatatttggcttttgctcattcccattccagttgctgcttctacaatggaagcatctacattattaagaccgtctattgtgtttcttagtagtatgtactgattataaagtactaaaactataattgcagtaactttaccaagccctgttattggcaccaaaatcgcaaataatgctaaactaggaattgaatatatcatagcaaatatattaaccagtaatttagatgctatttttgaataagccgctaatatcgttaataatgctgctaaaattatagaaatcactaaggtaattaagacaatttctatatgccctacaagtgcttttaataatttatcaggatattttaataaataatcaatcataaattttcaatcctccaaaaatacttcctgcccattcgcggaattgggcacaatcaagaaaataacaagttcatctgcctgcatattttccaccatccttcttcggcagattgtcttaatagtcccactatgaagccaatctacctcctcgcctaatgaaaaatattcatgccagctttggacttgttatttaccttcatgtgccttaattagtgattttacaaaatcatttgctggatttttagcaatatttcttggtgtatcaaattgctgtatctttcctttatccattattaacactttgcttccaagtttaaatgcttcattaatatcatgagttacaaacagatatgttttctttgaagtattataaatctttaataactcatcttgaagatttattctatttattgcatcaatagcaccaaaaggttcatcaagcagcattacatcagggttaacggctaaagccctagcaagtcctacacgttgctgctgtccaccagataattgggctggatatctattcctaaactcctttggctcaagaccaacaagttcaagtaattcatctactctagcttctattttttccttaggccacttaagtatctttggaacagttgctatattacctgctatggtcatatgtggaaacaaaccaacctgttgaattacataacctatttttcttctaaactctactggatctttactactaatatcctcaccaaaaaattcaatacttcctttatgtggatcatacaagcgattaatcatcttaagaagtgttgtcttgccacaccctgaagaacctaaaattgtaatgaattctccatgttcaatctttagacttacattatcaactgcgctatatgctgctcctttaaattgtttataaacattcttaaactctattgctatactcatcttgaatatctccttctatctattatttaatagaatcgtaatactctttagctacttcttcgtattcttttttatctacatcaacttctgcatttagttttgttatctttttagtatctaagcttgcactaactttatttaaaatatcagcaatatctggatgagcatctaatactgattttttaattactggtgccaaattatatggaggccatacgtgtttatcatcttctaataaagtaaattcaggttttactaattgaccttctgttgtagatgctggtgcaagatctgcttcattattcgctaatacttcatactttaaaccattgtcatatacctttgtagatttaaaatcaaactttccataaactttctctaagcctggaataccatcttctctcttatcaaattcaccttgtgatgcaaatctaatttcacctgcatgtttttgtaaatcagaaatagttttgattccaagtttatttgctacatctgtacgaattactaaaccttgtccatcatttgcaggtgaatagtcaagccattctaaattaaattgcttttcatattcagatttaactgtgtcataaacttgctttggatctgtaattaaatccttctttaaaatcgccaataatccagtgccagtatattctgggtataaatcaatttcatcatttacaagtgatgtatgaataactgagcttgctatattaggtactctttctactttatagcctttatcttcaagggccaatgcataaacttcacctactattgaattttctgtaaaatcctttgaccctatacgaattgtatttttatctccacttgaacctttgctatttccgcaagcaacaagccctccaagtgtaactgtaattaataacgttcctatgattcttttaatatttttattcataattatcactccccaatctaaattaatctttattacttgtcttttaattagcttatctaaagctcatatgtgattctttaatactttcactaatctataatcattaagcgacttaaaactatatattcgaattaatatacttatatctaagcagatatttttccaaacctaacataattacatttgcaagcattgaaagaattgctacagtaacaccgccaattagaagtaaatctgctctattaagtcctaatccagtaaaaataatgttcccaactccccctccaccaatataagcagcaagggtagcactagcaatgatctcaaccattgcagttttaattcctgttagcataagaggtgcagctaatggcacctttaccttccaaaaactctgtgcttttgacattcccattgccattgaagtctctatcataaattcaggaattgtattaaaggcaagtgctgtatttaataatatcggtggtattccaagtaacgctaatgcaataagtgccggtttaacacctgttcctacaataggaataaacattataagaacagctaagctcggaataattctaagagtattaaaccaagttgttacccatctataccaaactttatttttagtagataatattccaaagggaatcccaacaatcgctgctacgaataaggatagtaaacttatttctaaatgttgccctattgcctgcaaataattattcatgtccttttgaaaataatctataatattttgccacatattttcacttccctttttgaaaaagtataatttctaaaaattttaagttcttataaaacctttggtaaaaagattaaaagtgttaacgttcctaaaaaaatactatgcgactcctaattcaaagatatattgaattgtgcttaggcttaatagataataatatataattcctatctttgtaagtatatacgacatattcaaaattattattgtaattattgaataaaatttgtaactgttcatctatctttgattgcttaatcgcttattaattattggtaacttatctcttttcttccggtaattatatcatataacacttatctatgcaaacttatgttctcagaacgtaagtttgttttatagaaaaatatttattaacaaattaaaactgcttttaacttatagtcatctacttgattatcacttacatgtaattgtcttatgcaaaaacctaactgattatttttatatgcttagtaactcactttaatccctcttttttaactttagtacttttaaaggacatgaatttatagagaatactacatatcaacactaacacgtattaaatattatttactagttcactccacggaaagttagcttgacatttataaaatgcaatggtattatttaattacggaaagtaaactttacataagaaggagtaaagatgtgaaaaatcgtttagaggaaatacgaaaaaaacatggcataaagcaagaagagttagcaactgcccttgaagtatctaggcaaacaattggttcacttgaaaacggaagatataatccttcaattatattagcgtttaagattgcaagatattttaatatgaatattgaagatatttttatttatgaggaggagcaaataaaatgaaaaaagaaattacaacttactttgcagtagtatttggatttatactattaagtataggtttatatttaattaaaacaattattgaaccacaaggtattatgagagcattaccatatatatgtgtaggattaggatgtggaattttgagtcatggcatgggaaatgttattagtgccagagtattaaaaaatcaccctgatattaacaagcaaattagaattgacaaatttgatgaacgcaatattgccattggaaatcatgcaaaagccaaggcctatgatatgatgatatttatatttggggctttaattctcacttttgctttgatgggtattgatatggtcgctattcttcttttagttttttcatatctatttattattggatttggtatttattatcgttacaaatttgataaggaactgtaattaataatcgatattattgtattgagcaattatagatggacaaatccatctataattttttaaaatactttttttaatttaagaaaaaatgtaactactcaagtgattctaatcttttatctacatttcattaagttgcatgttaactatatctcttatgcaacgaaacccaatcaatcatattgctatttttacatactctttttatttcatttctaacttccattagcgcaaatccgagtaaattttccccacgccataattctggatttttgatattaacatcctcctcagacatttgtattccccatacattatcatatggacttgcctctactaatattttatcccctgtggatagaagaaatgtttttaatctttcattttgcatgaacttattataatttccatttatgacaattgaatatttagctttattccaaatttcttcatcaaaacctcttactttacgtccaaagctctttatttccttaggatcataactattcataattttttcttctatttctttgtctccaaaaaatctagctttttctaccatcatatattgttccataaataaatattcagtatgtccaatattgaacctgctcttccaccactggctaaagcaagactttgtaatccccccatcttttttaggatgatgcccccagaaataaatatattccaagttctttccatctttataatctgaaataaggttatttaaatcatattcaggcttgccatctttttgccaagtgtatgtccaataattattgtattcataaatattatctcctctttcccatcttttaggctccggaaacatttctttatactttttcttctcatcctcttctaatttattaaaccataagtaaaaatctatagcatatccttcaccatatcccattctccatccaatgcttccatttggaatttcaggatacattagccatagcggagccattaatagatttccatttttattttccataatatctttctccttacatctctgcttttatataataaaacatcactaactaattcctcatcaattgcattagcgacttttcctcattgttctccattattagtatataaatttatattatcctttatctcaaagctgataaactctcagttggatatctttaaatctttcttgattaatgcttatcttatttatgtatagaactaagaattctttttaatatagatctttagagccttaattaataagacaagagcatatattcctagcacacataagattaatactaaaattctaaatataatccctaggattgcttgtactattagactactcattacacacctcctgtaattataatttgtttttcatacaaatcattttcttttccggagcaccaatatcatttgcaatcacatcacatttagtcattaacagaaaatagatctttttcttttcttcactcaaacattcatagttagcttgccctttagcaattactacatccgcctttttatagacttctttaaactcacgacttgtcctttttaaaacagtcccaagagaaccatctccattatcaataacctctgcatattcatcaattcctacagcatatgcgtcttcagctatagagtcatttacaacaggtttacctcgtactccaaagaatattttaacattaggatttagttcttttatttttttcaaaagaatcttgtccatacatatttctccacaattatcacctaagtataataatgtttttgaatttaaaatatcttccgctagctctttagaatcatctattgcaagttctaactgttccattttttcaaaataatcaaatatatcctctaataatgtattgtgaataggattgaaatctatgatattaccaacaatggcataccttactgctaattgaaacgaatcttcagcttgctcaatcttcctctcaaattcaggtaacagttttaaaaacaatgtattatagtaatttctagtttctttatatggatcttgattattagtatgttcttttatcatgccaaaaatttctccaataatctctggtgtagttgcctcaaaatccattttactgagatatgtaaaaacttccttcaataactcttccttattattaacccctgtaatatttgctactttaataacttggttgaccatacacggcaagcatttatcatgtattttcataattgcaccttgtataatgaacatgtagtaaaaattcattatacttttcctttcttaataatttttactatacttaacataagacgctgtggattagttttttcacctatagctagactatttcaattgaggatataaccacagctttatgcttatttgttaattagttagataacgcatgacgttttatatagagcaaggatacatttagcatgaagctacgtggagcatagcggactaaattaaaaaaggagttgttcttatgatttatattggcagtgatgtagctaaagctaaacacgattgctgcattattgattcagatggtgttattattaatgattctttacgtatatccaattcacgtgaaggttttgaattactttattcttcaatactttccgtcctacctaacaaggatatttctaacgtaaaaataggacttgaatcaacaggtcattatagcactaatctccaaaactatttgtatgctaaaggctttcacctatccattctcaatcctttagctacaaatcttttccgtaaggctcaaacccttaggaaaactaaaaccgataaaacggatgcactagttattgctaaaatgcttttctctgatgatacaaaatcctattcacctgtatcatatcaaattcaagagctaaagtcactaactagacatagatatcgcttaattggttatagatctaggcttaaactatcaattactagacttatagatataatttttcccgaattaccaaagtatgtttggtctattcatcaagtctctgtttatgctctcctatcggagttaccgagcccgaaggaaatatccaattgtcatttaactaaattgacaaaccttctggctaaatccactaaaggcaaatatagtagagcaaaagctattgaaataaaggaagtagctagcaattctatcggaactagcacacgttctttatcttttgaacttcagcaaattattaggttaattcgatctgttcaagctgaaattgatgctttagataagcaaataaaggatgttgttatagaaatagactctcctttaatgagtattcctggaatctcttatacactagcctcaataattctagctgaaattggagatatagatagattcactgatccagcaaagcttttagctttttcaggacttgatccatcaacatatcaatccggaaaatataatgctacacatacacctatggttaaacgtggttctacctacttacgttgggctatattaacagcatctagaactgtttctatgcgtgattccacttttggggattatcttgcaaagaagcaaagtgaaggcaagcattactatattgctatgagccatgtagccaaaaaactaatacgtgttattttttatcttttaaaaaccaatacttcatttgtttcacaaatttaattccttaattttccaagcaatgtgattgctttatttgtcatgcacttttttattgactaaaaaatataatttttttattaacttatattgacttcatatagttagtctctttatttctaaataatttagcagtttaaactaccctacaaattacaatttatcttttagctaatgatagtaaatcttataaataccattctgtttaattataaaaaatatatttcatttataattctaaaccctatcttttgattattaacccaattgatatatgaataatttaaagtttaaattataacaaacttcataattcatataaaacagttactttaaagaattctctaatatactaaaaattattttttgtaccgttaagacttatcttatatcctaaatttacaattaagttatataatatgtttgttttagattttcttattctcttataaatagattttaaagaataaaactctctcctaaaccacatatagccttcaaacagctcttctgcgctcatatttttaggaataaaagctactctagtttttccattgtaatagctccaatcctctgttattaatctattttcttcttttagctttgaatatactggtgttttaggcagaggaatgaaatttttcttcaaaaggaactctttgattatattcatcaactagagttatttcatatttattttcatctatgaaagctgctaagtaaggcatagttatctgaataaaattgttaaattgattttttctaaatctatttatttcctcattctcaggtgttattaaaagtatttttttcttcatgctcagatctccccatatctatcattaattgatgcatgtttctttgttacgatttttttctaaatgactttggagttcaccccaatttggtgttgaaatatttgatttttttattacatgccatagaagcaaattctataaacccattgcaattatatttctattatagcattttttaacaatatcacattattagtaactattcagttattaaataatttgaatttgtatgataacattaattactaaaaaactttccattatcactaatttttgatattataaaacttgtcttgcaaaaactaatgataaggtggtgacttccgtgagcgaaggcaaaataattgaaatatataataaaggtatttctgaggtaatagatgttataaaaactctatctaatcaaataaaagaacaaaattctcagattgaatcactaacatctcgtgttaaatcattagagaaccaagtaagcaaaaatagtaataatagtagtaagccgccatcgacagatggatttaaaaagaaaactaaaagtttaagaactaaatcaggtaaaaagcctggtgggcaagaaggtcatgaaggatctaccattgaactaagtgataatcctgatgaaatagagatacatggtgttgataagtgtgatatatgcggagaatccttacaggatgtaactccggaaagatatattatccgtcaaattgtagatataccagatataaaagttaaaattattgagcatagagcagaagttaaaaaatgtccaaagtgtagaagaaggaatactggtaagtttccagatggggtaacaaacacagttcaatatggtgaaaaagtaaaatctgtagccgtttatttaacacaatatcagcttattccttataaaagaggtagtgagcttattgaagatttatttggtataagcttaagtcaagggacaatggttaatttaaacaacaaatgtcacgatgaattagagcctatagaagctaatataaaagattctattacaaacagtcttgatgcagttcactttgatgaaacaggaatttatatagataaaaaacgtcagtggttacatgttgcttctaatgataaatatacttactatgaagctcatgaaaagcgtggtaaaatagctacagataaaataaaaatacttcctaatttcaacggaacagcagtccatgactgcttcaaaacttatcatagctatacttcttgtaaacatgctctatgtaatgcacacattttgagagaactaaatgcaataactgagttagaaaaacaaatgtgggcagatccaatgaagaaactactaattgaaataaaaaaagaagtagatttaaattggaatgtagctaatactttaaccttagataaaactgaagcctttgaagaaagatatgatagaatactaaaagatggcttcgacgaagattatagtgcgaattggaaattatactcagagaagaaagttaagaaaagtacaagtcttaatctattaaatagattaagcgctcataaagaagaaatactttctttcatgtataattttagtatcccttttgataataatctagcagaacgagatttgcgaatggctaaggttaaacaaaaagtatctggaacatttagaagtgttgagggtgcaaatgcatttactcgaatacgtggatatgtatccacggttcgaaagcatggattaaacaccattgacagtattagatctatttttactaacaatccagttgatccgaccttagtttactaagatatatctggggtattaagtaagttaatacccctatttattatgcctaaaattatatcaaatataaaataaattgctatagctgaatagttaccattattagacttctaaatattatactttctgttttattttccattgtatacacctcttgttcaacataacttttaattgaatatatagcaaaaagtatcacttatcatatgatacgtgatacttcaatttactatttatttttatagctgcacgcaataattcattgtccattgctataccatttttttatgacttctgtactttcttgacttggataataatgtttgtcattgctttgttcacccactgcaaatatagaaaatcctaaaaaccaaggttcatcttggaactctcttctataggcttcaaaacaattagcttgctcaacgttattaatgtcactattcttatatggattccagttccatggctcatatgatgcgtaatcaaatttaggaaaaccaagttctccaaagaaaataggcttattccatttatcatagaaattttttatttcttgttttatattttggtgtctaacttgtccactaaaatctatctgagaattttctattgcgcttgtaagattttcaatggtatttgcaggattatttgtaagttcgaaataagctgctatagaaataaaatctacttttgaaaatagcttattatttaacttgttattatatgcagtaatactgtcaggagcccatgaagcagtatcccatttatttgttctgtatgttaccaatcctttataatatgttctaacgtaatctatcgtatcacaccaattgttttcttctgattccatgttaactagattacttcctatatttagggctgttacattatatggcactgcaatatcggttatcaatgtctttaatacattagtcttccaatttaaaaagaaagcattcatgttattaggtttccattcagtttcagcctttgtgccctgctctatccaaggatatggctctaatattacatttatatttgcatttgtattcttcaattgtttaattaaatcaattgccttttcttcacttatcttatcaactatcatattactcgaagaattattatctacatctatcattacaggtatatttaaggtattcaattgaaacttatttatatcatttagcacttgttcagtattatagtctgtcgataagctacctgatttaatcttcttcccatcaattgtccatccgattttagaatttgatgtttgatcatttgtaagagttgctgcttgtacattagatgaaataataaaaaaactaatgaaaataattgctattaaaattatatttttcagtttgtctactgtcttgcaattgtttatatatttcatgtatttatttctcccctaactttgtgcttttataagttctatttgatattcacccttgtaaatatattcctattataacacaatttaaggtaacacattagttaattcaaaaaacatttttatttgttatgtaagctttacagattgctccgctatatgaaaataatatcaagccttgctatcccttttattaatttcatctgttattaacgattttgaaatatacattgcatttatgatattcttaagtcgagtatgatgagatgtaccttcctcaaattttagtttagctttttcacatttgctgataatagaagctactggtggtagtgcttccattaattcttcttttgtatatttatccacaatatcttcatctattattaatgattttgaaatatatagagcttttagcctatttttaagaagagtatgttgtgaggtaccttctgcaaactttagctgcgctttttcacaattattaatagttgaagatacaacttttagtgcatctaccaattcttctcttgtgtatttttccatagaattttacctcctaaatataccttggtttatattttttaatataatgatttttcaaaacacttcaaatcttcccatattacattttgaaaatgaaattttgttgtacctacataaatatatccaatcttaggatatagcgttgcagctgggatattgccttcataagtatcaaggcgaataactttatatccttgttcttttgagtatttttcaatgaattccatcattacttttgctttacctttgccacttgcagaaggtcgaatacacaaagtatgaatgaccataatttcgcttggttttgcctttgtaacccacgaaatattgtcatattctttgggttgaatactattaagtactacgcatccatatattccgtcttcgtcttcaccaacaaacattgtattattatcaatagcactcctagcataatcaactgttggataaagccccttttgccaatttgtataagacactgtttgttcttcataatccaaaatctcattatatatcttttctatttccaaaatatcatctatagtagcaaccctaaccatcgttcttctcctccacaaatcactattttttctttcacttattataacatatcttgtaaacaccacacttctaaatttttaaatagcattttataccttacctcataaatactatatatgtgaaataaaaatcttgtttatgaaaatagagcagcttttaaaccactctataaaattatttatttaattattgtttatgattaaacatttactgattatacaattcatttaaccaaaagcctctttctacattcaacactctcgatttcatactattaaactaataaatatctgaataacagaaatttcacttctgtacaaaataaatcatgtataagaatacagactctaagcattatcttaatgatgaaataaacgcatctttgtaaatgccataactatattgtatttatcacatgtttctatcacattatcatctcttattgaccctcctgtttgggctatataagataccccacttttttttgcgcgttctatattatcaccaaatggaaaaaatgcatctgaacctaaagatacgtctttcaaattttttaaccattctttcttttcttccatagttaatggagttggttttttaataaaaagattttcccaacttccatcagataatatatccatataatcatcggaaatatataaatctattgcattatctctatctaatctttttattccttttttaaaaggaaggtttataaccctaggattttgccttagaaaccatctatcagctttatttcctgcgagccttgtgcaatgaattctagattgctgtcctgcaccgatgccaattgcttgcccatctttcacataacatacagaattagattgggtatattttaatgtaattaaagatataatcaaatctctttttgcaatatcaggtaatgttttgtttttcgttggtaaatttgttaacatatcttctgatattttaacatcatttcgcttttgttcaaaagttattccatagacctcttttgtttctatttcctttggaatataatttgcatcaatttgtattatcaaataattccctctacgcttattttttaatatctctaacgcacctttagaatatgatggtgctattattccatcagaaacttcacctgataaaaattttgctgtctgctcatcgcaagtctcagataaagctacaaaatctccatatgatgacattctatctgcacctcttgctctcacatacgcagtagcaatatcagataattctgcatcatcaacaaagtatgttttttttaatacttcatttaatggaactgccacagctgctccagcaggactaacatgtttaaatgaagccgcagctacaagtccagtcgtctcttttaattcctttacaagttgccaactattaaacgcgtctaataagttaatatacccagcacttccattgatgatttttataggaagttcactaccatttataaaaattctagatggcttttgatttggattacacccgtactttaattttaattctttcattttaattgttacactccccttcaaacaataataagcccactatctggacttttgcccagacggtcggcttattacttgttatacttcatgtggtttattccacttccgtcagtcgtataacctctatgaaaaaaatatcattttagtgcaaacttgtcaagtgatggaaaatataatctacatatttttatatcaattttatattgtataaataattggaggtttcctttataataaatataataatcctactcgcattgtcgcactttaaagctacataaaaacctgctaatgaaagtcaatacttttgaagcaggtttttaaattattttttctatttttttgcatactaattagaccagctgtttttctggtccaagcctttattcattaaattgtttattacttatatacttcttttactcttgcataatatattcttaaaaacttatttaatccagcaattttagctacttttgaagcttttccttcagcttccttttttaaaacaaacaaatatacagtatcactctctggtttattgctttttaaacatttcattatttcaaatccagtttttcttagggtagcagaacctcgctttgatatccgccttcgcgttccggtaaactgtcctgattgatatggtggtgcatcaatgcctgcatatgctatcaatgcttttccgctatggaatcttctaatatctcctatctcagccattagtcttggtgcaataatatcacctactcctgccatttcacgaacaactgtatactcctttaaagactttgctaattcttgcatttgtgataaaatcaatgcaagagttttatctatttctcggagaactcgaacggcttccaatactaacattttggttgatggagcattggaagataaagtagggattccttgctgagctaagtcatatatctttatggctttcgcttcgctttgttgatatcccttcttttttgcccaatttttataattgctaataaactggttctcacttttttttgtaatattatcataatgccagtattcttcaataaaatcatttagcttatctttttctggtttatctgaacggcttttcagcatagttttaattcccggcattgtgtagtcaagcattgtagttaaagatagtttactttctattcggagtttaatgtagtgaccgtactgtcttcccagaagacgtagttgcacataaatttcttcactagattcatagttaattaagtgaaaccagttatccaaaccataattagcaatctttatagaatccagcttatccgttttcccctttctaagaattatgcttgcatattttttcattatcaatggattaataacagccacaaaaattccatgctctttaagaaaactaagcactggtaggtgataattccctgtggcttccattacaactcttacttcatcatcaaggcattttatcatagatactaattctgcaatttgattttctgtgtgcgtaatctcatatggagatctaacgatctcgccgtatggttttaatatacatactgtacttttttcttttgatacatcaattcctacacttatcataagtaacctccaactttatttttgtaattgtctccatccgcacttattacaattcattttggttagttacacgaaagcctctagggtttcaacctgcttaatcgaatatttataataagggatggctgacagtttttatgacggatgttattaatccaaaaataccgacgtcagaccaattactccctaattataaataaaataagtgcaaatgctaacccgacatatctggtttaacacttacacttatacagtaccaaaaataccacattttctaaatgcgatatttcaatctgttatttatttttgcttgtaaataatgataaaatattataaagatataagttttttagcaaaatcttttgcattttgaaaatccttatcatttggcctacctttagcgattccaccgattaatttaaatggtccaaaagtatcataacccttgcatgcaaagctaccaacaacattaaaccctttttcttttagcttttgttcaacaaaaccattatatttggttttaccctgtccactcgtagaaaaaacaaatacttttttattagacaaagttggtaacttgtcaattaactcaagaatatttttatgtaacttcccataatatattccagaaccaaaacctattagatcatattcatttaatgtatttatctttaaatctcttgtttctattatatcagcatttatagatttgcccattacccttgctattttttcagtattaccatgatgtatagatgaatagattaataaaactttcatattaatatcctcccaaaaatatattataagccaattataacatattttgtaaacactcaattattctgttttcatatatattgtaattcacaatgtacatttcacaattacagctaaaattcttgtaatatttttagaattataatgaagaattatttttgcaacgtatatgttatagttaatagtattttaatttaaatattattatatagatttatttttaaaatatcttcttctgtattattcttcacttatactttcagttaaaaattcatggagctgctaggtaaaaatattgttatcctagtaccaataccttttctgcttaatacagagaaatatcctttatgtccatcaacaatccattttgctatagataatcctaacccagtgccaccgttctttctaactcttgcagtatctgctctaaagaatcgctcaaatatatgtggtatgtccttttcatccattcctataccattatcctgaattgaaaaataaggttctcctttttcatttattcctgtttttagcattataacttcattctcttcagtatacttagctgcattttcaattaatattctagctgcctgcttaagtaaaccaatatcaccatgaactattatttcttctgaactgtagtatttatatatgtgcttttcatctatcatcttcgactcttcaagtacttcattcatcatatcatttagtaaaaactctttagggttaatctgtgttttaccattaatacctcgagctaaaaataacagctgttctactagatttttcatattttcagattcacttttaatggcttcaatagactcgtttaatacactttcatcattttttccccaacgatccagcatattagcataaccttgaattactgaaattggagtcctaagttcatgggatgcatcagaaacaaaccttgcttgttgtttataagaatctctcattctttccaaaagattatttattgcctcctccaatccatgaagctcactatctcctgtatatattctttcatcagagattacaggactaattttagagattgcctcctcaagattttgaaacttttcttcatcaaatgtcatattactaagtctgcttgcagtttcagctatttcatcaagaggttttagcgtccttctaattttcattgttccaaagataatttctttcaataggaatattccctctataatagctatagattgagctactctttgaattatatataaataactacttgcatctttaatcatagttttaccattatcaaaaactactgtatatgtggaactttctatgggaaaaaagacaaatgttcttttggcatttaacaaaaattctccgtagaaattaatttccaaatcaatgcaccaatatccaataagaaagagtattaaaaatatatcaatccaaagaaactttgaaaatagctttcttacaaaaatagaattcaattttattgcaatagatgtaacattttttgatttattaatcttattcatctttaataacgtatcctacccctcgtactgtggttattatctttgttttaaatgcatcatctattttagttcttaaaaatcttatataaacatctattacattagtttctccaatataatcatagccacatactttttccattagtacatctctagttaatactatattcttattttccaataaaatttttagtaaagtaaactctctgtttgttaattctatttctttattatcatacgttaccttatgtctcatcttatctaaagacaataatccacagcttattatgtctgtatctcttttttcaataacagttcttcttttaagcgctgttcttattcttgctaataactcttctattgcaaaaggttttgttatataatcatctgctcctgcatcaagtccagataccttatccataacagcatcccttgcagtaagcattataacaggcaaatctgaactttttctaattctacgtaatacttctaatccatttatttgcggaatcattatatcaagaagtactaaatctgcttcacccttctcagctatttcaagacctaatcttccattgtccgcttttaagatttcatatccttcatgtaacaattctaactctacaaatcttgcaagcttctcatcatcctcaacaattaaaattttaaccatttttaaatcccctctttaatttaccttttatctttttaatattttctgatatttccttaagtacatgattaatcttatttatttctaccctatttcctgatattgaaaactcaaaatcaaagaaaagacctactatatataaaggtataactgcccaaaacgcaaatattaataatactataatcactgtgactggaattctaagaaatatcttattctctttctttatctcaaagaaaatattattgcatatgtctattattttgcatacttttacaaaaattccttcaaaggtattatccttttttgtattattataattattcccttgattcttattattagttaacaagctatttttatgattttccttatattcattggtataaaagatattaacagagggcttttgaactttacccttttcttccaaataaacaaacgcatctaaaatgtcccagtttgactgctcaagcgcaatttttgcttcttcataacttatattagcttcgttttttaatttttctacaagcttataatcttccatagtaaccctccatatctattgtgtaaattatatcatttaaccaaatgcttttatatacacaaaattagaggcttcgaataatttcaaaacctctagtgctgtcattagattaatcctatcctttatagctttctttaaaatcactttttatattatctgctgattctgaagctttatccaaaatatcattaaccttatcagtattaatatcaggaccttctattgaatatttatatccaaaaaataaaccaactaataataatactgaaacaggccaaaaacctattattaaaagtaacgctgctatcgtaagtgatatccttattggctttttattttcctttttcatttcaaaatagttttcatttcctttgcttataacctttcctataaacttaaatattctaccaataatttctccaatgcctccacttttctttttatgattttcctcattttcttttttattttcttcattattatctacagccacttctataattgtattggctccattattttcaacttttccttgtctttctaaataaattatagcatctaaaagatcaaagtcacattcttgcaacactgcttctgcttcttcataacttactttagtcttttccattaaaattttaatcatttcatttctttccatattaatcatcctccaaaactttgtattgacttatcatgtttatatagtacttagagaaaattaatctaaaatataagaaagattaaaatcagattaaaattgcataattttttataataatatgataacagacgcaatcagccaaataattatatctttcattttgctatactaatacttaaaaatattgttaattatatgatattttctatagcctgtactgctttacttgttcctcctagatttaataatttttctcctgctttcttagaattatctgcatatatattatttgtactaaattcattgactattttcttaatagtttctgcattaaaaatatttgtttctaatgagacacctgccttcaaattagatattgaagccgcattatactttctctcaaatacatttccagggcatacaatttgaggtacgccatatattaaacccgtcataatactattttgaccaccatggtttatataagctatggcttctggcataagcttacaaaaatcaaatcttttatccacattaatattatttttcttgtatggtttcacttgttctgttgcaatatatatttgaaaattagtttgctcaaatgcttgcgttaaagtgtatataactttctttggtaaaattgtcccgttgcccatgtatgctataattttatttttattatgatattctgatttaaaattaggtacaaaaaacggacctgtaaaaactaaattttcatcattaatgggttctaactcataggagcttggaactatttttagatcggaccaattaaatatatcaagtgctgattcgattggaggtagtttattttcttgaataaatcttttaactcctgtgctatattcaggattagaggcaaaatacttcgaagcaggataactgaatcctgtaacaactttaatattttcaagttttgaagcaacaatagccgcaattctaaattcggcatataccacatccggtttaaaatcccgtattgcctttcttatacaagacacatcttctgaaaaatgcttgtacgtaattgctccaacaaaatgaagcacctgttcataactattaacctttttcttgttttgaattccaattaactgccccattttaagcattctttttcccaaaggcataggcattccaaatggtgatggaattggcgcataataattttttacattttctatttttttataatttacatcttctgccgcgcaaaatgcaacttcatgttttctttctattaatttattacataaagctgctgctcttgaaaaagggccacttgtctccgccattgctgccataggtgctattaaaattttcataaatagtcattcctttttatatatgatatagtattctaatattttatacttaataagcttcttatatgaatattttcccagacaatgctataatcatagacaaatcttttaattatctaaagcaatttgctttttacaaaaggcttctctctttttcaattcaattttcatttcatcctcaatcatttaaaaacacgctccataaatttatttatactctcaaaacttttttctaccgatattaagacatgttttactattttaattaacataaaaatctatgttttctgaagtctatagccttaaaacccgcattatttaatgcatattcttcaccatatttattgtaaagaatcttagaatacagtggtgcttctggattgtttcaatttagaatccgtgcttattaccatgtaacactgattgtaaagtatacttcagcctgttattcacttttaatcaaatttaactatctctatatcatgatttccacttgaattattaaaattacatcgtatcattactaatataattataataaaatttaggaacctttttgctatttattttcctttcattaagtggttgtccaataattttttttatgttatatccgtctgatatacgaaaaaaatcaaaaaatctatagttaatagccattttaggacaagagtaaacacatctcatgcaactgcagcaagaaaacttaaatttaattttatcattactctcatatatactcctagttggacaattccttatgcaaagtccacaatgagtgcatgattcattaacacttaaatcttttccaatcaaaggaaatatccatcgagttattgacataactcctatcataagaaccttaagacaaattcctgttttaagcattcgactttcaccattaataacttcattacacatgatagctacctttttaattgttgcctcatagagttttttaataattatatcatcaaatttatctatccaattgctgcttatagagaatatcctctcatagaaaacctcatatccttttttcgaaagttttcttattattggtcttgaggaattataattaattggtgccaccccacctgccgttctgaaaataaacatctttttgtgcaatactttaggcatactattaataaacttatatactatattaggtataccaaatccgataacttgacatccaattccaaccaaatcatatttctcaacgtctatttcaagatttttctttagaacatcttcaattttcactacactaactttgtatttgtaattcgtaaatccttctttaaccatgttagcaacaaattccgtattacctgttcctgaaaaataataaattataactgatttcatattataataaccgccttaccattttttaaatttttaaatctgatatctttttcttattttgcccttccatttgctcctgattgcttgataaactctatataaattggtatactatcagtatacttatataccaacagtatacttttttacctatttctttgtcaatagatgggagagatgttttttgaaggaattaacaagacaagagaaagaacgattagaacgtgaaaatatcatagtatctacagctgaagatctattttgtaaatatggatttgaaaaagtgtcaatggataatctatctaaagaatgtgagtttactaagaggacaatttacagatatttcacttgcaaagaagacctattctttgcagtttcattacgaggctataagaatctttttaagatgatacaaagtgaaagccaaaaagggaatacgggctttgaaaaaatacgtttatcttactatgcttattataattatttttgtaatttccctgaaatggttcaattaacaaatacgtgtggagttataaaatcaaattctgaagggatgaatattccttatcgtgacaaatttactcatctagataaatgcttgtttgaggaactaattaagatgtttcatgaaggaaaaactgatggaagtattcgttctgatttagaaatatctacacttgccctttcctcaatttttgttgttacaggctttttccagatgatttctttatcaggtaatacctacacaaattattttggcttagacaaggaagcatttattaaattcacaattgagatgctattagattcttttaaacatcagtaaagccttcagattaattagcttacaaccctaaaattggagatatgttatcaaaggaaaatttaacacagtaatttaaattactataaacctcaaacaaaaagactctaaggttaaatccctgagtctttttacttatctttacacttttaatctaattcaaaacatcctagtttaataatgctatattctataatctcagcttctccattcatacattgtcttacttctcctaaattacttagataaattactaagtgattatttatattaagctcttttgagcctacatctctagttctgtttgctgtgatttgcgaagtgaatgaatttataaatatctgatctatttcagatctattgtaaatttataattttcatgcaacttatacatatcttcgatttttctcatgcatattttgtattgtgtatttttgtttactcctttgaaattcatcataaaatcatgttgatttgattcatctaaacctacactttctccaaatacctttctattttgactgtctaataaatacatgttttctgcttggattaatggtctttctccatcagcagtataatgaatattaagattatccttgttccattccaatctatttattactagttttcctgagtttccctgaggtatttctaacggaagtctacttatgtcataagttaatgcatcaccaacttcattgacctcttcataaggtaaaaaagttagttcttttgtttctttatttattagactacaatatttgaatttttcataacttgcctctgaattgctataactgcttaagcctgtatactttatcatatttcctttatcatcaaatatgaaatatctatactttccatctaatgtgtcagttatttcaatatttgttgataatggggatgtaattatttttttgatattaatcttctcttcaccaatatccatatctttatttatattatattcttttgtatctttcgaagcctgctttttatctatcattaagtttaatttccaacttcctttcaaatcacctattgaagatacatctacattaagctcaaacgaatctaaaaagttgccattttctgattttaactcaaaaacaccttgctcaagtatttcatcacttccaccactactaatttgattctgttcaatatcttccccattaattctgaaatttgcaccaactattcctttggcctcttctttgttcttatcgccaattacaatatatgaaagcatgatcgtattatcatcggaaatcactttatttaccgcaaacctaactccttgatcatctgcatatgaatatacattttgagtatatttatctaaatctacataatttccactacgtaaaatcttcaatttttcaaatatcggaacacttattccattagcaaaagctgtattattaacagtagctataactaaacacataaacatcattgccgagacgaaatatttcaactttctcctcttagcatataatttctttttcattttcttttcaattcgtttgtaagtcagtttatctaattgaaaatcttcattataattattatctatttcagcatagtttagtaattcaaagatatcatctttattaatatctgtatttttcatttaactacctccccattatctcattccatttattttttatgattcttctgcctcgagataacctattatctataacacttcttggcaattttaaatgatttgaaatatttataatactctcatctaaaaaatatcgtttaatgaatattttcttgtccacatcactcatgttacttataatttcataaacagtttttacattgttattttgaataattttactttctatattgtcacttgaaattattgcatcttcctcaagttcaacagtttcgtactttctccttaattttctaaaataatctatagcttcgtatttcgataccgctactatccaatttttaaaacttgctatgttttcattatattttacagcattattccaaacttctataaaaatatcacttacacattcttcaatatcctctttggccgctgtcccatttaatacgtcataaacaactttgtaaactaaacctgaatacttagaatatataaaacatagagctttttgatttttattttttaattctttaacataattttcttcatttatcttcatgtatgatacctcctgaagagctcttcattaactatatacgagtattccatttcatttctatcaaataaataaaaattattatagtaaaataaaattataacgctggcaaaagcttctatctttacttattgccagcgttaattctatatctaatcacctatttttctcgtaacttatctatgttaaagcctttttgcccaagtaaataaataaaagattcttctatatttctttttgtttttataacgcgcaaatcattttcattcatatgtagcccctccataccattattttaaagaagtttatatagataaacaacactttgtatagtttttgtagtttaagtgcataaacacttagatattgatgtttgaagcattaaagtaaatgagtaaaataaataacaaagggggaatgaaaaatgaatgaattaaaatggtttgtatggctttttccgttattatttattgtacacgatatggaagagattattatggcaaagcactggtgcaaaaagaatttaaaacaatatgtccgcattcctataacaccctttggaggcacaaagagtacagctggatgtgcaattggtgtatatgaagaattgattttgtggattatagctactctgattggtaacgttagcggattttatggtttgtggtacggtttcttcgtggcaaatatagtacatttaattttatttcacattatattattacgattatcctatcgtcattatgtccctggggaaataacagcatggctaacagttattccatgttgctatattttaaaacttgcccaaaatatcttgggatactccgctattgaaatttctgtttgggtaattatagggattgtatttgtttttgcaaatgtaaagatattgcataaaaacattaataaattatctgaattggtggaatgattatatgttaatgaacaatagggcatataacttccaacgttatataccctacttaaaatttaaacacaccatttatctaataacaatatctttatcatacattaatattgcttttacattttacaaaagtataagttataaaaaaatcttaaatctctatagcttttttcttctttctaaaaatgtaacatctacaaaagctagaccaaaagataaacccactgcatgagaagcagcattaattaggtctacattagggcttttaaagatgtaatcaaaagcgcaattaagtgcaaaaaatgttgcaaacataataacaaatttaattaatacttttctaagataatcccatttcaattttctcgcattaaataaagtaattataagcacatacaataacataaatagagcaaacacagcatagccaatcacaaattttaaagccatactattatctatgttgccataaacaataatacatgtaattattgtacatataaaaaatattgaataaataactttggtaaagagtaatgttttactcatataatacccccaacactctatattaagaacattaatttagtataacaaataagttatagtatatttctgtaaaatcacattttataatttttgtttaaaaaattattctatagtggtataagtttaccatttgctagagaatcctgcaatttctactgaagctctggttcatttcctactattttgtagctgcgttcttcaacaactgttccatctgatttcgtttctttaaaagtgattacatcatatccatcggcacttttactttgagatgtttcgtaaattagccttatgccattttccacacgctcttttgttcctatccaataaggacagtgatttagaaatgaatcatttttccccaagtatacaaatagtttattttctgctgcaacattaatattaggacgtttcttttcaacatattttgagctcacctcagcagttctaccaatttgttttaggtattctttagcctcattctcttttgattctgcaagctgcgaatagctttcctgactttttaaaaccttgtcccataacttctctggaaacatctgttttatagaattctcacattcctctccatcctcaggttctttatattcgattaatgaataaccaccatttgaattcttagagaatgtcattaccgtaggaatagctccacttccactgatttctgtaaaaatcccattttcaaagccaaaataaccaaaacttgaaatagtgtaaactttcacgatattatctttttcttcaacatctaaaactatgtgcccttctgtagccacttctccccttagataattttcccctctactctttatggctttgcttacagcttggtcaatattttcagtaatgttgttcttgttgatatctgttgaatttaccgtattgtttgatgaattgttttccttcatttgaatccatgctccatcagcacttaattcataaccgccaacactagtatttttagccatttctccgctatcatataaataataccaattgtttttatcttttacccatcctgttttcatatatccgttactatcaaaataataccagttattattaataaacttccagccacttgaccatgagcttccttctgtataccaccatccgttattatcttttttccattcagcatctgcacctattggaaacattgctaaaactccaactaatatcaatcccttaacaattaatttttctaaactttttcgactcatttttttaccccattccccttatgattggcaatttaaaatttgcaagtttaaaacttatacttttatccttcattaagattatataacaatacaaactgaaatttgcctttctcttattatcatataacatattaattacatataccatattctctcataattttccatcatttttctatatgaacttaatagtagattatgagtaaaaaataatactgacaagaaaaatcatgccagtattatttttattcataattttttaattatttgattttgacgtattattttttactacttcttttacatattcaacatcaaactcatttatttctgcaatatactctatagaaattcctttattgtattgctttattattattaattttctttcttcatctctgccttcttcaattttttctctatctctttccaataaagtcatgtaagatcttgattgtgcttcgcactttttcaaaatgtgcacctccattgaaatatcatttttaacttcctgcactcttttgtgtatactactaacaagtttccctttagaatgctttgctgcataatctgttgaagtttctacatattcaagaaattctaatagctcttcacttaagtctttcataaatccttttgtgtttaatattattttttgtgcttcatcatttaaaactaaccttaccttatttttatcttttgtattaattattatcagtattatagctaaataaaccttaattttcaatataatcaaactatatattcaactataattgcattaccattcttcagcaaaacctgtactattgctaaattaaatttcgcaaaatttaaatgaacttatcctttttatcacttataagttttatttaacatattaaatctcattatcagtttaattagtagacacacattaaattctgttatatgcctactagtaagcttttcataaaattttattataaattaattattttttccattcttattagattttcataagcaaatatcaaatcatattttaatcttaatttttcaaaatatatctcagttttaattcttacttttctatttattgccatctattaattctttcaaactaatactaggattagtataacgtcccctgctttgtgtcttattcttatagttaatagcctgctttggacaccattgaacgcacgccatacattgttcgcaattgtgcttaaaactcggctttttgtttttcattactatgttggaaacaggacaaactgcctcacatgttctacagcctgtacaactatcagaaacattaaaacctttgtcttttctagcatatattaatttttgaccaatagcagtcgatatattaaggggctcgttcaccttacccactggctgctgtgttttagctactatcttttgtactaatacaggtatattatcagtagcaatttgatatttctctgaatttctctcgttcattttatacatcgcgacataattttcaaccataataattttctctgcgaaattaagtgtcgcacctttttttgctaaaattttagcagggacagttaacgcaacaccacttatattaccacatccagtcacagcaaaaaaatatgcgtttttacttttttcaagcgacatttcgcttataaattgtgttactcttcgcggcaaattcaaggcatatgtaggatatacaaaaccgatataatcgtacacttcattgctgtcatgtttccctttacccatggataccaacttgcaatccggcaatgcctcagctatttttttagctacctgtaaattgtttcctgttcctgtaaaataataaataacacttttcaattttaattacctccttatttctataatcaatatcatccatatacttattttttatagttattatccaaaatcactattattagctattccttgaaggaactttcatattctcctcacttaatttatcccattgtaatatcatattttttatttatcttgaatataaaccttttaatggttgcttcattttaaacaaaaaatcatgtgcaaccacccaaaatatgtcgaatatagttatggctaatcgtaattgctcgcgcaaactctgttaaagctctgaacgaatattacaagttacattaatatatttttgtaacctatgatgctaatatatcacactccactacaaattacaatatactaaatatgtaacttattataaattttatactaagaatgtttttcttttttcattttgaccatgcttttataaagtgtagtcaaagtattagactgcaaataaataaagtcctcagcaattcttttcagaaagtcaaggactaaaaattttagctcatcatatttggattttggattcatttatcttgcactataatctctttaatactatttatcccgtcttttatactttttctattgaacccaacatcataaaatcatctgcacttactgtctaatcactatcattgatatctcaaatacttcttttattgtactctttttcaaaactgattaaccatagatatgaaactcaaatccatcttctggttcccctatttcaaaacctaatgttgctgaacccttgttcttaaataattcaaaccattcatcccattcttcttgctgcatttcggcataaaattgcaaaccactaggttcaactgaagcattaatccttcttttgtcattatcttgtgcataccaataagtaattccatcaataaaaccactccatcctggcattccagaatataattcagccaatttatcccatatataatctggtgatgagtaatgaatattcaaattatgattgtgtttttccataagaaattctccttcatttttttaacgtctcaactgcctacgctatactaacctaattagtatacacatactaagccctgttatattaataatggaaagataaaaaacaaaaacatcaattgataaaattcaatatgtatacatatattgaatttttcaccatatttacccattcatatactcgaatcctatatacaaaatttatatatttttaactgacgatatatatttctttacatcatcataaaaaccactttgatttgaataagtaatataatttttaactgtttttaaccattctattgttgacggatgagtttgtttaattacatccattagatccttttgatttatttttctttctactccacattcaattatttcctcaattactttttctgctgccatatcaacaacattttctatatccgcacccgaatataattcagttgattttgcaagtatattataatcaatattatctataggcttcccttcaagtttaagcttaaaaatagccttcctagcttctttatctggcggttcaacaaatataactctatcaaatcttcctggtcttttaaaagctgtatctatatcccaaggggtattggtagcacctattatcattactttatcctttgatgaatcaagtccatccatttcacataagaattgatctatcactcctctaaggtgttgtgaagataatttaagcctgctgtaacctagtgtatcaatttcatcgaaaaacaggacacaaggctttttaatctttgcttcttcaaacattgaacttatatttttttcactttgaccaatatatttatctaatatatcagttatatgaacattaataaatttagctttacattcccctgctgtcgctttagcaataaatgttttcccacaacccggagggccaaaaagcaaaactccgcctccaatctttttattaaacatagaaaataaaccttgattctcaaatggctttattattttcatagaaatagccttttttactgcaccaagtcccccaacatcttcaaaagtaacaatatcattattatttaaagttttccttgtttcaaagtaaataacattgtcttcagcttctattttcactacctcgagcttaggtaattcctctgcattgcgcgattcttcctcatttgcatgttcctctttttctagactttcctttgtttctgaagattctcctatttttagtgaactaagttcctctataatttttatttttatttcatcattacaatatttaagggcttcggtgaaggccgaaagagcttctttgctttgtccaatttccttatattctattcctagaagataccatgaacttgcatcttctttattggtctcaacaatttttttaattaaatctattttattcattgtaatcccctcttcttcatgacaaatttgaaaattctattataaataataatacaaattttcaatacatacatagaacatataagtaaaataatcaaataaggagtaattttatctagatgtattatatttctaattccgaagctatcagcaacaccaacacatataatattaaaactaaacagtcctataattaaatatttcactattttaaaaatcttatcaactgataacccaaaagtaaagtatcttaaatcaatcaaggttagttgagtatgaagatatttttcctttggattaagtaaaaaagcttgtttataatattcctttgcttttttatattgtttcatagacatttcataatcaccaagcattaatagttttctaagctcacttgcacttgattccaaatatttttctaaaattttctttaatttatctttctctcctttatctcgataatatttaaatataacatgaagtacctctgaattattaggttctcgtttaaacgcatcttccataatttgtccacattctgctctagaatctaacttatactgcatatacccaaatctagctaaggattcagcatcatttggattatgtcttaaaatttcctcaaaacactttttagcatcataataataacccatattccaatatattattcccataaggtcatttccataaactattgaatagccttccttaagcgcattctttatttctgctagtgcctcgtaatatttaccaatcccattaaggcaatttgcacgtaaatataagtaatatgctttattgggcttttttgaaagtagcttattaatttctacaagtgccttttcatatttacttattttcatataatgcattatcaattcttcatttttctcaatttccactcaacacatcgcctttcaatattttccgctcaatataactttccattatagatacaacttccataaagacacttattctttaacttttttccataacgatgagtatcctcaacattttatataaatgccctatcattattatactacaattttttatttttttacctatatttcccccaatagtaatttactgtttttataatatctatgataatcaaatttgaaaactgtttccactatctcaagcgctatacaaaaaaaatgcaatgcagacctaaggcgtaacctacattcattgaaaaaataacgattgttaccaatccacggctataataaatattgcagaaccatctgtttctttacaaacgtcctctctcttttttaattcacttcttatttcgcacctaatcatttaacaaacacactctataattttattacgcgattaaaatttttctccactaatatttaagacgtattttcctatctaaaatcaaataaaatcgaactttttttaagtccaaaaccttcaaacccgcattattcaagcatattcttcagaatattagaatatcagaatatatattctagtattctgaagaataaatatggtgaagaatatatatcctttaccatataagaatattgactaaatgtttttgagcttgttttaaatatccctctaaattttacaaagccttattaaaattcttgtgacctattgcttagtagcttagtacattcatagaaataaaaaatgaataccaaaagctttcattgctctaagtattccttttaataatatttacctattatataatatgcatttacaaatttgttaaaacttgagttcatatctttactagaaattataaatatatttgtgtagaaaacatttgaaaatgagccgttaaaggttcttagctgtaggttgttccattttagcttgtcaaactgaaagttggagcatgctaaagtggatacaaccttctgcttagaaccttcagcgatattttcatagtttttcggaatcaaaatatttataatttcggtgagttataacataattctgagtcgtatatttttatcttttaactaaaggaaaggcaataacatcctttattgtatttgatccagttagaaacattatcattctatcaataccgatacctaggcctccagttggtggcattgctgtgtcaatagctatagcaaattcttcgtccattggacttgctgtttctagtcctcctcttaatttttcagcttggtcatgtaataatatacgctgccttaatggatcatttaattctgaataagcatttccaagctctactccataggcatatggttcaaatctttcaattaaatctggatttttcctatgaactttacaaagtggtgatgattcttttggaaaatctataacaaaagtaggttgtattaatttcttctcgctatatgcctcaaaaaggtttgttattaattctcctttagaagcttcatttatatttaaaccttcattttgttcttcaatcaaaagagaattctcttttattttacttataatttcttctttagttaaattctctgcatcaattcctgtatcttgttttacaagattacacatagtttctcttttccatggagctttaaaatcaatttcttcttcaccatattttattttagtagagccattaacagacataaatacatattcatatattccttccataattctcatcatatcttcatagtctgcataagacatgtaacattccattagagtaaattctggataatgtgttctatcaattccttcatttctaaaagatcttgcaaatgtataaactctttctattcctccaacaataagtctttttaaatataattctggagaaacattcatatatacttcacaatctaaatcattaacaaaagttttaaatggttttgcttctcctccaccatatttagtgtcaagtacaggagtatcacattcaataaaattcatattatttaaatactctctaattgcagtaattgctttagaacgtttaataaatctttctttaacgtctgaattcattatcatatctaaagatctatgtctttgtcttaaatctgaatcttgaattccatgatatttttcaggaagggttcttatcgatttagataacaattcaaatttgtttgctctaatagttatttcccctgtctgagtcttaaatacggttccctctaccccaataatatcaccgacatcgattaattttaaaacattataattttcacttccaattaactttttactgaaaaatatttgtatatttcctctttcatctactatattagcaaaagttgcatttcccattcttctaagaaacattattcttcctgctaaagaaaacactttactttcatcaatagtatcaaaattatcacatatctcttttgtataagtttttttgttaaaatcataattataaggatatggatttattcctagctcactaagtttatttaacttttttattctctccactataaattcatttgcatctgtcattatattttctaattcatttagattttcatattgctcatacatttttgttaccacctttacttatttattgattaatttaggcatataaaagaaaataacactttcaattttgccttaagttttttatcaggcaagaaagcggatttacttgttattcttctgatatcgccttaatacaaataaaaaaaccttcacctccaagatttctaatcttgaggacgaaagttataaattcgtggtaccacctcagtttatgtatgcgttgccgtatacacctcttcaagtacatcaaaaaatgagatactctatacctataacggggtattccgtcacatcctacctctattaagtgaaacttgattcatgctgggttttcatccccatctgaattctagtttaacttataccctcaatgggtactctgtccgagaacgtgtagccgttatcttccacttatatgtgagagagtatcacggattactagttatcggataaaatagactcagtgtgcagctccaagaccttcttcaataaaaatccattgccccattccaccatctagagctctctgaaaatgaattattttatttactcttcttttcattgcttttaatatagtttacaataaaagcctgtttttgtaaatataatactaaaaaactctcttcatagtgttttatcttaaattaacaaccttatatttttctttttgtatattttaatatagtaatgccattctcaacaaaaacctcatctagatgcagctttattgttggattattttctaaaaacaaaggtcttcctttgcccagtatagttggaattattcctactataaattcatcaataatatcggctttaataaaattatctacaagacctccaccaccaaataagtagatatctttgccgtccttttctttttcttcttgaattatcttaataatatctccgctaataaaatggatattatcttgatcttcaatcttttgtgatgttgctacatatacttttttatttctataatcattgtgcatgttttgatcataacaatttttacccattaccactatatctataccctctagaaagttattaaaatcgaatttattttcagtatttaatgaatcgtcttcatctccaactatccaatcatatccaccatcttctgaagctatatatccatcaagacttattgccagatttaaaattatctttcttttcatgttaaacacctccttgttatttaatatattgcaaaaataattcttcatcataattctagaaatattccaagaattttagctgtaattgtgaattgtgaaatgtgcattgtgcattgcaatatatatacttaattataattcataataactgccatttatatatcatttataaataggtgaatctaaagattcaagcctaggaatggatatcccaagcctacgtgcttcagcaagagtatcgcgcacaaatattacattactttcagcttttagattttcactcccactagcacttctcattatttctcttggcagcttaccttcagctaatgctaatttcattacaaaagccacaagacctgcaggtaaattcactgcgatatttattattgtactaaccttagagcccttagctgccatcaatggtgtaagttcccttaatattaaagcaaaatctttaagggcatttgcagaatcaaatagattattaagcgaacctacttttgatgctgctgccatcatacttgcgttagtaattacgtgaaaccatagccaattacgcatatctttctgttcagaaataccaaaacctgcgtttttaaataagtgagtcaccatatcatatctagatttattagtagtattatcaacgaagcccataaatatgtttttcatgaacccaccatctaatgtgtttttatttataaaagacccaccagctccggggaatccccaaacaacttgctcttttggaattgatccaattgagtttaaaggctcattaataatattattaaatattagaacagttgaatttttaacaagtggttctaaccaatttattatagtacttaattgattatgatttacgcttatcataatcaaatcaaaatcatggtcagatgacaattcttctatcattttaattttccaagatttatttactaaatcaccttttttattctttctaccatctaatatttttaaattcactatattaccatactgattgattcttcctttacgcacataaaatgtcacatcattccctgcttgttctaaagcccatccatattgtgttgaaattactcctctacctatcattaaaattttcattatatttcctcctattaaacatgtgttgtttaaaatataagtgtatgttaatataatatttgattactaataaagctacaaccaatagatttttagctatgttgtataaacaacattttattaaatctgttgttttatcaaaggagattaatgataaattatgaatgaaaaagatccaagagcagtaagaactaaaaatttgattaaagaatcgtttgtccaattacttgaggaaaaagattttaaatatataacaattaaagatattacaacaaaggcaactataaatagagcaactttttatgctcattatttagataagtatattttgctagaagaacttgttatagattgttttgaagaaatgttaccaacagaaattttaaacgctacaaatttaaatgaagaaatcataaaggaacttattttcttcctttatgaatacaatatttcattttatcaaaaacgtaaaattgattctacatctatagcctctactgtagataatttattaaaatacaaaatagacaatcttattgaaaaaatattaaatagtatggtagttagaaatgagttagattctaaagacacaaatatattagtcaaactaatttcctcatcagtatatagttgtgctcaatattgctatttcagtaaaaataataaagaatacaatattgaaaaaacgattagctttattatgaatgggatgaaggctattaaataaaaaaataccgcgaatttattcttagttataaatagattcgcgatattctaatttaatattaaatttctaaatgtaataatacttatcttaaatgctacaaattgaaatccataaagacaacatctgtaattaagattgcattttaacttttttactttcccttactactattttctgtaatcatttctgatgaacggctcttgaatctcttcagaaataagtaatttatatttctgtggatgacggtatgagttgccatgtatttcatgacttctatactctctgatttcgtcaataggaaagtcagctatataaatcccctctcgttcaccagcctcaataataagtgtatctcttgagccaaagtcggaaggtctgtacgcaatcccatcaaatgcagaagaatggccattgcagtcaggtttaccttttggataatttacagttgcaatgccaaccatattttcatatgctcttgacctcaactgtgaaatgcggtttatctccatagggcaagcatttggtactaaaataatctcagcgccttttaacataagaattcttgcgctttctggaaattccctgtcatagcaaatcattgcacctatttttacattaccttgagaagtgcctaaatcggcaacataaaaatcatcaccagctgttaatctgcattcatcttcaaaatcacaggtatgaacctttgcataagtaagtatattgttcccaaagcgatcaaacaagcaaaaggtgttccttggtaatggatcatacttttcaaggaatgttattccgatagccatatcaagttcttttgaaagtttaccaaatgaattaacaaacgaactattaataggtacagcacttgcttttagcttatcaatattttcaggaatgttatagccaacgctccacatttcaggaaacaatgcgatatccgcacccattgccttcgcttttctgcaatagctcaatcctttttgtagattaccatttaaagtatcttcgggcataagctgaagtaaggctactttcaaatttttcatagtaaaaccatcctttcaaattccaatttatattttagttaattatattcgttgatattatccattcttttaaatagcctgttatatctatctaatcctgctttatcctcaactctaattcctgaattatagaaagtgatgttgccatgcccttcatttaataaattcatttctttcaaaattcttttaagattttttgcagtaccaatgtttccatcgattatactaacatttgaaggcactaattttctaactatatctttatagtacgaaaaatgggtacatcctaaaacaatagcctcataattatttaaatcaaattttaataactcatctttaagatacggtaatactatttcttcatcaaactctagtttttctgagaattgaactaatcctggaagaggcagtaagtcaacaacatgttcgttatctaatttataaataagattatgtaatttttcttcctttaacgtcaaagcagtggcagttactaatactcgtttattcatatctttgtttttctcaatggcgggctttactgcaggctccataccaataatcggaatgctatatttacttctcaactcctctattgctacacttgtagcagtattacaagcaataactactgccttaaccccttgttcaacaataaaatctatagcatttaaaatatactttttaacttcatcttttggttttggtccatatggaacatttgatgtatctgcataatatatataatcttcattaggtaacacttttaacgtatcatataatacagtgataccaccgatacctgaatcaaaaaaacctattttcattttttctattcctccaataaacaaaatttatattctactccactgaagctttattgtatcattattttacataaatttactctagtaaaacaattataacacatttggtaaatatcacattgttcaattttcaaagtaaaactactttaaatgattatttttaaatttttgattatcgcaaaaaagaagaaatctgcttgtgctacttctggttataagccattacttgatattttgaatttgccagaaaatatgaaggttacagcaggacttatggtcggctttccaaaatacacttataaacgtttggtagatagaaatccattgcaggttacttggggcaaataataggaaagaaattgtatgattcacattaatttatattttaatgtgattgtgatttagataaccatataagaaatggccgataatagtcggccatttcttatataaaatatttacttattggaattcttaagtccttttattagaagatttataacagattctatgttttgttttctgtcaggatcttcaaatgtgtttggatgaataaaaacgctggttgcaagatatacagatctcgcctcttgataaggagattctgtaaagaatataccttctgtaattccctgcactataaccttctcaatagaattaattccctcttctatacccttttttattacttccattgatctctgagctagttttatgtagtttgcaaacatttccggatcattaatagcactgtgatgtttagcttcaacaaaactttcgagtaacttactaagtttaacatctgcaggattatcttcttttaatatgttatttgacggagcatgcaaacgtgtaagccaacgctcggtaacagcgttccatagatctgtttttccattataatatctataaatagcagcatgacttacttttaataattttgccacgtcagtgatattcgctttatctggtccgaaacggcgaattatttcttctgttgcattaaggatcgtttctttatctagtgatattttatccaaatttatcaccgctttcttattttatttttaattatatcatttttagttttatgtttcaaattacattaattgtaactgaattaactttaagcgaagattggttatattctcaacttaaaatttaaaatatatctaatttagctgatctaatatatggagagcttcaaagtaatggtacattatttctacaaaagaaataatttatatgcaaaatcttcttcttaacatttttatgcaacttatttcaaataacctcactaatctttatactaactaaaaatacattacataatattttaagattaatctgttcaacaaaaaaacaccaattatttatatttctcatataaaatcagtgtttcttctcttttgataattattttcttaaaattttatccatcgcttttccttttgctagctcatctattagcttatccaaatagcgaatttccttcatagttggttcttcaatgttttccactcgaacaccacagacaactcctttaatcaaggttcgtaaaggattcattttaggagcttctgcaaaaaaagtctcaaaatcagtctgtttttccagctcagcttctagctcttctttgctatatcctgtcagccatcggattatttcatcaacttctgtttttgtacgtccctttttctccgccttcttaacataaagggggtagacacttgctacactcattgtataaatcttatgttttgtcataatacatcctcacttatgtacttttctttatttataatgcttgaagcatttttctgaaattttcactaaaaaactcctcctaataatattaggaatttataagtttaattgaaactattgaacataaaaacaaaaatatgctaactcctattgataaggtatattcttttttcttatttaacttgaaagaattaatactcattattaattgttgtattcctaataacataagcacaattggcataataaccattcttagattaggtttcacaatagaaaatattgctgttaaaatagttattattgatattgttatattaataattttgaatttagtattataatacataattatcccctcaaaatccatagcgagtttattcgcatttatttacattaatctaattatataccaattgctttcaaatattcaataaaatcgttttctacttataatatgatcctccgcataattagaaagtaataaaacctttattacttcctttttagcattgtgtagtacaaagaagctccactttaaagccctagatgctaaaagtattgttcggtcaccagcactatttattaaatgtcacacataataatggaatatacattctaggtacaaatcataaggataaagcaaaattaaagttaatgtgaacatatgttaagtttatacttatgtcattaattttcaaccatattacttttgtctaatccattatctacaagaattgtatacaacgtaccatctgttttcatatcattaattgttttatttaatgcatttaataaggaaatttcatcttttctaacggctatccctatagctccaggtatttcaggagtgtagtcttttagcgttcttaataaaagttttttatccttcaataacaagtagtttacaacaacagaatcagatatacctgcatcaacttttccgctatttatagcgttcaataattcagatgaattttcaaaaaacattatatcttttattaaattattctccttccacttttttgctaaatattcaaatgatgttcctttttctactccaactactgcattttttaaatcacttataaaattaattttagaaaattttcgaacaataacagcttctgtttctttatacaaaggttccgtaaatgttaccagcttttcacgttcaggagttatatatattccactggctaccatatctatactctcatcagtatttaatttttctaataaatctgagaatggtattttcttcatttcaattttattaattccaagtctctttgcaatttcagttacgatatcggcatcaattccacttatcttatttgtttcaggatttatataaaaaaatggcacaccgtatgctgaagcaacagttattactcccttttctgttattgtttgcaatttatctttttttattgagttatttgccattgcagcttccatagtacctgtaccgcatccaattattattccaataagatttataatagcaattaaagttactatttttttcataaataaaaatccccttcaaacgatatacattttttatagttattattgggaattgaaaaataaattattcacgtattaaaatataccaaccttaaataaattaatattttagtatatataagtcttaaatttcttcataatgatttaggatctttttaatcttttcataaataatagattttaatgattgtggttgcactgatttaatctttctgattttttcatatatcctccgttgtaaaattttcctgaataaaggtttcatattttgacacctttgagtattatactctaattatatcaataatatagtcattgatatctaataaactgtattctaataaaagaggtgcagtattggatattaaaaagattacatctgcaaaaaattataataaatcgagtaggatgaaaacaactattttgtttccatcctctcacaccactatacttcattagtcaccatacaagggagccctgaaaattcgctcatatttactgggaaagtatatactttaaatggtttatctgcctctttttcttttgctaactcatctattagcttatctaaatagcaaatttcctttatgattgggtctcttcaatgtcttctactttgacacctcagacacccccattaataagtaacattacataattattttgaaataacttctactccatcttctgttacaagaactgtgtgttcccattgtgctgaaagagaaccatcagctgtcaatgcagtccatccattatcctcatctataaatatttcatgacttccagcatttatcattggttcaattgtgaacaccattccaggtgccaaaaccatatctgttcctctttttccaaaatgaaaaacaaatggatcttcatgaatatctaatccaactccatgtcctccaaattctctaactactgaataaccattactttctgcatgttcctgaatcgctgctccaatgtctcctaaaaatgcccaaggtttaactgcttccagtcctttatttaaacattctttagttacttgaaccaattttctggcttcttcacttacttcaccaatcataaacattcttgatgcatctgaataatatccatttaatatagtagttgcatctacatttacaatatctccatttttaaggacaacatcgtcacttggtattccatgacatacttcattatttattgatatacaaatacttttaggaaaaccatcataattaaggtctgctggaattcccccctttgatgttgtataatcatatgctaatttatctatctgctctgttgtcataccttctttgatattttcgccaattaagtctaaaagaccattattaaccactgcactctttcttattccttcaatttgctcttttgtttttataagatcttttgttggtactatatgtccttttctttttaagtcacttaattttttatcaaattctaaatgacaatttttatatttcactccacttttacaccaacataaatcatttctgtttaatatcataatattactccttgttttaactatttaattgaccctccatgaaaataacattcataaactttaatattatcaaaatatatttcctcatgcccttgaaaccacttgaattctccatttataatgcaatgatatttatactgtccattttgataaataataggacctctatatggattatcctcacttactaaacttaaagcttcctttaaaaaactacctgaaaatctttcatctaaaactcttccagtataattcattgaccaaaacggaatatcatcttgccacaagccttcttcccctgaaaatctttctccacctaaataggtatcaatatattttaagtttccttctacatattctaaatcatgagaatttggccttgaagatttacactctgaaccatttccagcatacgttgatcttttagctctacatagaaaatcaattatatttttatttatattattaactttattttcttctattgataacctacaattttcttcataatcattgactaatttatcaatgcttactttaaagaactcacttaatgcaattaatctagctatatctggataggactgcccaacttcccattttgcaactgattgtcttgatatacctaagaattcagccaatttctcctgcgatagaccttttgcttttctaagtgtttgcaattgttcctgaaaactcatagtttaatccctcctggtattagtatacttacaatattatcatatttctaccacctaaatataacacagttgacaactaaaagttgcatttagtaaaaaagaacctcatccatttggacttgattcttcaatcttacctttattatctatactaaccgttaaagtattatgttataatttccgcgcctaattcaataagtctttgtggctactagcaataccaacatatttgttagcatgcatagttattttaaactcttatatactaattttccattattgtccataatagctataaattcatctttaattttaataagtttcccttcgtattcaatttttttaccagttgtaatattccttacctctcccttaagattgtcattaattaatatttcgctttcgttgctaaaatacaaatcctttttatctacacttaaatcgagtgttactttattccaagtagatgtatcttcattaactttaccataaaatatacttgatattttatctccattaatttcacctatatatattacatcttttttatcaatgcctagaaatgctaattttttattcgaattaaatattaactgtttatttggacttgtaataaagaacttattatttattttatcttcatatattagtctatcctcatgtggtattacttgcatattgcctaaactactagcttttatatctatatttgtaagctcctcatttctatctattctatagactttatttcctgaattgccattattcacgtttatataaaacacatttgtaagtactgatgttgtcatattatttaccaccatattttttttatacttacaaatttcttttaccaaagtcttggaaaaacttgaaggattatatgttataagttgtactttttcttttccatctttttttatattttcaactattgcaattaagtctctgtcctctaaccatctatagtacataatcgtttcattatcttcagtattgatttcacttactttccccgttctagtatcctgaatatatagcttttttcccttaaaatatgttaaatacttaccttcataagataaatcaatattctctatattacttggaatggttacattaataccatctgtactatttttctttacttcaatctttttactattaaattctgatgaatttttaaacacaaaattgtttaatatatatagtaaacttacttctaacattaaagccaatgttgcccaaacaattaattttttcattccattttaaatctccttaaatttacttaacgataactgctgtcggaattgttctttcacccatactattcgatggtgcatttctaacttctccgtcataatatagagttgtagactttccaccatctaaattaattgcattaatagcacccaatttatatatcacttcctgtacttccttatatgttgctcctaaactagttaaacttcgtccatcgataaccataagaataattgctccatcttctcgctgcccaattgctgttcttggtgctattccaccatctattgtaatatttgtctcttttccatttactacaagtgtaggcccaaagcttaacgcttcttgaacacctaattctttaagttgattttctgaatacttacccacaattaatgctccttctttgtttattccaaacaaatctgttttaccatccttatccagactattccatacttctttcccatcactcattacaattccatctggaaatgcacctgtacccgtccactcaactgaagacttgtctacaaatgccccaccattaacagctgcaatcgcatcattattttgggcaatttgagatgtcgtttcaccttctgtttgcaattttgaactaacacctatttttactcttgttggatcctttattacaagatagtatcccttatacttaggattatccgctatctcatagaattcaatactatcatctttaatcttaggtatcttaacgttgctaatattagttgttccattttctgtatcagatgatgttttacctataatactgtttatcttttcctctgataagaacagtgtagccaaatattgagtgttcattgtccccattgctgatccaacgaatgttctttttgcattttcaaaaggtccatataaaagtaaaaaaggaaatgtgcatacaataaagataagttcaaacatcataaaaaaaatcatgttagtaaagcgtaacttcttcttattttttttattactatttgattttgacattaccctttcagaattctttttatgtattccatatttattcataattatgtatcctttctataaaatacacatatactttagtttaggcatatgaaagaaaataacgagtccaaaataccataattattttttattaggtaaggaagtcgattggtctcatagcggtcctattaggacaatttgctgatgcagcatgatggaaaataggcttggcagatggacttgttgttttttgattgtaccttattgcaagttaagcaaatcaagataaaaatgtacaataaaatttgaagagctgatatagtaaaaattttctcttttgtattctgcttgctaatataattaatgattctattagatattaaatctatttcaattcaaagagatattctgagtctgttttattaatttcactattagatgaatcatcttctcgtttatttatttcaactccagtaataaatttattatggtcaggactaaaaataaaatgccttgaaacattacatccatcatcttcattatttttaaatatcttatctttaataactatcttatttccttccaactttccatacatagctatattttcatttctttcttttccatcgccaagatacgtgaatgctataaactcattttttaaatcaactgcatcaattgataaattcttattatcaaaatttatatcatatttagttatctctttattatcaaaatctagcttgtaccatctttcgctaagattaccacttttatttttttcaatacactcaactagtaatgccccatcttcaaacaccttttcaattttgggttcacttaatttcattgatgatttttctcctgtttctaaatttaatttagtgatttgctcttcttcttgtatataaatatttttacctgttaaatcaaacttgcaatcaagtcctatcccatagaaactcgatttggtagtatattttttattttctttatagtttaatattgtatactctgctgtacctgacatctcttctatccctttttcttgctttagattaactttactaatatacgatatatactctctattaattaaccttaagtgagcttgagataataaatccggcttatattttatagattccatacctggaatttcgccttgaaattctttactaaaatctaaaatctcttcaagtttttcttccttagcatcatatataaaagccttttcatcatttccaagtaagactactccactatcatcaaagccgcatattctagttatattgctatcatttaatatttctgtattctctccactctccaagttatatttgtacaaaatcacttttttgttttttatattgtaagcatctttattaactgttaaaacattctcatcatcaatccaaaataatattattttattatcaagcccctctaatctcttttgcaatactggttcacttctaattttattatcctcacctttaacgagaatatcatttttaacattttctgaaagcttaatttcttttgtattagtgcatccacttaatattgtggctacagtaattaatcctaccagagctgtttttgttatgtatttcactgtaattcctcctaataaaatttaggtctttcaaatatcagctaaatattttacttttaattaaaatctctactatcgtaatacatactaagatatctattagttaattctaagatatttcttacatatacatattacatactaaatgtttcaaactttgtgtaagttgttacaaacatgttaactttactttaatcttcacggtattatctgaaatatccattgttatgtctccattatgctcctctacaattaacttacatatatacaatcccaagccattcccctccaggtctgtagaattttcaccccttataaatggttcaaaggcttttcctttaaaatctgaatttaggttacagcttttatttgaaatttctatgttatagaaactattctttttatatcctgcaatctcaatatctccattttcaattgaatatttataagcattttcaagtaaatttaataaaagactttttatctcgtcatatatgccaagaataataccttcttcaatatttattttaactcttatactattattatttctgattttcatttcatctgaaatttcatttaacattttccctatattaaattcacttttttctctacttaaaatttgacctcttgatacctctaatatactcgaaatcatgctatttaacttggcactttctttttcaattgaacttactgcttgctttctaaacttttcattatgaaaatttgtttgaagtaattctgcataccctgatattgatgttaaaggtgtttttaattcatgagtaatattgcaaaaaaaatctctcctagttttttctaagtgatgagttagttctatctgctttttaatcttttttctcattttgttgtattcataagctaagtcactaatttcatctttattttcatgttctaatacttcatatccataattaccattgcatatttccctaaccccatttaatagattttctataggccttgttgattttcccattataagataagttaacattaaaattataagaaagaaaaagctctctactaatgtaaagagtaaatatatgtttctattatttgttattatctctttatagtctctaataatttcaacaattccaatgaattcatcgtttgaataaaacggatatgcaaaatatcctttataatcattattttcctcactaaaaaatatatatgccttattttccttcgccttatcaatatgctcaataatctttttattaacttcaccttttacattttgatattgaagctgccccttatcatcataaatacctattgtataattattattttcagataaacttattgctattttggcactattacttatgaaagttttcttatctaaatttttactattaatcataaaatattcgttaataaaatttgtagtattactttgctgcatagacatatcatttttaatagtattattgctactataatcaataatactctttactactatatttaaagtaataccacctaaaaccagtaaagtcccaactcttattgttattttagttcttagtttcttatttttcataatgttgcctcatcttatatccaacaccaaatactgtttctatgtatttatttccaacatcttcaatcttagctctaagtctcctaacatgtacatctacagttctaagttctccaaaatagtcataactccatattttatctaggagctcttctcttgagaagaccttccctttattagttgctaacaaatatagaagctcatactccttaggtcttaaacctatttctttatcattttttattacagttcgtccatcttgatctatgtatatatcttttcctatttctattaaattcttttctttttctaaatttattactttctctattctttgaagagacttattaactcttgcaattacctcttttatatgaaacggcttagtaatataatcatcagcacctatttctaatcctaataccttatcaacaatgtcatttttagctgttaccataattactggtatgtctcttttctgttgaatttttttgcatacttcaaatccatttatatcaggtagcatcaaatctaaaagtactaagttaggtttaatttcactatttttttttaaaccttctgtcccattcttcccgctctctactacaaatccctctgcttcaagagcaaaaattaacatttcccttatacttttatcatcttcaataactaatatcttattattctccatattttcacctcagatttaaattatatttccattttaccattaatttgtcataaaaatatttctgtctaaaataaaattgtcaattacatataaatccttacaataaatgcttttaaattaatatttttcaaattttcatacactagcttaaattcgtttatacatcctcatatatcatcaaacaaaaaaaagaatgtagtggatttgttttacacaaatctagctacattcctgaatttttataatgttcactaaataaagtccgtcgcgtaattccacagagcttatttttatcctataacttcttttgccatattgatcatatcatccttgcttaattcagtataattcatattagtaatgcaataagatagtccatcttcataccacatgactgattgatcttgactaacctttatttcatctttttcgcctccatatccaatttcaagaagccctttatcttctaagtctttttcttcatctgttggtttatatccttctgggactgacttgtattgactactagtatatatgattttaactccattatattctacttcagaagcattttttcgtgtgtttccataaaaagatttctcatctgttttttcagctgacatggctaaaatctgaccctttttagaaccatcttttttataatcaaaatctgcgctcttgtatttttcagtagcatctcctttttcattacgaacttcattgtttacatagttaaatgtatcaaatttaaatccattattaaaggattcaacatatttaggggtaaagccaacagactcttttactttatctttacttggaaaagttttaatttcagttagatgagatgatgaactaaatattccagaaagattagttgctgcaacacatgttacagttgttgcaataatgaccattcctgcaattataaatgtctttggttttaagaatttatgtttcatagtaaaaactcctttattatctttttcttttaatatttcatttctaattctgaaaaacatattttcaggcattgaagcatcatctgctttatgaattaaggcttctctaattttttgatctatattttcatcaaaatttttatccatcaagtcccaccctctttaaatttctatgattatattcatcgtcacatttaattaaactgctttttaatttttttcttgcactatgaagcctcgatttgactgttccttcaaagcaccccattacttttgcaatttcgctaactgtaagaccattaaaataatatagaactattactgttttttgttttaaatcaagcttttcaatttctgcataaagattattatttttctcttttctcaaatattgctctatagaagtatcaatacttttttcatctaccttttcaaaaatattatcaactggcagtgattttttatccttctttgcatatctccatgcaattctagtaagcattttaaaaaaccatgatttaaaaaattcaggatttttaagacttcttatattgttatagcagcttatgaatgcttcttgtacaatatcttcacttgtatacttactacctgtaataagatatgagtatttgaatgattcatttttatatatttcaaacaattcacctaatgcgttcatatcaccagactggatttttatgacaagttcttcttcagacactttgctctctcccttcgatttctatcgatgcatctatatattagagacattaagttactaattggttcattttcagaaaaaatttttatcgcttcccttaatatgccttctaatcattactttttctattcttattaaaatccttttactactatatagcaatcaggcgtcaatcaatttcaattattcttttatcactgaaaatctacactatccaaattactatatacacatctttatattcataggatttgttttaaactttcttccacaagtaaaacaaaaaggaggaccgcctcaataatctgggactggttctcctacattgcttagatacactattaaattataattgatgttaagttctattgatttatagttttgctcatagttattttagaaattaacataaacattagtctctttgttattcctctgtaggtaatttagtgaattcctatttacttacgtagaaagtattacataatcatgctgtagtaattttattattctctcattatttttatgtagtaaaaaatgtaactacactacatataaattgtataattgaaaatggagtcattacatatttctcttttttactttttgtcagcattccatttcctataattgcatatcctagaaatagagtattaactattataattatttttacaaacatagagttaaaacctatagacagtatattaccccactgcaaataagccatacctacaaagataaataccaaaaagaaagtacaacttattaaacgcatcttttggggtaacactttacttgttcctccaagtgcatattcaccaaatggagcaccaagtgtaattgacaactgtaatagagccattccaaaagtaataatcgcacatatcaatgaaacaatataacctatcatattaacatcacctcttttttatattgtatttgttaatataataaaccctgtagtatactacctagtcaatactaattttattttgtttctttatttcaatacaccttcttatattataattttcaatatcatatacaaccttttctaacccctttcttagactatgcaaatcttgtattttctttttaacaaattctattttttttaatatcatttccttatataaatcattttgagaaatttcgttttcttcctgaatagaaataaagtcttttatttcctttagagtaaaccctgagtcttttactattaaaattatttccattatctcaatatgacgcttagtatatattttataaccattgctcttcctttcaggcagtggtaataatccaaacttttcataatatctaattgtctccttctttacacctaccattttagcaatttgactaattgtatattcctccatataactatctttctcccattttacaaacatttactttttattaataattataacatacaatgcagatcattaactttatattggacttattagcgcctatacttttacacataattataattttgtcagaattaacatttattattgcgctataaataataaatagagtatcatatttatctattactttccagttactcattgtaaaaattatggtaaatttaagatgaaaattttgaagaaatggtatacaataccattgaagatgaaattgcttacagagttttacatacaaactatagtaaaggagatagatatttatgataaataaaaaattgagcaaaactcttggtcctatatttgggattatgacatttatgttagcttccggtataacttatacgtcagcttttgctgatgatactatagcagcaatggcgcctgctactactacaaccactagtgctagtgctacttatacagataatacagccacaccaattaaagattattctatagctataaataaaagttcagaagaaaatggaattaaggtgactgttaatagtgcactagctacaaaacataatttaaaagtaactcttaaaattgaaggaatcactgatcctaaagcaattgaacataacaattcgcttttcgaggtatcatatggtgacaaagattacggctttaactctatcccttctaggcaatatgcagatgataaaactatgtttttaacattagaaaagagtaattatcaaggcgaatatcctgaaagtgggaacttaagagttgatgtagtactttcaaattataaagttaatattggtatggatgtacctgtagatttcactaattctattaataaagtatttactaaagatattacaagcacgctacctgaaattaattatactttgaaacaattagattcagattctatggggacaactataagctatactcgtcctaagcataaagaacataatattgatgaaaataatgtttttttggattcacaaatattattaaaagttgatagcaatttttataaattagattctagaggcgatagcattggtgacgacggaacaattattgggcattattcatctaaattgccagcttatgatactgttaaaaatggaaaggatataagtgtaattccaatactttataaagtatcgatggatcaccatgacatcatatccaatagtagtaataaaaatactacaacagactctgtaaacaacttaacttatgaaaaagaattcagctcttctagaggattgaaaggtacaatatataatgttgaaagaaatgataatagtgtaaaggtatattgcaaagggaagtctgagttagaaagtttaattatagcaagcaatatttctttaaactacaatcacgttaaagggcaaaaggatgctactatctataattacaataggtttataagcttttataaggatccaaaagattcccttggatatattgtaaaatttgataatgttgataaagataaagctgctactttaaatattagttctatgataaaaggaattagtacttataaaatgggtgatgaaataaaactatcaaattaatgaacccaatattaagtttatggaaattgtatcgatataaaaaattattaaagtgaggagattttatgataaacaaaaaaacaaatagattattgagttctatgctaggcgctgctttaattgttggacttattcaagcgcctgcctttgccaccgataatgtccaagcccaatcatcctatacagctaactctggattaattggaaataacaattctgttgagcaaaatggagtgaaaataactctaaacagtgttgttggaacaaaaaataaactcaaagctacaatcacaatacaaaccccaacgccttttgataaaaatggcagagaaacagcacaagttttattaaattatggcgacaataaatttaatggtggaggtacatcatttagacatcccgatgacaaaacattagtcgtaaacattgaatatacatttaataagtctgtattacccgaaaagggtcctttaagaattgatgtagtaatgcaaaaatacaaggttaatgtaggattagatgtaaatgttgatttttctgattcactaaaaaattcaatggaaaaggattattcagttaaaatccctcaatttgattctacatttaataagttagaatccgatattttggggactcatctttctttcactgaaccggaagaaacttctttaatgagaaataatgatgtattaaccgaacattcctttatcttaaaagctggagataaaatgtatccattgatagattctgacagctactcatctggcagtgatcaaaataacatgtccatagtaactacttatgacgcagaaggagcaacttatgaaaagatcaaagatcaaacagctataagcttaatccctataagttttactattaactcaaaggatcaaaaaaacttatataaagaagaacataatgataaagacatgcagactatcaataatgtaagttatgccaagacttttgatttttctgatggaagtaaaggcgaaatctataatattcaaagagacgataatagcgtaaaagtttatctaaaaggcgtaaatgaaaaagaaagtttattacttgcaagtagtttgtttatggattataaacatgagaatagtaaaaaagattattatgatcatgattattacgacggtaatgaacgcactactttctataaagacccaaatgattctttaggttatattgtagaatttagtaatgtaaaaaaagatgtaaatactcaaatagactatgatccaactataagtttaattaatgcatatactgttggggatgagattcaattatctaagtaaatatatcaaagttatagtctaaatttagacacctgatatttatttaaacaaatgaagcctcactatagtatccaaattatagtgaggcttcattttattaagaatattaaattattattaaatacataatttcttgtgtctattaatttaagagactcaagaacatcttaatgattcattccatgaacaaagtgtttaaaactttagaaatagatttctcaatttcagattccattatatcccattaaaattctttattctaaactttaaatttatttgcttcctctatcatttcattagtcatatcactaagcatttgtgcagaagaagatacttcttctgttgaagcattcacttcctctgatgatgctgaaatttcttctgctgatgccgagacttctactgaaattgaagataatccatttattctattcaaaatagcattcttatcattttctatattatcagcagaacttttaactgtttcaattttaggaattacttcatccactgcttgtattattttcttgaaagatactattgaattatctataattttaccttgatttctcatttcatcatccatagtagtcgattcttgaactataatatcagcgttattagatattaaacttattaatttactaatattttcagatgattcttttgattgttcagcaagctttcttatttcatcagcaactacagaaaatcctcttcctgcttctcctgccctagctgcttcaatagctgcatttagtgccaacaaatctgtttgttctgcaatactatttataagacttgtaatctcatttatttcatttatatcttttccaagtgatatgactttactataaaactctttaaatgaattacttacatttgttactgattgatttaatcctttcatttcactactgctatcatttgccattaaacttatttctctagaatttgaatctacaacttgtatctctctaaccattcttgataaattattgctaaattcatcaaggatatctgttatatttattaactcttcagattgattacttgtcccttttgcaacttcagatattgcctctgcaacattttgtgacacactcgctatttcttctgatattgacgctagattttctgattgtgaattaatatttgaagaattttcttttatttttttaatcattgttcctaaagattcttgcattgatttcattgcattagtcataacaccgatttcatcttttgaatttaaatacttagtagaaacttcttcacttaaattaccttctgctagtaattctaagtgctttgatgtagactttattcccttagatatactatttgaaattatgtatattataccaagtccaattaatatgaatactatagatgataatgcaactgaaatttccagagtgcttaattctgataatatttcatttcttgctattgtaactcctacagaccaattagtttcttttactggagcataacttacaaacttatctacaccttcatattgatattcacccacccctgtttctccagagatcattttcttttcaatatttgctaacccctgtaaattagcatccttttctgctgcctcgattccattatacatttgagtaactaagtccctatttttatgggctattactactccactgttatttatcatgaatgaagcacctgtttgcccaaacttaacttgatctgttaagtcacttaagtcattaccatcttgtgattctgctaatactcctacaatctcattattgtatttgataggaactgcatatataaccataagacttccatcagttttatttattaatggatctgatacgctccttgtaccactcatagctttcttaaaataatctctatcgtttacattagctgttaatcccaatgtatttataagatttccatctttatttatataacttagtctactgcaaccaattctcttaacttcacctgaaagaatcgatactttgtcttgtaataagagattaggatcatttatatctggtcttgcagcaatagcctctagtgaatttaattctccctcaattcttccttgaatattacttgcagtttgctctgcaattctaggtaaagtcttgtttaaatttgactttaatccatttagcgagcttataacagaaactatccctaatccaatacatgcaattcctattatcagcccaaagaataccgttaattttgtttttatacttctcataatatccccctttaataaaattaaacttgaacttaaaatgattaatcctctttaatatcgatcctaaattcatattttatacattttttgacctaataatattattataccatcttttcatcaaaattcgtattattattatcattggttttcatgaaatattttgttattttaaaattattctatacattattggaaagtatatctctatgtacggttagacttgctccaacaacttttgtttcttctctcccataaacaaaataataagaaggagaaccacatccataatccggacttgcttctcctccattacttaaatatatatgttgcaattcacaatgcacatttcacaattcacaattgcaactaaaattattgcaatatttttagaatcatcatgaaaaatcatttttgcaatatatattattaaattgcaatttacaaagtaaacttaacttgtgcacatttattgagtagtaacagcgtaagcgaccatcattaaatcaccttttttgattctagaaaattattttaagttcaatttttcaattgcccactctgccatttctcgtacctttggattactatcattacaagcatacagtatatgttctttatattgctctttatagtcatttaccattacattaatagcattaactttccatttccaaacacttgatttatctatataccaaaacttaggctgcataacttcttctaaaaatttataatccattttgattattttttctagagatatttgttcacttaattcctgcagattaggaaattcttctgtttcctgccaacgatttttattcatagggcatgcatcttggcaagcatcacacccataaacccaatttcctatttcttctctatatttttcattagtcatatctcttcccataaatgtagttatacaagatacacatgctataggattcattgtatatggttttgataatgaagctgaagggcatgctttcatgcatagattgcacttatcagaacaaggtcttacatttggtatttctactgcttctaattccttatcaataagccatgcatccaaatacactgatgagccattttcggtataaaagaaattattctttcgaactattccaagtccagctttcatagctgcaaagcgtagtggtacaaggccaaaacctctttcagtttctgctctaagccctaactcttgcatatattcttcaaattttacactgtcttgaaaatctttagaattcttatcttttcttgcatcaaccaaatagtattttgcaatcatgccttttaaatgttctggaatatgatatttgccatatcttctcacacatattacaattgattttgcccaaggataagtatcttgcaattgtgtaaaacgatattgaccttgataaaaacctttggactctggaacacgttcaacacgttcataaagtctttctttatagccatctatatcagatattttaatgattccacacttttcatatcctaaatttaatgctgcactttttattttatctgctaataaagtcattttctctacaccctttcttaggttaggtaaaaagataataaattatatatgttgcaattgaatttctgtatttaaccctttattgagctctttgtttactaaaataataaatgtaaatttattattgcaacatatatagtatgcttgtttgttatttatttcacatattctaattaatgattataattattctctttcaactattaaggcagttccttgacctccaccaatgcacaatgttgcaagtccttttttcgcatctcttttttccatagcatgtagcaaagttactaaaatacgtgctccagatgcaccaataggatgtccaagagctatggctcccccattaacatttactttattcatgtctaagtttaaatctctagctattgctatactttgtgatgcataagcttcatttgcttcgattaaatctaaatcctcagcttttaaattgattttatctaaggcagcttttgttgcataaaatgcaccatatcccattattgctgggtctaatcctgctgatccgtaagaagtgattttagcaagtggttttattcctagagctttagctttatctgcactcataattactaatgctgctgctccatcatttaatccagatgcatttcctgctgtaactgtaccattttccttaaaaataggtttaagtttttttaatgcttctatagtattcccgaacctagggaattcatcttggtcaaatattatttcaccttttttagttttaattactataggaactatttcatctttgaattctccactctttatagctttttcagctttttgttgtgataaaagtgaaaactcgtcttgttcttctcttgttacattccatttctcagctacgttttctgcagttactcccatatgataatcattgaatgcatcccataaaccatcttttatcatttcatcaatgaattctccatgtcccattctttgtccccatcttgcattatcaagtaaaaatggtgcactcgacatgttttccataccacctactacgatagcatcagcatcaccagcttttataatttgagctgctaaacttatagctcttaatcctgaaccacaaaccttattaattgtaaatgcaggtatttctacaggtagtccagctttcacagctgcttgccttgctgagttttgtccaaggcctgcttgaagcacatttccaaagataacttcattaatttcctctggtttaatatttgctctcttaacagcttcttttattactattgcacctaattcaactgctggtacatcttttaaagtctttccataagctcctattgcagttcttactgcacttactattactacatctttcatttcttattcctcccatattgaaaagtttatttgttatttttttaacaaattttgatataaaaaatttattcgcattaaccatttaagagtttttataaaacttaaaacttactaaattgatttgcagctgctctatgactttatattatcagatgattatatatttgtaaaattgatatattcgaattgacaattcgattttttcaatatatcattaaattaacataaagatcggagtgaaattaatggatataagacatttcaaaacttttaaaagtattatagaagaaggtaatttttcaaatgcagcaatgaaattagggtatactcaatctactgttacctcgcaaattcagcagctagaacaagaactctcaataaagttattcgaaaaaattggacgtaatatggtattaactcctttaggaaaagaattaataccatacgccgatgaattgcttaatacagtgaaaaagattaaaagcattggtaaatatggcgataacatcacaggagaattaaaaattgctgttgcagaatctttaatgtcttataaattacaaaatgtattagctatgtttaaggaaaaagcccctaatgtaagactttctatggttgcgctaaattgctatgacataaaaaatatgttagctagtggtgaaatagaccttggcttgatgtataatgtgggaagtaaaaatgaaagtttaaatgctgtgaagctttctgattttgatgtagctttagtatgctcaccgcaatttgaacaagaaaaattagatttcagcacgcctaaccaaaaaataaatacaagccttattatcaatgaagttgaatccatttatcgaaaaatacttgaaagttatttttttgataaaaatatattcctagataacacaatcgaacttggcagcattgaggcaataaaaaaatgtgttgcaagtaatcttggaatttcgtttttacctcgttttactatagaggaggagcttgaaaatggtaaattaaaagaactcaaagcaggcgacttaaatgctaaaatcacagcaatatatgcttatcacaagaataagtggatcagccctgcaatgtctttatttattgaattggtgagaaaagattttaatattcaataactatagagatccagctaagacctgaacttatgcttataactcgccgaaatgagtaacacacttttgttccagtttctaggtaattctgatgggtgattctaaggctataaagttgcacccaaagtgctagcctcaaagaacaagctttgaactagcacatttggaacaacttatagccaaagaatcacatccatcaaaattaccaatgaaacattccacaaaagtatattactcatttctggttgaaggatatctcatagtctaagtatagtttatgattgtgttatctatatctctataaaatgaacctaccagaaaatatgaacttttctagtgggttcactttattgcttagatcaagcttcaactacgcatggattttttgattcttacaaattttatatttttcttctactatatatttagatccttgagatactgatcctaaattgagcctatcattattaatagtcggcctaatttaccattcaatgttttttattttctaggtaggtaataatatcttctacatatccatcattaaactcgttttcgcttaatatataataattatttttacttataccatctatatcaaccttgtcttttatatatggagatatcaagagtaaggtatcttcatcatgaattaaattttttaggtcatcatatgtagaatcaacatgaactttataatccatatttttttctttcaatttttgatttaacttttctttcagagtttcagaaagagattttttaaaaatatttaatcctccatccattccaaatggatttggtctagcccctactattacttttgcgatgataataatatctttcaatttcattccctccaatattttcctatatactatataataccacaaatttaattaaatcccatactatttatcaggtgtagcaatgagattggagtatgtccaatctactgttaattcacgaattcccccctataacaacgattatcaatcaagttattagaaaaatggaatttcagcactccaaacaaaaaatagtagccccatgatggcacatggatagctactaattttttaactattataaaattatagtgataccagttgcctaagcaactagaattatatgctatattgttttaaaacatattcctgtatgttttatactctgtctttaccttattatcatttacttattttatatcaatttttaataaaaaataggcaattattttttctaaattttcttattaccttttatttgtgatatattcctctgtaactactacaaacaaaacttttctttttattatttaactcaaataacatattgtgtcatctttgaaacattcttataatattattttccaaattttatattgacaacctatattttcagatttacaataaaaaatgaatttgaattcaaattcatttttgtaaggagtgaatttttatggataatattatttcaagaaaaacagaagataaaaaagaattaaagagaaaagcaatcttaaaagcagctgctgatgttttttctaaaaagggctatatagaaacttctataaaggatatcactaatgaagcttctatatctgtaggttctttttattcttactttaacaacaaggaagaaatattgctacaaatctttgatgaaatttcaaatatgagtatggaagctgctacagaaagttcaaaggcgttaaaagataatgtaatcgagcaatttacaacttcaatgacaagtgcaatctgtatatatgcaaaaaataaggagtttgccaaaatactgtttgtaaaatctatgggcattaacgaattatttgaaaataaacgcacagaaatcctagatagaacaactgtttatttaaaaatgctattagaacatttaaacacaaaacacttatactgcatagataatatagaaatatcttcagttcttattacacatagcatatttggtgtaataacccattggcttgatgaaagacttaaatggagcataaaagatgtaattttctctttatgcacttatcatctaaaagccttaaatatagattacacatctgaaaatattaataaatatatagataccgttcttgaagcagattacaaagaacttcttaactaaaaaattcaaattatggaggtatataaaaatggaacaatacagatcaaaggaactttatgcggatttttacgaaaatgaaggaaaaccattagtagttattatgggcggaagcgtacctgggcttccatctaatataagtagtgagttatcggattatttaaagcagaatttcaatattttacttttagcatactatggagtcggagaacttacaaagtctctagaaatggttccaatggagtactttacaaattccataaactttattaaagaaaaatacaatattcctgataataaagtaattattataggtcagtctaaaggtggcgaagctgctttagtgttagcaaattatatgaaatcagcaatcactatcgcatgtgttcctagttcatatgtcttccaaggcttgccagaagatcttttcagcattttaaaagcacaaccaaaagcttcatggtcctttaacaataaggaattaccctatatcaaatttaatattgatgatgatgctatgaataatgcaaaaaataacaatttttgcagatgttatgaaacttccatagaaaagaattttaatccagatgccgtaataaacatagattcttataaaggtaaggtactgcttatttcatctgaaaatgattcatactggccaagcaaaaatatgtgcaatactctagttgaaaatagtaaaaacaaaaataatattaatcatgtttccttaaacttagaaggccatagctttttaaaatatgatgaatctgtaagagaaataataacctatttaaatacaaatgcacaataactttaataatccatacactttacttttaggagtcttaataattctacattttgtaataatgtcataaatctataagaagaaaaccaccctcttaaatttaccaggttgttttctttttatatttacattaatcaaatctattaacctgaaaaagtttcaaatcttcagaagctgttcctagatacaattgactaagcataatcccacccagtatagcaaataaaataccatttgctccatagcctaagcaataccataattttttattgtttgggtcctttcctaaaaagcctaaattatcttgtgttgatgcaaatgctccacaatacctataatctatttctatattcaagtccggaaataaatttttaagtctttgttctaatttatcatattgtttttcacataacttctcattaaatatgtctggcataaaatttatatcttttcctccaattattatccgattgtcattagtagtcctaaaataattgtatggaacctcattatctctaattactacgcccttatagatttctctaaggttttctattggttttgttgctatattgaatgctgtagttttgattccaaatgctctttttgtaaaaagttcagtattatatcctgttgcgactaataaaattttacctctaactttatgtccatacacggtttctgatataacttcattttcagtgtaattaatacatgttacttctgagttttcatatactcttaatccctttttacaacttgaatcaagtagtgcatgagtaaatttatatggatcaaattgcgctcctccacctttgctaagtactccagccttcacatcaaaagaaaaaggattattagtttcatcaataaattctaccggaaatccagcctcatatctaatgttatattcctgctcaatttcctttatctcaatctttttatctgtatacaggaagctatcagttttcttaaactcgcatgtatttccatactcatttataaattcctctatttcatctaatgcttttattcctaatttatatgactttataacattatctatagacgtataggcttttaattccatagccttactatcgagttcatattgaagaagtgaagtagttatgctagtactgccatgagctattcttgatttctctagaataacagcatcaatattatttttagtaaaataataccctaagattgctccagtaactccccctccaactattataacttctgtattaatatcttctgtaagatactcatattgttttttaagtttattaattcttctaaagaaacactctccctgtacatactgtatattcataataactatctactcccttaagttttaactaaattataataaaattattatttgccaaaatacttttaatatgtataacaataaattgatacacatgacatccagtatcagaagccatatttcaaacactacttgtttatgttctctttttaatgggggaggtagttttttataaatagtatgtaaatataatctccattgaggagtagaagcatcgtcttcaaaaaattataaatagccttaaacattttatatcaatgtttaaggctatttttagcatttattttgtatatcatttagtaaaactctctatcgaaagtaatgatactcctataagaaggattaatattatatatcacatcttgtatttgagcttgtagtttctttttttcgttatctttaaagctagtcttgtccaataccacatcaaataatatggttttttcttcactttttccaacaactctaaaatcatgcatagatactataccctttattactttaatcttctcataaatttcttcttttaaggctgtgatctcagggctgtctgtgttaattggatccatatgaattgaaagatatacattcattcgtttaccaatttccttctcagccttatctataatatcatgcagttccataatcgatatattacttggaacctcagcatgcaaagaagccatatatctaccaggaccataattatgaattacaagatcatgtactccgcatatatatttataacttattacgctgctttttagctcttcaacaaattccttttctggcgccttcccaattatagtaccaagcatttctcttccaagttctatacctgaatggagaataaagagagatacaatgaatcctatatatccatcaatgggaaaggttgtaaactttgtaataagcaaagaaaatgtaaccatagacagaactaagatatcagtaaaggattctaacgctgatgctttaagtgcagatgaatcaataacattacctatataatttgtaaatctattaagaaaaatttgcaatggtattgcacacatcatgcaaataaaacttactttatcaaaaggtatagttacaggatgtaaaacacgcaaaaatgaacttctcagaaattcaaatcctactacaagtatggcaccagaaaataagagcgcagttatatactctattcttccataaccaaaaggatgtttatcatctgccggacgatttgcaagtttaaaactaaatattgtaactaacgaagataatgcatctgtaagattatgaaaagcatctgctgtaatggctatactatttagaaataaaccaataacaatttctagaataagaatagaagaatttattattatcccgacatttcctccaagagtcccgtaagattgccttactgattgggaatttacatttttgtggtctttaacaaattttcttattaaaaaatcaaaaatagatttcatatatttcgccttccaccgttttatcttatttactccacgtatgtttatatatgcgtttaatcaataaattaacactataaacttactcaataattcagcgtattattaaatattataccataaaattccttatacagcataataaacagctcatatgctaatgagctgtttatcttattacatatttagagcaaattatcggcaaaaaaactcatttatttaattaatgctagtttgctactacttgattcttttttattttattattaaaaataatatatagtattgctccagttaaaaaggtaattatttctgtaatagtcatagaccatataacaccatgcaatccatagaaattattcaatactattatgacaggaataaaaagaattccttgtgtaattcccataattgttgatggtattccttgacctgatgcttgaaaaattcctgtaaataatgtagtaaatccattgaaaagtgcggaaataagcatggctgccatgatataaactccaacacttaatactgctgaatcattagaaaacagacgaataattacatttctaaaaataaaaactaaagtaacaaatccacctgataatcctaaaatccataaagctgattgttttatactgtcttttaatctcttaaagttttcattagaaaaattatatgcaattaaagggataattcctaatgcgagtcccattgcaaggaattctggtacttgtacaagtctcaaagcaataccaaaactagctactacactttctccatatctaattgaataattattcaaaagaagagttgtaataattagaaaaccagctaggaacaattcagaaactccaactttatatatctctattttatctttaagggaaatattaaaattcttaataaatccttttaaattctcactttttgtttccaagtagtaaatataataaattgatgaagctatattagccaaaatcattgatactgctactccaataacattaaatttaaatactagtataaataatgggtcaaatataagaccaaaaattgtacttacaaccattccgaacattgattcttttgatgctccttctgctctcacaacttgctccaatgcgaagttcattataattgcaaaaccaccaataaacatagttaaagaataactttttgtataattaataatagcggaagtatctgcacccaaaattttaacaataggattaagtgctattatagcaattattccaagcaaaattcctatgataatactgctataaaaagaatatccagctatcttcttagctttctctttatcttgtttagcaataagacgagttataaatgttccgcctccagcccctaacatatttccaaaagccattagtatagtgaagattggtagtcctaaagtaatggcagttaacatatctgtattgtttaatagtccaataaaaaaagcattaataacgttatatattgtacctactgacataccgatcatcataggaatagataaatgtgcaattgccttagtaatcggtgcactttctaaataatattcgtttgaaaatttttgtttcataatttcatcctccataataagtattattagaattcatattcttagaattctaagtttttagatataagttattatattaataacttatagatttctatctactttcaataacaaagctaacaaagtttccttctcttgttgcgtcaagtttgcaataatattttcttctgcctcaactaccaatttattaaaatcttctatgagttcagcacctttaggcaatacatatatatatttttgtctctcattttctttaggaattcttctttcaatatatccttttttctctaatccttgcagcatacttgtaatacttgcttctgtacgttgaaagacttttgccaaatctttttgaataataccactgtcttggtgttcataaatataacctatcatacgtccttgttgagaattcaatcctaacttttttactttttcatcagaagtgagtttcatttttatcgcaatacttctaattacttctgaatatggtgtctctacagagtatccagaattagtcattcaaatccctcctaaacttcacttagaattctaactatttatagtttaacaattagagtcgcaagtgtcaatatttatttcttataattatttttatatttgtaatatttcttttttttacatgctatcttttacttatgatgcggttcaccattcattatcctaaatcatcttctaatattaattctttttatcccattacatcgactacccattctattcattatgcgaaactaatttagactctaaaaatatttttttgcaaaataactaaatttatcccactgaaaaaaattactcttttcgaatttatataatataggttttaatttgaggttattaatcaaaataatttcaaaattaaatctttatattccaagtaagtatattaacatgattttttggctctaaagagtcatgaaataaatacctgtgagttgcactctcccctatggggtgaatgtgtcttatggattttcattaaaatttaaaggagtgatgtattatgaaacacgagaaattaaaaaaactagttgctctcactttagtaattggacttacattaactgaaatgccgatgcttgctaaggcagcaacaacaaattcaacaataactacaaatccagcaaaacttgcgaatctaacggagacatcagtatcaaagcctagtgaagttccaagtaacatatggaaatatgcatataatgtagataagaaatttaataagaatggagattttgcattattattatgtgcagttataaaaaaagagagtaattttggtgcaggcttatctggcagtccctcatctggtgatggattaatgcaagtggaaccaagtacaagaaatgcatatgcagcaaagtttaaatcaacatatggacgaacttataatcatggaaatcttcaagatcaggtagcattaggtggattgattataaaggagatggttgatcaatttggtggtgtatataatggtttattgcattataatggaggtccaaactggtatccaggttgcacagactcatatggtcgaccaatcctagctgatcaatatgcaaacgcagtatataaaacatataaaaactatggtggaaagaaataacaagcaaaataagtggacaagtttattaaattccaatatataattgacttttttaattgggagtttcttggacttagtgtgaaattgatatagttatttgaattgataaatatgataggactgttctcattattttttgagaacagtcctattttttagcctataaccttttttgccatattaatcatatcttcttaacttaattcagtataatccctattaaagatgcaataagatattccatcttcataccatgtaactgactgattttgactaacttttgtttcttcacttccatatccaatttgaagaattcctttaccttccaattcctttcttcaaaagccctaatataataaaaaacttctcttatgtcaaaaataaaataattacttcaatgaaatataaatatcaattttaacattatcaaaatctgcttcatatcttctatctaaatccatttgccaaattttactccaagtttctacaactactttttccatatgtcctttaatagagaacttagcatatttttctgaaggaattttctttactgtaagaccttcattttcagccttacatacctcatttcctactgtaactaaatatttattatcttcataatctgaataaagtcctatggtatatttattcaccttattttttattgtttcactgatgccgccttgatataacttttcccaaaggcctctaatagcttttcccatattagggccatcattgcctgtaatagcactaactcctaccactattttttcttctaaattaataatttcatacttcatattcataacctccatatatttgataaggttattatactgggttcaacatgacacctatatgtcctattaagaatatttaaaaatcatttttttaaataacctaaactaaaaattcaacttatgcatgtgataaagttggtaaaatcaatacatttctgcaaacaacctcatacttaattcataataaaaatgaggttttcccattttattcttgtgtatatattctacataaatatgatacaattctaaagtaatattttgaaatccgtagtaggatggctacggaggttttgaacgttttatctcccaggactatcggtgaatatatcatcatagttagggggtggtattggatacgcttgaattaactataaaaagctttgttactattcatattattaaattagttttgaaacataatctttttattactaagttaattatcaagattaaatttcttggtattcatatagaacttaatggcaacgagaaaaagcacccatccgacaaaaaattttaatctcaataatataaattggaatttaacataatatactttcaagaagcctaaatcttttcagacaggaaatatactctgcaacacaaaaataattctggatatccttttcgtccaagccttgaaatacatatagttcatcccaaagcaaactactaccttcaacacagaaaaatcccgactctaaattaactgcaacaaatacattgtttcccttaaaaatctcctcttgattttcataaagaaacattccattatctttattttctatgacaaaggtaactactgatggttctactcctataggcaacttatctgcaaatggcttgttatatagtagattatcaatttacaatcctattgaattctttttatatacttaatttgtgtcttatcagtattctttatttgctttattaaatattacttttatagatgttcctttattaatttcactctcgatatctattgttgcattatggatttttgcaatttcagcgcatattgaaagcccaagccctacaccattattgcttcttgatctagatttatctaccatgaagaaaggttcaaaaatctttaatatatcttctttcggtataccaatacccatatctttgacttttaatactatatttaacttattatctttatacaaacttatacatattttatctccagcttttgatgctttaatagcattatctataagatttgtaattagaattttaattaaatctctatctattaataaacttaagctctctactaatacttctaagtgtatactattcatttctaatttaggaattaaagaattatgtacttcctctaggagagttttcatattttcctctttcattttaaaatcttctttttttaatacaatcaactccattaaattgaaagcaagcttttccagtcttttcccttcatcatagatgtaactaagggaggtaattaatgtctctccatcatagcctctattggtccttagaaaatcggcataaccaattatagaggttaatggagttcttagctcatgagctagattatctataaatctttgcttatcctctgaaattttctcgagctcatttatcttttcttctacaatagcagccatgtcattaaaattttttgctaataatccaacctcatcacttgaagctaccttaactctttcactaaaattccctcctgctattactcttgcagatttcattaatttatttataggatttactataattttacttaatattattattactattattaatattatagatataacaacatttaattttataaacaagttaattaaatattctctatttctataaatacttgaaatatctttgccatatgaaaccttatagtaattttgatctaaattaatttctcttgttacaaataaataagtcttaccatttaaatctcttattatataatttactttatctaatgttgtatttagttcatctcttctgcctagaatatcagtttgataattggcaaaaataatattattactttcatctattacatctaagcatactccttgttctctaaaatttcttaaatatgtattaatcatcaaatctatgttttgtttatcaagtctagttttatattctcctgaagctttttgaattctaaacagagatatattagagtttattgatgtacaaaatctctcttgttcccttattccagagtcgattccaatgttaagatttaatttaaagttgctatttattaaataaatggacgcagataaaaaaaagatttcaaatacaactagagtacttataaatatcttttcccaaaatttcatctattcctccagcctatatccaagcttaaatacagttttaattttatttttccattctaatttctttcttaatttttgaatatgattatctattgttctactttctccaatataatcatatccccatattttttcgataattttatctcttgtcaatacaacatttttattttgcactaaaaatactaataactcaaattcctttaaagtaaaatcaataatttcaccattttttttaactaccatttcatctaaaattatcactaaatcttcaaatcttagaatattactttttttatcataatgccttaatacattttcaattctagctaacaattctattccctcaaaaggttttgttatataatcatcagctccagcttttaacccataaactttatctgtaacagaacttttagcagttaaaaaaataactggaattcctaaaggtttaatcttttcaaataaagtaaatccatctattttagggagcataatatctaaaagtattagatcaatattatccatctcaattacccttagtgcatcttccccattaaaagccacttcactcttataatttgctatacttaaatttaactttattaaatttgaaattgccaaatcatcttcaacaattaaaatttttatcattttatgaagtacctcctgtttgattacggaattaggtgaattttaaaaaatccacctaacatttatataacagagtaatttcttaattttattacttaacttgtaatgctctaaaattttctttatgatccttcaatactgtaagacttttatcatttaattcataactcattacagagtaatcttttatgttaagtttcaattctaccactcttccatcttgtaagttacataatacttctattgaaccatgattgatatccttaccaacacgtatagtgttatattcaatatttatacctattttctcaaaaaaatttaaagtggtttctttaattttactgtcgttaatttctacttttaaatcctggtctagattattaaaagcagacacaaaaagtatttcacctgtttccccatctatccgaactagatcttgagttggcgcacatacttttaggtcacctatttcttcatcattttgagctgcctcgaatacttttaagtcatcaactggaatgaactgtacatttataatattatcggtatgttttttagaattttcttctaatactgctgcatcttcctttgaatattcataatcaccctttacatcacctttagtaataaaagcttgaccaaaagaatttgcgtcgagtcctatataatccttaatagccttagtcgctatttggactgcttcttcatcacttatatatccacttgtattattaatgctattgtctttactatctaatgtcacaactgtatttttagtagcatctgccgtattttggcttgctgcataggtagctattgaagtcgttcctattattgataatgctaaagtaaaaactaatatttttttcttattcataaaaaagtcctccattttttgtttaaatttatttcgtgcacgaaaccttactacatttttagtatataggagaaatatgtagtaactatctttcaattgtcaccaaattgtaaaatttataattattttatttagtttatactagggtattcttatctttaaaataatactttcttctaaatatagaacaatccaatctataatcatagacaaggcttctaattatccagagcatctattctttcaccaaaggtttatctctttataggttacatcttgatttcctcattaataattccaccatgaactccacaattttattatctactcaaaattttttctctctcaatataaaaatctgttttcatatcacaaaagcaaattcacaataacttttttaattccacgccttcaaccccgcattatacaagcatattcttcagaatattagaatattagaatatatattctggtattctgaaaaataaatattgtgaagaatatatcttctccacaacatgaagtttatatattaggtttgctgtagattatacttaatttctacgtttcttttgtgtagatcatctttttgaatatctaataaagatatttaaaatctcattttcattatgaataaataaaataatatacgtggcaatgcaataacagatagtattgcaatcgcagtatgtacttttttctcatctcgtaatataaacaagaaaaacttatatcctaaaatgccaattaatccacccaaacaatttagaattatgtcatcaatgtctgatgctccaattccaaagatcccctgaatgatttcaacaaacaaacttactataaatacaatcaacaaattggtcattaatcttttattatttttgaataatagcaaatatgcaccaagaggaataaatatagctatatttccaactacattaccaaatgcgaacttttgtatagagacagagctactaaatatatattcctttatactataaaaaggaattagattgattgacctatgctccaaattagagattcttgataaaaacaatattttaattagcaaaagtatgtagcaaatgaaaacaccgtataaaaagaatgttttgatccgttctcgtttattcataattacctcctcaaagtataaaatgaatacttaaagcttttatttctctaagtattcatttttcacaagattattaatatatatgttgcaattcacaattacggttaaaatccttacaattctattagaatcaggatgaagaattatttttgcaacatatatttttttattctaatttacttcgttatattttaacataatccaatttacttaataactaatttcatttatttgtaataatcatttaagatttctatactcttatatttaaatcttatacaaaaatttaagttatcatttaattttaatctctaattgtgtttaatttatgaagcagatactcttttttattcaatggatcataagtcgtttttccagcatccacgtgtgcaacgattcctatattaattattttcttcataatcgtcacctccaactctatcagacacctttttatccattatcatagaaacaatatatagaaccaataccggtgttactaatagcgaagtgcatgctataccaatacttactgaaatatttgtagctataattcctataattggcccacctaaaatttgacctaaggcatttatctgtccatttatagaaagtacagtagctctagccttatcatctatatgtccattaagccatgcactaaatataggttcatttatagttctaaaggtatttgtcgccaaatacgctattaacattaagctaaagttttttgtgatggcaaatataaacataaataatatataaaatatatttatacctagcaaaagctttccattattatttttatcatcatcaagtctatttgacataaaattcataactattgcacttaacaccattcctgcaattccaaaaatcccaaaccaagtgactgggttaagattccaaagactaggaagcacagtatcttgcagaaaatgtgcattagaaagtctatcatatccttcgcttgacaatccataaaataaagttacagaaagtaaaatcataattatagatttactttttataaattttagaccagacttaaaagtatatcccatctttttgaatgtatttaaatcctctggagcagatggtttaaaattattttctggcatatataaccctaaaaataatgcaagaattataaataaaactccactaactataataggcaatcttacagaaaaattagctattacagtgcttaatactattccaataactgatcctatctgtcctacttgtgcccccttcatataaatttgatccaaatctttactcctctcttcttccgcaatccatgcctcaagagatccgctgatgaaagtagaccctactccccatacaatctgtgcagcaagtacgaaaataaaactagaaatagatccttctaaaataaatcctaatcctgttaaaactgcacctataacaatggatagtttacgactatatacatctgcaactatacctgtaggaatttcaaatatgaaacatgctgtctctaaagtagttccaacaagtataagctgaagcggatttaaatgaacattttcaatgtgatacactatcataactgtcgctatcaacgaaaaacacattgctgcaatagctgaaaataataaataaattttatatgccgaaagtttattaaccattaataatcaccatcctagtatttcttaaaaaatttcttttccttttgcaattttcaattttaaatatataaattatcataatattctccttaaaaataaataaaaaaggccgcaaatgaacatactaattcatttacagccttataatcatataacctaaatacaaacatgaaatatacaactttaatttatctgatgtctagccactgtaacaccctcacgcacttgtgaaagcgactataccaaattaaaatctcataaacatatctataaatgtagcaaaaataggcataaaaataccgtgtctagaacacggcttcctactatgcagataaagacgtaacatgctcattataatactgattatttttagagtacacaaataaacatggcaatatcaacactttcgttaattgattataccacaaataaaccttgagttattcaagcttttttcatatactttttaaaataatccttattcagttagtttagttaaaaactacctctttgcgcatatttacatcacctttacatttatattcttttcatgtttatattttagtatagttacatcatatatgaattttgaatttttttcaatgcttttattttttaggctatgtcaaataataatgtttataatgaagcatattatgaatgaaactcattcggtgagttccatttattttttataacttcaaaatatactctttaccctcgtacaagtttttccaccattacattcatatggtatgttcctaatatatgaaaatcctaacttgtccaatattttaccagaagcaggattttcttctgcatgtctccccattatttcttttatgcctaaattttctttagcaaattttataacttcctgcattgcttctgttgtgtaaccaaagccccatgcttttttacccagattatatgctatttcaaatttctcatactcttcttcaacataaattagtccagttccaagcaaataccattaatcattattagtttcatgaaagttgcttattctcagtaagttctcaaatatatcacattggtaatatatcacatatttatccattaactaacaaaacactttctttacaacaatagaaataagtgctaatattaatataacgataataattatcaattaataataattatagatttaagaatataaataataacattattttagataaattaataaataaataaggaggtttttattatgaattataatattcttattggaggcgctgcaggtcaaggcgttgataccactgcctccatacttgaaaaattgttaaaaaagtcaggatatagtgtttttactgtaaaagatttgatgtctagagtaagaggaggtcataatttttcacttatacgtttcggaagtgaagaagtactttcccatacttatgaagttgatggaattattgcattaaacgaagatactgctgaatttcataaagataagctaaaggaaaatggttttatattgagtgactctgattttaatattgatgatgatagagcaataaaagttcctatgaaggaaatagctaaagaacttggaaatcctaaggttactggtaccattgctgttggtgcagctataaagctttttggaattgaaaatacaaatatagaagaagcgctaaaatcatcagtaaaagaaagatttttagaggttaatataaaagctgctatgagaggttacgatagtgtagaatctaaatttagctctcaacctggaaccttctcagattatttgatattaagcggtaatacttctttagctttaggagctatagctgcaggattaaaattctattccgcttatcctatgtctccttctacatcaattctagaatatctcgcatcgatttcacaaaaagcagatgtgctagttgagcaagcagaggatgaaatcgcagcaataaatatggctataggagcttcctttgcaggagcaagagctatgaccggaacttctggaggaggattttgcttaaaggttgaggcccttggactatctggtatggccgaaatacctttagtagtagttgatgttcaaagaccaggccctactactggacttccaactagaacagaacaaagcgatcttaagtttgtcatttctgcatcacaaggtgaatttccaagaatggttatcgccatacgtacgattgaagatgcattttatcagactattagggctttcaacatggcagagaaataccaaattccagtaataatcttaagtgatcaatacttaggtgatggtatagcttctgttaagcctttcgatttaaatagggttaaagtttataagcctgctgaagtaaatataaaagatggagaatatttaagatataaaataactgaagatggtgtatctccaagacttattccaggaaaaacaaaaaactttgtaacagcagatagtgatgaacatgatgaaatgggtaagattactgaatctgcagaagtaagaaatgaaatgatggataagcgtatgagaaaacttagtaatttaaaacttgatttagaagagccagaattttttggtgatgaaaattgtgataatttgcttctaggctggggatctacctatggtgttataaaggaagcagtaaaattgctaaatggaagaaatgttggcagttttggagcccttttatttggagatgtgtatccattacctcaaaagaaacttaatgaaaaggctaaagtggctaaaaaaattattgatatagaacaaaatgctactggtcaattagcggatcttataagagaacaaacaggaataaactgcgattataaaattttgaaatatgatggtagacaaatatctgcaaatgaaattgtagatagaattataaaggaggtttaagatatgagtgaacaatttcgtacttacgaaacagcttggtgtccaggctgtggtaattttaatatattagaaagtttaaaaagagcgttaactgaattaggaaaggacccttatgaagttttaatggttgcaggaattgggcaagccgctaagttgcctcaatatataagtgctaatagtttctgtggtttacacggtagagcaatacctgctgcagttgctgctaaaatggcaaatgataatctaacagttatagtagattctggtgatggtgatacctatggagaaggtggaaatcattttatccataatataagaaggaacactaatataactcattttattcatgataaccaaatatatggtcttacaaaaggtcaagcctctcctacttctggaataggtctagtaactggggctcaaactactggaaatatcaatgccccattaaatcctgtagctctagctataacacttggagcagggtttgttgccagagcctttagtggagatatggatcagcttgtttcaattatgaaggaagcaatttcttataaaggatatgccatggtggatatttttcaaccttgcgtaacttttaatcatattaacactttctccttctataaaaatagagtttattctttagatgaaaactacgaccctagcaataaacttgctgcactagaaaaagctatggagtttggagataagattccaactggaattctatatagagaagataaggaaagctttagtgaaagaaatgttgttttaaataaaggtacagctcttattgacagacctttcaatccttctattatagaagaacttacttctcagcttgtataatttaatttatagttatgagcattaaagattatttcaacaaacaaacttgatataaaagagcaataacaaatttgttattgctcttttatcatttttgaataattacaaatataaccaaatggaataaaactaatttcacttatttgatctatttaatagtttaattttcaaaaaaagaagctgatagcggctgtctttctgtgaatcttttaaagctatgtttaggatatcctaccattacaactcctgttattttctttttctctggaatgttaaaaatcttgtacattggcgaattatcactacgagcacaaatttcaaatactcctgcccaacatgatccaagcccaagagacggagcatataattcaagatacgacaatgaaagaattgaattttctctaccattacgaaaatcttcatcagccaaagttataattatactaggtgcatctcttaagatagtgtcaactttagtattcttgtagccactaatcattcctgctaataccttactcaaagtttcattattttcaaaccaattaatgcattcttccactgctaattgaattgttttcttatcgtatactattagatatgatataccttgtgaattacttgctgttggggctaaatgtgcaacctcaacaagttctaataacttttctctttcaactggtatattcttatatgaacgaatagatcttcgtgatctaataaaattctttgcttcttctgaatttagttttttgatttctcctacctcactttgcatagctaatggagatttcttattatctatagcttcttttggacatacagccacacaatgaccgcattctatacatgcattaggattcacttcttttggaccatccgcttctagttttaatactcctgttggacattccaccacacacattccacattttatacacttttctttacttacagttattaaactcatttttattcactccttattaatttttgcactcgcatatgatacgaatacacttaatttttatttgatttataatacatattaaaacaattattgtaactttccatgtgtcattgcctatttcacatctcatcatggggttctgatcggacatattggtttttctatttcttcccctttaattaggattagttgcaaaaccttttcctcaacctgattgtttctcatcaattagttcattaaaaacttttccaaaaactcgcttcttctcatcaatttttcattttaaatcatgccagtccctttccataaatgtatcacgtcttattatcacctcctttagccatgcttagtatctttttgagaacaatcattctaattgatctaaaaagttatgtatttaataaataagaaaaatctactatatcatgccttttctttattccctaaatttcttgtattaatgatttgagtattggctatactttcatactatgtaaaagggctctgtggaacataaaaatttttgagaacgctcattctaattagtataaatgaattagctatttaataaatctaagaaaaaatctgctatacgatgtaatttttctttgctcgctgacattcttaactgcacacgaattccaagcaatgtattttgaagtatttctgataaaacctctggatcatacttgcaagaaaattcacctgtctgttgtcctttttgaacaagatcagccagtaattgttctgtttgcataaatatcttttctactttttcttctatctctttatccctaagagccatctctgttgctgaatttacaattaagcaaccccattgtttatcttcatatccttctatagtaaaatcaaaaataaattttatagcttgttttgctgtttctgcatgtgaaattccagcctgcattttattttttattaattctgcataaaaatctacagttcttaagaataatgtgtgtttatcaccgaaggtatcatataaacttctacgatggattcccatatgttcaactaaatcatttaaagatgtcttttcgtagccttgtttccaaaatagttccattgctttctgaagaactacattttcatcaaattctctgcttcgtcccatcaagttccctcctttataaaattaatattaacattttgagaacgatcggtcaagaattttcctctccaaatatgaaaatctgtctttccgtctcaaaataaaataaaaaatccaaagcttttttaattccatagccttcaaacccgcattatacaagcatattcttcagaatattagaatatcagaatatatattctagtattctgaagaataaatattgttaagaatatatcttcttaacaatattttagaattgtgagcttaattattaatcatattatttttatctaatccattctttacaagaatagaatataacgcaccatctgctttcatatcattaattgctttatttaatgcgtttaataaagaaatatcatcttttttaactgctatccccattattccttgtaactcaggagtatagccttttaactgccttaataaggggttcttttcctttatatagtagtttataataatagaatcagctaagccagcatcaattttcccattatttatagcatcaaataaatcagttgtactttctaaacttaatacatcttttatcaagttattttccttccactttctcgctagatcttcaaatatcgttcctttttctactccaatcactgcattttttaaatcactcataaaattaatttttgaaaatcttggtacaataacagtttctgattctttatatagtggcttagtaaatgctactagtttttcactttcaggagttataaatattccaccaactgctatatctatactatcatcagaattaaatttatctaacaaatctgcaaatgttacttccttaatttcaactttattaactccaagccgccttgtaatttcatttataatatccgcatcaattccactaatctcattcgtttcttgatttatccaaaagaatggaatttcctttgatggtgcagcaatagttattattcctttttcttttatgatttccaatctatctttttctattgagctatctgccattatagttttagtaggcgctatcataagtccaaatattattccaataatatttataataacaattgaagtaaatatttttttcataaataaaaatctcctttaaagcgataaacatatctttaaattattatttggaatttaaatttaaattatcctcattttaaaaaaattcaaacttttaaaaataatactttacctcttatgttagcctttaaatcgagatctatgataagtttaccttaccctttattgaatagtagccatcacacattatccaactttcaaagagcattttttttatttactacatcaaaccagctcatattgagtaaataatttgagcttattttaaatatcgttctggatttaatgatatttcttttacatctgagaagaataatgaacaatgatatccatcagcaactgcatgatgaacctgaatagttaatggcataatatctttagatacttaacaattatctaaaatatataaagccttgcaaataaaaaattagtgaggtcacaacttcactctgaatattgcgacctctcccaattttatatttagttttttcttaatagctgattttttttgctcataagttttgaattaaattctaaatttcttttatatgaataatagcaaaaactcatccccaaaaattctgcagttattaaaattgatattagctcaataattgaagcaatttttttataaacaaaatagtagtaaatagatggtaagcaggaaatcccccctattactataaatacacaaacaaaagctagtaatgcacttttttgttttattccaattaagtaaataaaaacaaatctagaaatagtaccaataacgcctccaataattgaaaacataattaattcttctataattcctacatttatatttttaacaatcatttgagtcattccaaccactattccaaggagcatggatataataagattaaataaaaaatcctttaaattctgtttcatgatttacacacctcacaatccgagatattgcttaaagttatttagatattttcttgtgacatatacttcttcatccatatctatgagctttaatataagcttgctgttaaaccatgaaattattctatctactttcactatatttacaacaaagcatttacttactcttatgaaaccttttgattccaatctttcttcaagttcataaagcttttcttttactttatactttttattctttgtcatgcaaaaaacctcatttcccatagcttcgaaataatatatctcatcataatttaatactttaagctcatcctcatcgcatcttcctgtgattatatttttagcttcttctttgctgcctgaaatagaatctaaataaccaatcaaaatatttatggtttctatatcaaagtatatccctattttgccgctctttaaatcaaatcctttttcaattaaacatacatcggcatctttattaatctttattttgcgatttgtaaggatttcttccagcattctttttagattttcgctgcaaattaaatctaactccatgtaatttccccttttgctttaaactttaagcaatgcctttctgacgaggatatattaaaaacttaaactctaccctcttagagatgttcaaaagataacaagtcagtatgctagtctattttgcgttatacttcgcctataaatctcactaatagcctgcaactttagcgtcttgtctaatacaaaatatacactttaaaaatagcaaccatgctgtatataagaacatccatagcatcttttacttgctattttctttcacatccactactttaaacttcaggcaataccactggaattataattgatagcataattcctaaaatcaccagaccattcataattataacactcataatattatgtcctgataattctataatagcattaattaaataaattacagcccatatttttgttattactatattaacttctataaataaagaagattttccaaattccttttcatatcctcttctagcatcatacattgtataaggtcttcccatcataatagaaatgaaacccgttaaagctaatactgtatatgaagttaaatatttatcttccataacggaattaattcctaaataaaaatacaatatattagaaatagtgaaataaactactagtactattgacataattcctatatttttattaattatatctcttataaaaagcatcagtatagatgcaagtcctaaaatgagacataaattactcgaaatactccaaaatagcattaaaggcagaaaacttaatgttacatttagaaatgcttttgcactactacccattattttttcctctatctttctcaagtgcctttttatgaccagtgatcatgaaatcaaccatatttttctgtacatgctccttgaatttttttcttttcataaggtatctcataactttcccttgagctttttcctttataggaacttttttaattagattatttttcttatagtatttataatcttgtataaaaatagctcctagtcctccttctattgcatctgcaaatagtttatttccagctatatttaaaaatgtttcaggcttgaaatagtttctttcagcataatttatactcattttagcaaaagcatacatttgattatctataagagaattatcttcagcctcatcagtgacaaatccaattaaattgcccccttgtgtatgaaactctagtatctgccttaaattttgattttcacttaatttacctgaaattatataacctatgtgtttgccccttaatataggaacatggttatagcgaaaacttctatcataaataagcttaaaacgtgaagataaatatctatcttttatacttcctgcaaaaatgattatatctgcattattaatgatatggtctaaaaactccctataaccatctttaccatcataaacacatttattttcagcagcgcatttgcagcaaccaaggcatggtccttttatatcaacatcattaagattaaggatttctacagaactctttatagaacttttatatttatcaatcatctcattaagattattatcttctttagccgcatctgtaattataattatttttttatttgtattaataactttatccgttactcctgcactatattcaaagttacttttacttaatgaattatacaatttactagttgttaaaccttcatttgcaaaatcaagcaaattttcaaaaaacactttaagctcttttcttctattttccttagttaaatcctgcatctcatgagataaatattctacatagttcatgcctaaatcttcagaaattgcccttatataattgtgggcgtgaatatctgcataatgaatagatgtagaaaatgcagcagtatacttatccttaaaatagctttctaatttattttcaaatataagttcaataaatctcttataattagaatgtactaaagcatgatatagtggaaatgcccatataactgcatctgcttcctgaaccttttcacataaaacttttaacttttcaatatctttttcataaccttttacttctttaacaatatggatatactgaaattcatgtttttcataattttgttccaaatacttcattgattgcattgtaacacttttctcaaacttcggactcccatttaaaacaactattttcataaccaatacctccgtttctttatattttcattctattagaaaacatgaattaaaaccatagattttgcttaagatgcaatttaaataaaataagatgcattaatgatatgcaaaaattaagagaacctactcaatatggatttggttctctattgttacttagattaataatatactaaatcaatttgtgtatctcttcaaataatatctgaagtcctaactttatcttgtcttttgtaagtttagatatacaaagtctaaaacagcttattcttgaactattatctataaaaaacgcctttccttctgctatataaatcattttttcatttaatcttttatttagtgtttccatatcaatatgattagtaaactgcatccatataaaaaatcctgtatctggaataaagagttcaacgccctctgtatctatgttttttaagcagtcctttaaataattcatttttttcatatatgcaagttgtattttttgaatatgctttttatacatcccactattaatataaatttctaaagctccttgttctaatgctgatgtacttaaatcataatatctcttatgtttcaaaaattcactttttaatttttcttgaagcgctactgctcctagccttattccaggcataaatgttttagaaaagctttttaaatatacaacccgttcacatacatcataataataaattggtaatgattttttgcttttatctaaatcagctaaataatcatcttcaacaatgtaaacatcatatttttcagctaattctgcaatacatctcttatctttttctgaataacttgtccctaaaggattatgcaatcttgggattgtatagaaaaactttatatcttgatttttaaatatattctctagttcttccaaatttatgccattaaaatctctatttattcctattaatcgttctccattaatctctaccaatttgtgtatcaaactatatgttggctgctcaactaaaatattcttttttccatttggaaaagacatttttgaaagaatgcttattgcctgttgtgaacctgatgtaatacatattttgtccatggatgtgaatatttgatattcagaaaagaagttaaccaatgatgctcttaaagatttaaatccttcagtatctccatatataaataagtcattcttatataactcaaccgctctatttatgcaatgattaaattccttatacggaagtaatcttgaatcaggaactactaaagaaaaatcaataattccactttcagcattctcttcagaattattttccacaagataatacccactcttaggaatagagtatattctatgattcatttcaagttctttataagctcttattattgtggccttattacattcaaacttatcaaccaaagttcttattggcggtaacctttgcccttgctttaattcatttctttctgcaagttcttcaatatattctatgataatttcatatttctttttcataatcttatccttcaatttatcttaatctttcaagtatattaatccttttataccggtacaaaatgctttttttaagattgtactgtatgctctaaattcttataattccattatatagttaattaataataaattgtaagttaattactcatttaatttcaatatacactatttaatctatgtttcaataaaattacaacaaacataaaggagttaagtatggaaaagtatcaaaaaaaagcaatattatatcttgtaattgcatcagttttatggagtattggaggtttatttatcaaattagtaaattggaatcctattgctattgctggagcgcgtagcggtatagcagcaatagttatgttattatacttaaaaaagccagcgatacatttaggaaagacaaagctgctaggtgcatgcacgtattcatcccttctcatattttttgttactgctaataaactcacaacatcggcaaacgctatacttctacagtttacagcgcctatatgggtattattattttcaaaagttttcctaaaggaaaaaattaaaaagtctgatttagccgtaattatttttgttatactgggaatgattttattctttataggagatttaggacgtggcaatattatagggaattttattgcaatactaagtggtatttcaatggctggaactgttatatttctaaaacttataaaagatggttctcctgttgaaatgactttccttggaaatataattacatttattatagctataccttttttctttcaatcagttccagacttaaatagtattttaggattattaatcttaggaatattccaattaggaatttcttatatattttatacattagctgttaagcaggtttctcctattgaagcaatcctaattcctgtactagaaccactgctcaatcctttttgggtatttttattcactggtgaaatacccggaacttatgcctttataggaggattaattgtacttacagctataagtgtaagagaattatgtataaaatcttatacataactccacttccataaaagcttaataacaaacctcacaaaatttaaattataaattttgtgaggtttagtacggacttatgcagaaatttctcctcattttatagtccaattttagcaaattcatcgcctcttatgatatatgttccattatatttattagcaaatagtaactgatatataaatatttatgtatccatatatcactctcgtattatctctggacgttcataaacttcattaggattcattccaatcctaaatccgtcatttaatttttcaatttttatcatatcttctttgcttatttcaaaattaaatatctctgaattttcctttattcttgctgatgttgttgatttaggaattgtagcaaaacccatctgcaaatcccatttcaatactatttgagatattgttctttgatatttttttgcaacctcttgtaaaagcggaatctgaaacactccccctctcatcaaaggcgaccatgcttctagctgaatatcatatttcttacaaaattcaattaagtctttttgaaccagccttggatgaaattctatttggttaaccgctggcataatttcaccgttttctattaaatttttcaaatgttttattgtaaaattgcttacgcctatagctcttacatccccctctttatataacttttcgagtgctttccaggtttccttatttaaggattgtggccaatgaaccaaatataaatctagatagtctgtttttagttttttaattgaattcttgaacgcatttagggttttctcataaccttgttctgaattccaaaccttatcaactaaaaatatctcatctctacacacatcactttcttctattgcacctcctatgacttcttcatttccataaaaagaagccgtatctatatggcgatatccaatttttatactttcttttattgaatcattaagcttaactaaattttcagcattatatgtaccaaatccaagtaaaggcattttaactccattatttagaatcacataatctttgctatttttcactgttattcctccctcatattgtttataaaagttgaggcctgcaacttattatattataatgatttaaggataatttttccttaacatttgatattattttcaattaagaagcatttcaaattaaaccaaaagagaggtaattaatttcatatgaaaatcgataatacagatattaaaattttgaaagaacttcaattagatagtcgtttatctattagagaattatccaaaagagtcaacttatctcctccttcagttgctgatagaataagaaaatttgaagacactggaataattcaaggctacactataaaaataaatgaagacgctttagatttttctatacactgcatgattcaaatcgatattaaaaacaataaatttgagaaatttaaagaatttatttataatcatccgcgcgtaattttctgttatagaatagcaggtcattcttgtatattactaaagttgagtgttaaacatatatctgaaattgaaaagtttgtggattctatttcttcgttagacgccacaacttctacacatatcatattctcagaaattccaacaaacgaaagtatagaaaaattctttttagatttttagatttactagtattaaattacctaattatattctcgctacataagctctgtttaagtactaccaggaatttactaaaagctatcaataaaatttccttaagatatcttttagataaattattaaaggtaactaaatctaatttagactcagttaccttctgaatttctctataattataagtttaaaataaattttacttaatagtatcaaacataattttttaaactgccaaacctcttcttttagcatatagcctaaaagctacttcttcaacaaatgagaataagcttgtggttataaaatatattcctaaagcaataggagccttaaaagtaaccaatccacttattaacgttgttattatgatgtttgttctgcttagttttgcttgagcttttaatctaagaaaaggtatataaggtaatatatttggactaagcattgaaactgcatatattgcaggcactataaataaactatctgacatcttcaagctaactacccaaggtataagcgcagttccaacctgcataggcatatttaaaatcactctatataaattaaaaactataggtatctgaagtaaacttgatagaatacctatcattccctttgcattttgcttaaagtacttttgagtctcaatttctagcttttccttattacttttatatttttcttttatttcttcaagccctctagaaaactcttgctgactatacatgcttaacttttgcttaaatgatattggcataagaattaacttaaccaatatagttaatagtataattgctattcctaagtctcctgtaatattgaaaaaataattaagtgatacgtttagtaaatttgaaatgatgttcatatttttcctcctaaaatttaaaataagtaaaaaaacatcatttcatttaaaactgtacacaataccgccaaatatcatatttttcatatgatatataatcatttattatcataaaccttgaataatccaagtatttaatataaattctacttacaatattataatttaacttttttctatattttcttaaatatgtaattgtacaactaataatgcttataagaaacactaaaacaaaaaacaaatgcatagtgttcattaactctgctctcataaaattacctcacgaaattctatatatgcatatagtatatcactttagaatttatttacaataacttcatttatgaactaaaacttttctttttattgtctaataatttattttaaaattgatttcaagttcttttccataatgtatttattttctctatcatctgttttataactttctcatcagacacttctatatactttggctgttactggtaaacctaccactaccctacactttagtttttatcttttttctactcataaataagagcttttgaaccaccagtattatttatacaaaaaaatcccccaaaatgattctggagaactccttatcttataaatagaaaacatattattaacttctgtaaaaatccttgaattcctttgatattaatccatttcttaactaaattaacaaatgtctcaacatgatgaatgttggttaatgttaagaacttttcaaacttttaaactcattatcgttcttgtccagtttggtaaattcttatcataccatattattttaccatcctttataaatatcactaatttaaatatatctgtattatcataaatatttatttcattacataagttagcaacattgagcaagttgtttaaagattcatcgtatcttctttctatatccttatcaggtattccatgtccacccctactaacccttaatctaactctttctttagcaatttgagaactttctactcctatataattcatagtaactaagaatcctttttctttagctttttttatattgctgataatacttttaccacttaatgtagtttcttgattaaacgatatattttcagaaatgtatagccttataagattaacagcttctctagcacatttaatttgcaaattgctatcctcccaagaccctattctagctaccatttcatcggtgtttattctcttttcacctttattttgttcatagtacgttgatttatagatggaagttttaccacacccattaactcctgcaaatattgtatatgttggcatactatttacctatgaccttttctgcttctttttgaagcactaaattagaaagcatagcataaaaatcctgctcttctttagatttagcttttttaaacaaatccattaaatcattataagaatagtttaaaaatatatcatataatttttcattattatttttcatttcaatatacctccataaaaatacgttagtattaaaaaaacacttttcatatttatattataccctagcttcataatataagaatagtatgttctcatattttttaacaaaatctaattttgctaaatagtacatacctctaatttcaagaacattaagcttgtgaatatccaacgcaaaactttataagtttttaatgccatctcttcatttaactggtaatcttacttcaaaaatagttctattatcatcactataggcttttatcgttccttcatgcaactctataatattttttgtgatagctagccctaatccagaaccacctatatcgctatttcttgatttttctactctatagaatctatcaaatatatatggcaaatctattgctgatattgactggccatagtttataacttgaactactgccatattctcttccatttttgttattacatcaacataaaaaccatctcggccatacttaattgcattggatagtaaattttcaaatgctctaactagttttcctgcatctgcatttactattagcttatcctcagaaaagttgattcttgattgcatttctgcatttttaaattgatattcaaaatacgcaactacctgacctaataattctactaaattaatatcaactttatctaaattaatggtgttattttgcattttagttagttcaaataagtcattaataagtaaattcaatgcttttgccttttcaaatgctatattagcataatatcttagtcttacttcatctttatacttatcagcatcaattatttccaaataacctattatagacgttaatggagttcttaaatcatgagaaacattagttatcaagtcatttttagtttgttgagcttttctttctactattgttatctccttaagctgctttgagatattattaatattttctgctaaattcctaatatcattttctccatcaacttctattaatctgtccaagtcaccactcgccattatttctgtttgatctataacagccaccaaacttttagtttttctataagtaatgagtaaatatactcctacaaataatgaaattccagaaattacataggttgcaccttgaaacattacagaatcaatgagtcttcgaaatttaaaaatataattgatgagttgaattttagtatttaaatataaatatattaatattttactaactactattaaacttatataagttaataataacgtagttccaatctcacctaatggtgacagccaatatttatagaatcttttatttttcaattttatatccaactccccatatagtatgaattatcttatttccttccatatgatgttctattttatctcttaatctgctcatatgcaccatgacagtattattagattgataatatctttccttccataccttttcaaaaatttcctctgcgctaaaaactcttcctctatttgtagctaacagatataatatttcaaactctctagctgttagatctacttctttatcatctatagtcaccttatgcttactcttatctataaccattgattcaattcttattagatcctctgaaacttgcatttttaaattcaaaaaatatgatcttctcattaatgccttcactctaactataagttccaattggttaaaaggtttgcatacatagtcatctgcaccagtcataatcccttgaatcttatccatatcttctgattttgcacttagcataagaattggtatattatatttttctcttacccttctgcaaacctccagaccatccatgtggggcatcattatatctaaaactatcagatgaatttcttccttctccaaaatatctaaggcttcctctccgcagcttgccttaaatacattgtagccttcatttctaagatttatttctaacaaatttcttatttctttttcgtcgtctactacaagaatattattcatttattcctccatttttataattatttttgtaagtactcttctaatgtaattccattatcatgaatatacttagcagcttcctttcctacatatctaatatgccatggttcatattcaatccctgttacacttttctttccataaggatatcttataataaaaccaaacctatagcaattttttgcaagccaatcagcctctttagttccctttccaaaatatccacttttattagttatatcaatgcaaagccctgtttgatgttcactaaatccaggtttagctacatatgcatctgcaagcttttttccttgagatatcacacgattttcataaatatcctcttgtgacttataagatctataacccgaattaccaagtaatattatcccgtcttttttagccgcatttactaattcttctaatggctttacaacagttcctgctacgtgtttttcttcatcatctgacccatttgaaaatggtatgttgggtatactaagcccttctggtgtataatttccacttaatccatgcttctcatttactaatagtattttttcgctcccattagcagtgtttacttcaaccaacttgtctttatcatttgagccataattacttgtagttccttcaatataccaaaatccgcaaattattatcatcattattattataaatcctgatatctttttatatacttttctcatatcttctacttcctttcaaatatcataatttcattgtagaagatagactttacaagaattataaataaaccttacgaaatcttaagttttaaaaaacttatcttgactaaaaaaatgccaacactattcaaatagcattagcattttttatcatatataaatttaacagaatataagatacttaattttacttaaataatataatgttttgtgtaattgtgcctaatttaaatgaacaattatactattaaattaatttttatattagttcctttattttaatattgaaaattgttttattaaaatacaattttcaatgttaaaatatcttctttaatttctgctaatgctttagcatttattctttctgctaatagcttcacaattgaaagacctaaacctgtactgccagaacttcttgatttatcccctgtataaaacttttcaaataataaatctacatctatttttttaggattttcaattttattggcaaagcaaagctcaacatgttcctttttcacaagtgatattttgacataacttgaaccgtattttaatatatttgatattaagttttgaacaatacgctgtagaattattttatctccctcaataaagattgttgtatttggtaaatcaaaaattggctcaattccagcttctttaaatggcattatattttggagcatggcatcagaaagaaaattattcatattaattttttctaaatttatatgctttctatcattttcaataatagttatttcaaaaaaactattaataagattatgtaaaatctcagatttcctttttataatatttattttttctctttggccttctgataatttacttttttctaacaattgtagataaccaattatagaagtaagaggggttcttaaatcatgagatatattcgcgatagaatccttaagcttttcctcatttctcaacacctctattcttagctgcttttgagaatttatatttctattaatgttacctgcaaggtattcaatatctttgtcaagcaacgatacatctatcttcttttctgttttgccttctgaaatattttctaattgttttcctatactttttatttggatctttaaatgaaatacataagaaattaataaaataacagtaaggcttaatatcaatataatcagcattatacccatcctcgtataataagtttattttaattcacatttacaaaatatattataacttaacattattataaaccctaataaaattataccttctaaagaaaatgatataaattcaaatgttgagttattgtttaaaatcactctaagcaaattcattggatgcctatataatggcaaattcatacttctggcaacaaataaatatatagcattcataagaattgcaataactgatactataatagtttttaaattatctctaaatattactccaaaaagtattattacagaaaaaatagctaaatataataatgttgtacaaattaaaattttcattagtgtaattacatttactccacttggtgcattaaagccatactttatagtaacagcgaatgcaccagaaaaagaatagataagcattgatacagttgtaataataagtattgaaacagcttttgtaaaaaaaacaatacctctactatttccagatgcaactttagtaattaaggtcctatttgaaaaactttttcctattagcaatgctgggaaagctgaaattaacatgcaggttcctggagcatcatggagcattgctagtaacacttcatatcctcccaaagataaattataaaaattttcttctaaatctccataccctgaatatactccataaacaatggcaattcctatcataagcaaataaatattgttatgggtagcctcgtagatttccacctttaataactttttcatttattacactcccttttatcgtaaggtactgtcaaagttttttatctaactaagccagcaaccctttaatttttcttattttttatataaataacttgccacccccaaaaagttaagatattttatacttgcaaaacaaaaacactgaactaaaaaaggaggcaagctattaccatgattaataagtttcttcttgaaactgtaatttatcttattgaaattataaagtatctcatgactttgctggttggcaaaaacttgcttaaaagcatttcggacgaacctgttaagaaagaataccgaaagcttcaagtagatgatcaaccaatctttgatgttcccgaaaaacttaactataagcttctaatagctgaatatgagtttaagcacggcaaagaatttgctcctgtgaaacctcgcaaaaacaaagcgttagctcctaaggatgttatctgtcctaagtgtggtgctccacatacctatctttacgataataacggaggccgaggacaatatctttgcaaagtctgtgataccacattcaatcctaaaaattactatcagaaatccatagtgttaagatgtcctcactgcagtaaaacacttgaaagaatcaaggcgcgtaaggatttctacgtttataagtgtaagaatgataattgctctttttaccaaaataatcttaaatcaatgacaaaatctgaaaaacaagattttaagaagaatcctggtaagttcaaagttagatacatatttagagatttcacttttgactttaagccactttctaaagaaagtccggtaaaatcaaaggtttctcttccaaacattatgatttcttcttacaccttaggactcattctaacttactacgttaactacggtttatcttccagaaagacagctgcattgcttaaagatattcatgatattaaaatatctcatcaagcaattttaaactatgttaatgccgtttcaattgtagttaagccatttatagataactacgattataaactttctgactctttctgcggcgatgaaacctacataaaagttaacggtaagtggaactatattttcttcttttttgatgctgttaaaaagattattctatcttacagagtatcaccacatagagataccgaaacggctgtaaaagccatcgatgatgttctaagtaagttaaaagaaatacctgaagatcttaatcttataactgatggtaaccctatatatcttcttgcacagcacttctttgcaagccatagtataaaattcgatgttactcaagttataggcttaaccaataaagatgaagtttcaaaagaatataggccattgaagcaaattattgaacgtcttaaccgaacctttaaaggcaattatagagctactactggcttcggaagtcctaacgggtcggttgcatttgtaactatgtttgtggcatactttaactttctaagaccacattctgcccttgaaggcaaaactcctgtaatccttgaagagttagagtcaatgtccaacatgcctactagatggtgcaaatttattgaactatctcaagactttgttctaaataactgtacaataactgcctaatgatctaaagcagttggtgaaacgcacccttgacacgcccacaaagataaatggtaaaatatctcaataggcgggtctattagtcatgttcaaaattatcattcacccgtccttaactgcctaagaccatttatctttaggtgtgtcaagggcaactagcaaacataatttaacattaaatggtagttggattgatttttcatatattttttacactacctatcgtaactctgcttttttaaataaaaaatatgatatactcaagaaaaataatattgtgccaataccaattaatcctgcgtctttaaattgatttggtattagaggcctatataaaataagacgtgcctgtgctagtggtaaatatctaaatatagttgttcttatatcatttgctgaatttaatagagagatatttataaagtatagtacaactgaaattcctgttgcctttccaatatctctaaacataaaagctataaatacacttacacttgacatggccatccctaataatgatgttgttattattgttttagctaaaatatttccctcgttcataaagtataccgcagtatatctatgtaaaataatattaagaatcacatttacaattgggctaaacaaaataactaaattgactccaatgaaatatgctgacaccttgcaaacaaatatttgaaacctgctatgacctgcacacaccccgttatttatggtcctatctaaaaaatcatttccaaaagaaattgctccaagtaatattggaaacaccattaataaacatgcatagtaaaagcttacccctatattttcatatccagttatagatgtattactatctgaagtcatagtaattccaaaaagtgtactcatgataaatactaaccaaaagcttttacttatgaataatttataaacctcagtcctaaaaagattaatcacatgtcccccctccaattcttcgaataaagtaatcttcaaggctatctcccgctaaagaaattccggttattattaaattatttctcgataatgctattgaaacagatttaatatcatctaaataatcatataaacgaattgttttgtctggcattatttgatagttatttgtatgaagttcatcttctaatatagtcgctgcaagagattcatcatctacattgattgcaatatgttttttacacttttcattaagttcctcttgagttaacgtttctaatatatttccatgagaaattataatataatgatcggcagtatgataaagttcttctaaaatgtggcttgagattaaaatagtcattcctttttccttatttaatcttttaataagttctcttatttcaacaattcccacaggatcaagtccatttacaggttcatctaaaatcaaaaactctggatcattgatcagtgctagagcaattcctaatcgctgcttcattcctaaagaaaaatcctttgctttcttttttcctgtatcttttaatccaactaattctaaagtatcatcaataacctttttatcgggaattcctctttgaatgcgttgaatctctaaattttgatatgctgtcatattaggatataatgcaggagtttctaccatgcagcctagtcgctttctctgctcttgtaaattcttttctccagtttgtccaaataaataaagttcaccagatgtaggaaatgataagccagtaataagtcttattaaagttgtttttcccgcaccattttgtccaacaaaaccataaatattacctttttctaattttatatctacaccatctaatgcttgtgtatttttgtatttctttgttaagtttttagtttccaaaacataagtcataataacatctcctttgcttttccatatttacattgtaaaaatcgtacttaaagaaaatcttaaatcaattctaaagaaaaccttaaatattttctccataacaaaaaagcaggctttactcctgcttatatatttctttttatttattattttaacttataacccattccccatatagtttctatatattcttcattgggatttgcgcttttaagcttatttctaatattgcttatatggacatttagtgtattatcttcactaaaatattcttcattccatatactttcaaataaatttgcctttgaaaagactttttgtggatgacttaataataaaaataaaataccatattcctttgaagttaatacaagtgtatttccgtttactattactttcttttcctcttcatataatgtaatatctttataagttaaaattgatttttttatatttaaatctgaactacagcgccttaaattactctctactcttgctaatatttcatttaaatcaaaaggcttggtcacataatcatcggcacctaaacgtaataaatctacctttgtatgtaccatatcctttgcagataatacgatgacaggtatattagaaaaactgcgcagttcccgtaaaatctcatctccacttttatatggcagcattaaatctaaaatgactaaatcataggttaaagttcttaattctctcataccatccattccagtattagatatctttatttcatatccactttcctctaaaaattccttaagtagattacaaatttctaaatcatcttctataattgaaatcctttgttgcatatcatcaccaaccaaattactacttatttaactaaacctgtataataaattcaactataaacacaatattatcattcttttaatattgtttcaaatttataattatcgtgtctattataattaagataaaataaacggcatatattggatttttcagcaaatttatctctaaaattctggatttcataagcacatttttaagtaatggatacgttaatggtgttattgaaacagatgaagtattcataaggaaggattatatcatattcaacatattaatgctctccataatagtaatttaaagaaatggatgaacaggtttaatggtgctgcagcaaaatatattagtaactatatcaagtggttcaaatggcttcaaatattcgatacagataaagatacaatgaaggtttagaactttactattcaaagtaatacagcacatttatacataaacgtgaaagatttgaaaaatagaaaacttacatatgtatagcaaattatatattttgtaaattgtgttataatactattaggtcatatgacccggggtaagatataataatgttagcgaaagctaacgaatggaggattaccaaatggggatgatggcagttgaaagaatggagagtaagaatccatatcaaggtttgtttaatgaactaaaagaagaatatggactaagtcctatcgaagcgaaagcgcttgttaagagagttgagctattcaaagaagaaatgagtagtggtgtaagagaccataatcagatagtcagacaggttgttgtaaatggtgaacctgcaggaaagagaataagagactgtaggcttataccagtaactctcactatgaattttaatggtgaagaaaaggttgagcaaaaaaatggactcagctacttaaagaaaatgaaagttcatcaattagcttgggaggcttatgaacaaggtggtcttcttagttatgaagatatagagagtatattaggaataagtataagcacaataaagcgttatattaagcagtatcgtatagaaggcgtagttgttccaaccaggggtcagattgaagacattggaccggggataactcataaagagaaaattattgaacttcttgtaaaaggttatacatattcagaggtaatgattcagacagctcatactgaggcaagtgtggaaaactatgaaaagaagtttgtgagaatagcatatttccacagggaaggtaaaaataagctactaattaggactttaactggatattcagaatacttaatagatagttatatagagttatacacaaaatatagccaggcataccctgattccttaaataaaatgatagaaagatttcacagatacattgactgtgaacaagaaaaaaattttaggaactaatggacatatgataaataattgcaaaaatgattcaaggcagcactacgtgccgggagcgaagctgacatatgcgacaatgttaaagcaaatgttgaaacaagaattaggatatcagggaaagcctaaaatacttgatttgttagcaaccgaaattgaaaacataactaaagaatgttatgtggataaaaatgatataggcctaggacagataaaagttgtagtaccaagtatacatgataagccaagttggtcacagaacatagaagatactgcgcttgtaacagtaacactaacgctacattcttcagaagatacagaagcactaaaggctaataagccatctagacttataacacaagacaagttgatgaggatagctaaagaagccatagagcaagagggcgttttaagtagcgcagttgctgcaagcctgctgaatataaagcaaacaactgtttcaaagtatgtaaaagagtattttgaaagagaaggtaggattgtaccgttaagaggctttgtacatgatatggggaaaactacaacacacaaacgatggataatagagctttatctaaatggttacacaaccaaacaaatacaaagtagaacagaccataagatagttagtatagatagatatataaagagatataaagctgttgaaaatataattgaagaaattaaaactgtggattcaataaaaatatctcgattacttgatataagtgtgcattcagcacgggaatatacagctatatatctagaatacagagatacagcaaagataaagagattagattttttcaaagatattgaggcgcttactcaaaaaactataaattctgtggataagtatgaaaaataaagttattcacatacttctaaaatcaaccaaagggaattgacagaattttatgaataagacatttctataggtaaatttgacccacctttctttgacaagtaagtagtaaagccatttatcactacttgtatgttatataaaaatagaatataattctaagaaaaaacgagataaacgtagctatttagagctagtaatttatcccggggtcatatgaacctatataagtatgacaaagaactataatctaataaacaatactttatattataatttaaggaagtagaatatgaaacaagaaagcatatttacaaaatgttctgtaggtattttaatagtatcctttttagtattagcaaatgagtttattcaactaatacctactcattctacacgcttagaaggatttttattgtattacggatcatttatatttgcaattatcggtggaatactttcaatagttggattaattaaacacaaaacaaaattagggctgttattattagtaattaattttatattatgcttttggccagtatttctttggaatctaccaacttctattttgggattatagaaattgataaatgtaataaatatgaaaaaatatagatggacaatcccatctatattttttgcattaattttaacactatattaaagcatagcccaatttttaagttgtaatttgtatatagatagctaatttaagaattcaacttattagatgaacgtatttacaaaattgctagaactttaagcttatatcttaactagaaatcataaatatatttgtgtagaaaatatttgaaaatgagctgttaaaggttcttagctgtaggttgttccgttttagcttgtgaagtgagggtccaaaattttattttgggttctcgaacttcctcagcgaatgtaatgagtcgagcttccctatgaaagttggagcatgctaaagtgggtacaacctattgcttagaaccttcagcgatattttcatagcttttcggaatcaaaatatttatgatttcggtaagttatcacataaatctagatttaacgttgaatatgccgtatattaaacctgaaacttctgtatcatttcatttaaatcctgagcaagacgtgtctgctcttgagctgtttttgctatctcatctgttgctctattaacttcatcaatattgtttactatttcatcagtttcttgtgaagatttttgtgctgtatcagccatgctttccactgctttagtaacctgttccattgtaattgaaatttctttagtcatttcagctatttcatttgacattttactcacaaattctgcatccttataattttcttttccaatttcaatcatgtcttcaaacttaggatttactttttccttcatgaaagttagtacctcatcactattgtttgaaagatttctaaatgcattttgaacttttaaaattgtactttttatagattctacggcatctgaagattgttctgcaagccttcttacttcttcagcaactactgagaatcctttcccgtgttcaccagcccttgccgcctctatagctgcatttagtgctaataaatttgtctgctctgatatctctgcaatagtatctgccataacttttatattttctactacttgtccttcttttattgcttgaagtattttttcttctttttcactaaacaatatttctatttctttaattgattccaaagatctattttgcatatcttctactctagtttttgcagcacttgcattattacttccttctactgccttatttgttaatacattaatacttgcctcaacttcttctactgaagcgtttatttcttctgccgctgagctagtttcttgaataccaaaattaatattaccaattccagaattaatattttgagacattgctgaaaattcttcaactgtggcaaataattcttcactcgctgcactcatatcttgtgaattgttcattattttcttaattagatttattaaatcctgcctcatatgctcaattcctctagacatatctccaatttcatcttttcgttttaaatctttttctaatgtcttttcagtaaaattaccttctgataagtgtttaaagtgtgtcactgcacttgctaatggttttgatacctttttatctatgtataaatatattgctatcccaaccaagattaacactataatagaagatataatattatttataacaaacttttttatgaatagctgactttcagctttacttttacctgtaaatataactccaactgcctcattgttatctccagtaattggcgaatagtatgcatcaaatctacttcctaaaatatcagcctcccctgaatatgcattattacctaaaacaacttttgcaattttttcatcaagtttagttccaacaactctttctccatctttcattatacttgttgcaattcttacatctcccacaaagatagtagcatcacacccaaatttacttttaacataatctactagattattagaatctaatctatatcctacagatacaactccaataatatctccattttcgttctttactggcgcacctgctctagcggcaagtttaatctgagttccactttcaacttgggagtttaatttaccagcaagagcatttcttacatttgcctgatttaaaatactatctccctttttatctggttcataagatcttacaattacattacctttttcatcagttattgtaacaaattctacatctagatcttttaatatatcttttaaatcgttaaaaatcccctgactatctttattttcaattccctttattattctaggatttaaggccaattgacttccaatacttaaagactcatttttcaattccttgattttttcacttattgtttcattagcattcattacttccgtcttattgttacgatctgaataagaattaaagctaattgtactgataactatatttgcactaaacagtaaaattgttagtccaaaaataaatagaatcaatttgaactttattgaatttaatttcatacttatctccctcccgccttctaaaaaattttaaccttctctaggtattaaatcatattaactctatactacttgatttcgtcattaattatcaaattccttttttatttgctttccaaatatagatttgcaagtcatattattccataaattgttcagaaatttgattttattataaattcattgagaataaaaaaatcccaaacccaataggtttgagattttttatagtaaatttataagagtattgtataaaaaataagagggtttaaatatgaaattggctctctatatgatattcttcattattttataacaaaagttagtggttcacctcgataaataaactctatgctcttgtcatttatagaaattgtacaagaacgatttttaatagattgtgggaaatcgtaatctacttttccaatagtaaatttattttctttatcttcccatttcatcagaatcttattataaattcctttctcatactcataaccgtcgccactatcttcataaaattcaaattcacaatcatccccaggataaatatgaatttgaaatggtttatcactcacttgatccgcatattgtagcccttcttccattggaataatagaacctgctcgtataaataatggaatcttatctattggagcgtctgctattacatagcttccaccacttaatcgttctttcgtccaaaaatcataccagtcagctccttttggtaaataacattctcttattttaggttcgtcaattgacttactattttgctcataatacatcggatttgtaacaggacataccaatatagaatctccacacataaattcgtcactaatttcttttgctatatcatcattactaaaatcgaacaaaagacttcgaagcatagtataatgattttgcgttactttcccagccaaagaatagaaatatggaattaagctatatcttaaatttataaacttttcaatggcatcgtaaaacatttctcccttttccccaaagttccatatttctcttggagtatctgttccgtgagagcggaacattggtaaaaatgcaccatattgaaaccatcttacgtataattcacgataagccaaatcatttacaccatcattataatccccctgccaaaaccaaagtgggttcgggttattgttgcatccgcatcctctgtttctccattcacttcctactgtaaaaaatgctccaatatctaatgtccaataaggtaaaccgctcaaacataaattcaaaccttctgtaatttgttttctaaaagttccccaggttgcattagtatcacctgaccacaaaacaacaccatatttttgggagccaatataaccagatcttgccagattaagaactcttttatcaggcgatacctttctttgattttcaaaaatgcctttctcatgcattaatgcaaataaattagctttagctgggtctaaaaactttttatgctcatttcccactaacataaatcgttcccaaggttctctaattttttctccattccaatctggtccgctaaatggttccgttgaatcacaccaccaagcatcaaagcctcgcttgtataactctttttctgcttgttcccagtacatttttcttgcatcttcattaaaagcatcatatgtagaattgtctcctaataaatattcagcttgtaaaaattcttcataatcctctccacctacattcatatttggccaaatcgaaaccatagtatgaacatttaaatcgtgaatttctttatttgctttacctatatcaggatatctatttttatctaatcgcttatttccccataaaccttcttcccaagtatgccaatcttgtacaatacaatctatcggtacatttctttttctatactccttaactacttcaactaattcttcttggtttctatatgtttctttcgactgaatataaccaaacgcccattttggcagcatggcagctcgtcctgttatttttctaaaaccgcctacaatatcatcgagcttttcaccaaaaacaaaatagtaatctaattgctctactacatctaaataaacatacgctcctcttgaatcatcattaaaagtcatcaatgatccacaatcaaataaaataccataatttttattagataccaaacatggaaacggagttctcatgttgtgctgatataagtattgagagttccctctgtagttataaattccttcttctccttgtcctaatccatgtattgcttctttttcttgccactcaaaggataattttgctctatatgccattctatcaatatatggttttaaattttcaacgaagcttctttctccatcaacagtttgtactcttttaataatggctttttcaccatttgtagaatatttttcaaccggtattgaaacaagttctttatctctttcttgcagcaatatttcatcattcttaccatttttccatacaaattgtcctgtcttcttattaatagttaaaataattaatccagttcttaaaataatattatattgtgtctcttccacaacaaattcatttaatttctctatttcatgattaattccaataactgatgaattctttatatttttttcttttgtataagtacatcgaataatttctttacccacagcagataactgaattattccatcttctaatttcaaatttactattctgccatccttacgatattctaaaatctccatttaatcaccgccctcattaacctttaactgctccagctgtcattcctgaaacgatatatttttgacctaataaataaactacaataactggcaaactagttagcataatatctgaacaaactaaattccaatctttaaaatacattccaaagaaattatatacggaaagggtcattggccactttgaagaactacttaaaaagtataatggagatacaaattcattccatgtatttaaaaaagtaagaactacaactgttgctaacgctggttttaatagtggaaagataatatagataaatatcctaattggggaacacccatcaattacagctgcttcatctaattccactggaattcttgccacaaatccatgaaggagaaacaccgaaaacggaagctgcattgcagtatatagtagcactattccaagcattgagttcattaagtgtaacgcagacattaccttcattaaggctacataatttataggcattgtaattcctaatataataaacatgtaaatgatgcgatttaattttgttttatttctacataatacataggaagctgctgctgctaaaatggcacataagattacacttcctatagaataaacacaactattaataaaagatgttgcaagctttcctctttctattactgtagaaaaattttcaactggtattggaaatgtaggaagtttcagattcatatcagaagctgctttgctagttttaagagcattaaataggattaacactaatggtataagagatataatcgttataacccatgcaattccattagaaaatatattttgtaatgttttttttattctcattattccatcacctcatttttagtcattattttaatcataaagaccccaataaataccatgattacaaacataacagatgataatgcggtaccaatagcatactgacccataccaaattttttaaatactattgtatacaatacttctgttgtagattttcctggaccaccatttgttaatacgtaaatcatatcgaatactttcaatccataaattacatttaatactgtagtagtagctaatgttgggagtattaacggaaatgtaataaatcgaaatttttgtagtcctgttgctccatcaatattagccgcttcataatattcactagagatagataaaatacccgctataaaaatagtcataatgtatccaatccctctccaaacatcaactgcaactacggatccaaaagcaaattgtggtgaagtaagccactgttttgctaatgtatctaaaccaatgcctctaagaaaaacgtttagaattcctatcttaggatcaagaattgatgtaaaaatcataccaataattaatgtagataacacagatggcataaacataacccctctgtgaaaattcaagaattttatagattttgttagcaatactgccaataacaatcctatcgcattttttaatattgttgtaattattgtaaaccataaggtgttacctaaaatcttcatataattctcattacctgaaaatattactttgaaattatcaaatccaacaaaatttattttatcactgtaagctgaccagtctgtaaaggaatatgcaatgccaataattcccggaattacaaataagactccataaattataagtgctccccatataaagtaactcggatatatttttttcttattcatttacacttctccttatttttatagtactgtaaccagacaagtatatctggttacataatttagaattttacttccaatccttatctccggcagcttttgcctgatctcctctatttttatcaatattctttagaagttcttctggccccatctctccaactaacattgcagacatatctttgcctatttccatccattgaggatttatatacttgactgctgattgtaatacaacagcattcttaggatatgatttataaaattctttgactgtatcagtatatttaactggagcattactgtatggaagcttattaaatttagaaacgttttcagttagataagtaagactttcatctgatgcaagaaaatctaaatattcttgtgcttcttttgcatgtttagatttcgaatatataagtcttgatggtcctactggattaatatttaatatttgattatctgctaaaggaatcacaaaatatccaatatcatctgcactgaaactagaatccgctttattgacttctgcaccaaaaccttggttagcgattgtcattgcaaattggcctgaagcaatattttttggagcatcagcatatttgttagacatataattatctccccaatatcctagtttcaccatttcattaacttggcctaaaatagtttcaaatgttttatttccttctaattttgcagtattattatttaatttatctactaatcctgaatctgctgtatccgctgctaaggctatttctgggaaccataatgtgtgatgccatccatctgaaacgctttcataaataggagtaacaccagatgcctttattttctcacatatgtttttaaattcttgataattcttaggaatttgtaagtttaattgtttgaaaatctttttattataaccaattgcccaaacagatgatacatcttgaataggttctccatatagtttaccgtttacagtcagctcatcagcaacttctttatctatattttttgcccaagatgcatttgttaaatccaacgcatttttttctgcattaacttgtgtttctaaatcaaaccttccagcattcacagcaaaaatatcagtagcttctccagaatttaattttgtcattaacaagttattatattgatccgatggaacaatttgataatcgattttgattcctgttttttcagtaaatttttttgctaaattcaattcagcatcttgaatccaatcctgacttgccataaaagaaatagtaacgtcattgttttttgaacctgattctgtagtgctagtactattaccacagcttactaatgacatagttaatccggctaaagtcacaactgacaataactttttaaaatgtttcataataattcctcccaatttatatattattgactatttgttgctatggttatattatatatctgtactaagctgattttgaatgttcatatctctcctattccatgtatatttttgactaaattatttattgtaaggattgatttcgcatgaaacttttgaaacaacgtagcatattaaaaactctctttatcccatataccatattatttataattatctttaattttcttatgttttattttgtaatgaatgaatctactaaaattaaaacaaatgctcttacaactcttaatagtaatataaaaaatattaataacaatttagatgttgagattaattctttagatactctatctcaaaatatcatctattctaatttaatcaaggatcattttattaaatatataaattataattctgaatctttgtccaatctatctgaacaccaaaaaattgataatattcagaacacaaaaattttatatgatttattggtcacaatgatgggacctaaccatcctatagatcagatttatctttatgatttgcataatcttgaattaggagttggtttagataattcctcttcctatatttcagtgaataacaaggcatggtatgatgatgttttatcttctaaaggcgataaggttgtttactttaataaagatgatcgattgggcagatattcaccttatgaggaaggtcagtatttcctttcattatatcgcgtttactataatacacttaatgttccacaaggaattattgaagttaaaaagtcatttaaaaatatttttaccattattaaagattttaacgatgcttatggcagtaatgtctatatttattataaaaatggacaaccaatataccctataaatcaaagttcatctacaactaattattataatcttatctctactaatgtcgataaaaatatcagcaataatttatttaaatataaaaatgaatatgtattatttgatacctcttcatatagtgatttcactattgtagctacaatagataactcaaagcttatgtctcctatttatgaatatatcagaacaaatatagtgctatcgttattaattacatttgctactgcaacattatcctattttattgcaaaaattattaccaccccattaaataaaatatataatcaagttaaaggttttcagataacagacgatgcatctactaattttaaagaaatagatacacatattactgaattaaatactttattcaaagcctttttaaagatgcagcaaaaagcaaaaaaagcgatgacaaatgaactaattcttcaaaatcgtgaaatgcagtcaaaaatgttggctcttcaatcacagatgaatccacattttctatacaatgccctgtcaacaattcaggctatggctgatgaacaaatgaatgaagaaataataataatgtgccaaagcatttcaagaatattaagatatatttcatcagacagtcaacaattagttagtttaaccgatgaaatagctcataccattgattatcttcagtgtatgcagattcgctatgataacgatttaacttatactctaaacattcctgatgatatgcaaaacattaaaattccgaaactttgtttgcagctcattgtagaaaatgcagtaaaattcactacgaaaactgagcttccttggcatattgatattacaggttatgtaactgatactcactgggaaatacaaattaaagatagcggaagtggatttgcagaagataatttaaaacaattgcaagaaaagatagattcaattaacgcaaatggagttcttccaaacttagaattaaacggaatgggtcttatgaatatttatattcgctttaaaattttatacaatggaaaacaaatttttagattaatcaataacactccaaatggggcgactgttattatgggagggattaaattatgacaaataagattactttttctgctattgttgtagaggatgagagattaattgctaaaaacataattaaaaacatatatagagctaatgagaactttgaagtcgtaggaactgctagtaatggcaaagaagcattagaactaatagaatcctttcttccaaacattgtactcactgacatttgcatgccagtaatggatggccttgaactctccaagttcattttcgaaaaatatccttttatccattgtgtaataattagtggacatagtgatttttcctatgctaaaactgccataagatatggggtgtccgactatttattgaaacctattaatcttggagaattaactacaaccttgaataaaataggaaaaaatcttctggcaaatcaaaacgattttaaagttgatgagttttcttacaaaaagcctaatgaaattgtggagcttgttactgaatatataaaaaataattaccatgaaacaattgatctagctgcacttgcatcacattttggattttcaatttcttacttaacaaaaatattcactaaatacatgaatatgactccctcaaaatttattaaagagtatcgtattaatatttcaaaacaattattatggaatttttctttaccaattagcacagttggtgaaaaagttggctatccagatcaatttcactttagtaaaacttttaaacaaattaccggcatgagcccatctgactatagagaacaattaaaattaataaattaatagtatttatgactatcatagatacagactgaggtatatataattaatatagtgccacgtgaagaaaggcaataaacattttaccgatgtttattgccttaaatattatttctataggaattgacttaaatttatgctattcctcaatagatatcttataactacactcaaatactttatcagttgatagcgagatcgtaccctctttatccctaaattcacctgcaaaatcttcataatcagcatgcccaaaccatggttctatacatagaaatggtgcaccagtttcaggtgcccaaattcctaagtgcggaaagcctttaaattctatacttaaagacttatcatgattttttgatttcaatgatatcttatcagattttagatcatcaaatactaagactccatctttaaagagttcgctagaaagtggtaatgtatcagtatctttaagacattctatccttttacgagaaagatatgtatccttagttacctcaataatagaacttatctcttttttattaaattgtagataacactcctctaattcttcaccgttctctataggacacataaatgctggatgagcgccgattgagaatactatatccctatcatctaaatttattactttatatgtgactataatagaattttcttctaatgtatatgttacaaataaagaaaacctataaggataaatctttaatgtgtcctctgagtaatttaatccaaaagttagtgaattattactttctattaataaggtaaattcagatattctagcaagtccatgtgcaggcatttcatattgaattccatcaattttaagtttagaatccaccaccttcccaactataggaaacaaatgtggtgcatgatatttccagtacttcgcatctccattccaaagatattctgtgccttctttttgtcctgttatcgaatgtaactctgcaccatgggtacttgctgtgatttttatttttgaattttctatcgagtaaatcatataaatcatcctttcatagatattaaatttatgatatatatatgttgcaatgcacaattcacaattacagctaaaattcttacaatatttttagaattatgatgaagaattatttttgcaatatatatttagtaaaaattatgagagttaggttattaattctccctaactctcacatttatatattaacttaagggggatatcatacgtaggacttatctaaatttcttcaactgttaccttattgaaaagttcgtttactatagattcacttacaaatcctgtttctttttccatagcatttgctgttccacaagctgaagcgaatttcaaagtatctttgatatcataatttctttgcagcgctactgctattcctgcaacataagaatcgcctgagcctacaggatttacagcttcaatctttggtacatttactttataatattttccttcaaatccagctattgaaccgtcttttcctaaggatatagctacaagtggtattcctttagcttggaattcctttatttctcttatagcatcttctacggacctaatgcttcttcctgttagtgcttctatttcatccttattaggtttaataaaatatggtttgccttcaataccttctcttaaaagatcaccacttgtatctaataaaaatttcttaccttgagaattagccatctccactaatttcctatagaaaatcttaggcacatttttagggacacttccagaggctacaataacactagctttctcaattaagtctatatatttatctaagaaattttgttgttcaatttcacttacttctggtcctggttcgagtatttctgtctgaacattatcatcagtaataaatgctaaacaagatctagtttctccacttatttttacaaaatcttgttttattccatatttcttaagactttcttctataaattcaccagatttacctccaagtaaacctgttgctatacaatcttcttttaagatagttgctacattagctacatgtaagccctttcctcctggtgtattttctacataccttgccctcattacttgtcctttttttatatcttctatttcatatctcttgtctacagaggcattaaggtttataactaatatcatcttttttctcctccatcttgtattaattttctatctcttataaaacagaaattaatatctatttgcgctaccacaaacttcaatcttatgcttcactatctttttcatagcttctttacctggagtcatatattttcttggatcactttcctctgggtgtacctcaaaaaattctttcacagcacttgaaaatggaatctttaagtctgtagcaacatttactttgcatattccaagtgaaatagcttttttaacaagctcgtccggtacatcagatgctccatgaagtactagcggaatacttactttatttctaatttcctttaatctttcgaaatcaagttttgcttctcctttgtataatccatgtgctgttcctattgcaaccgccaaggaatctactccagttctttctacgaactctgctgcatcatcaggatttgtatacatcgtatctttctcatctacgactaaatcatcttctcttccacctaattttcccagttcagcttcaacagttgtatcaaatttatgagcataatctactacctcttttacaattgcaatattctcttcaaattcatgttttgaagcatcaatcatacatgatctaaaaccaatatctatatcttttttgatttcattaacgtcttcaaaatggtccaaatgaatagctattggaatgtcatatttccctgctgcaacttctgccatcgcttttatataatctggccctgcataatctgtaattgttgaaggtgttccagctataattacaggagatctcatttcgtgtgctgtttctactacaacttgtagtgtctctaaattatgaatattaaaagcaggtactgcatacccatccttttgtgctttttttaacatttctctagttgataatatcatttttactcctcctcttaatttgaatatgtacaattttttatattaatatttctaatttacatttaagaattacataatgagctttaagtttctaagcgtttttcctcattacgctttacaaaagcgaaacgtttagctttaatggtaaattatatgtttttttcattatatatcaaaaacttactgccttcaagtctaatttaatatctttcctgaatattgaaaatgtattttctatgtctaaatttatctttcttgcaataaaattatgattattaaaaacatctttctatttctaattctttaaactaaatctatccaattgctcttttaatagttgtgattgagatgctaactcttggatttctgctgcaactttttgagatgtatttgaattcatctgaacaacagtagatattctgtctaacccactagtaatttcacttatttctaaggtttgattctcagaagatattgaaatttctttaactaaattagttgtttgttcaatatttgtgactatattttgtaatgattcaacggtttcttgtgctaaactagtttcttcatctacagcctttatggattttccaattatttgcgttgtatttttaactgcttctgaagatttttctgctaatatcttaacttcatttgcaacaaccgcaaaacctttacctgcttcacctgctcttgcggcttctatcgcggcatttaatgcaagaagatttgtttgttttgaaatatcctcaatagtatttattatattagctatttctctagatgatttattcacttcttccattgacctcattagtgtattcattctcttactaccttcagccactatctctttagtcgtactagaaaaattatttgcttgctctgcattttgttcattttttcttgctttatttaatatttcattaaagctaaaagctaatttttctataacattggcttgttctatagaaccttctgaaagagtttgagtcgttaatgcaatgctcatagaagtacttgcaaccaaattgacagcagtgttgatattgttaaaaatatcatttaacttgtaaataattttttctaatgaatctttcattggtataaaatcacctttatattccatttcaatatcaatatctaattttccatttgatatattttctaagatcgaagataaatctattatatatgattttagtgttttcacagtttcatttaaatttttaaccataattccaagttcatcttctgacacaaaagtatcatcatctttcagatttccttgagatatatccgcggatatcttcataacatgatatatacctttaattataatttcttgcattattttagctactaaaattgctgttccaaatatgaatattatcattaatatatctattatgaaaaccacatttttatattggttcgtttgactaacaaattcgcttgctgtttcctctgaaatctttgaaatattagttaagcaatctaaagcaccatcaatattttgcttgtatgtacctttcatcatgcttattgcctgattattgtttttttctagaagagcttcacttatcttatccctatatgcttgtgaggcactcatatatacttcaaatgaatctattaacttcttttgctcagaaaacaaatttctgagactctctactttttcttcaattttttcagcttcataattggcatttgcaacattatcttttatcttttgcggatctgtttctaacatagcctcatacatatttttatccattatcataaagtcatttctcatatcccatatcatgttagtaacattataaggtccattatataaagtgttagttttatttgctacacttcttaaacttatcaatgttgtgatgacgcaaagaattgttagtgcaataatcaatgagaatcctatccctatttttcttttaatagggtaattctctaattttgatttaaatatcttatacatttgaatcaacgctcctcacaataagttaaaattgttatcggtgataacattataatttatcagtgatttcctaaaaaacagttttaatgcaaggttattcttataaatttaaaattcatatttatttgatttagatgcgaatagtaaatttatagtctgtgagcacttgaagtttgataaaactttgcgtttatatctttattatcatgcgttactcacagactattttaaatatcttttttgtatttcactaaactagatttcaaaatatttttcttaatttcgctgcaatgacctttaaaatatattttatttatggattttatactactttaatggatataaaactttttgtgattcatcatcattaaagttttctggtgttacaattacacaacctgtgtcaacatttttttcaattttttctccatttaagcttttcataatattttctacagcatcatatcccattgtatatggtttttgaacggctgtagcttttatagtcttatcttgtaataaaggaataacatcatctgaagaatcaaatccaactacaatagcttttgaatttgtttctttaactcctcttgcaacaccaactagtgattgttcattagctccatagattgctgttatatctggatgtgctgtaactatatcttgagtaagtgtcaatgctttagccttatcactatcgcaatatactgtttgaacaatttccatacctgagaattcactaatagcttttttaaaccctttttctcttgctattgctgacccagctccaggactaaaacttactattgcaacttttccttttccgccagttaattctccaagttttttaccaacttgataagaagcttgttcgttatctgttgttgcatatgataagtaatcttgaacatcacatgctgaatctattaaagctaatggaattttagcatctattaatttttgtgctgctggtgctactgcctttgaatctgaagctgccaatacaactccatctggtttttggcttactgcattttcaacaagagtaacttgtccattaatatcagattccccacctggtgctccaacaaaatctatgctagctccatattttttagctgcctcttctgctccttttttaacagtttgccaatatggtgattctacagtcttaactacaaccgttattttcttatttcccccattactactgccaccattacttgcttgatttgatgatgtacctcttccacaccccattacagcaacacttgaaaccattgctaatgcaagaattaaagctaattttttagttcttaatttcataataattctcccttcatccttcttaatttgttcaattacttaaatatagtgttcagtatttttatatttataaaattttatttatcttgatataataatgccttagtaaatacttactcgtatcatattccgtttcatcattgcatcagtcatataataaaattttaataatatcgtttacttcattacattattttagctgttttctttcttctataagtatctaatgcaactgcaaatataattacaagaccaattgctacttgttgccagaatgcactaacgcttaatagatttaggccatttcttaaaactcctattacaaaagctccaattattgtttctcttattttacctacaccacctaaaggactacatccaccaactattgctgctgatattccatccatttcatagctaagtccagcagtagcttgagctgatactaatctagatgctaatattattcctgcagcagctgctaataatcctgaaatcatataaacgccgattttagttctatcaacattaattcctgaaagttgtgctgcatcttcgttacttcctaaacaatatacatatcttccaaaagtagtttttcttaaaataaatccaaatataaatgcaagagcaaacataataagtactgctactggtattccaagcactttacctccaccaattacataaaagctttctggtaatcctgatacaggtagagcacctgtgataatatacgctgcacctcttgcaatactcatcattcctaaggttgctataaatggtgcaatttcaagttttgttattgctaatcctgttaataatccacatagagttcctactgcaagccctgctagtatagaaattggcactggaactccataaaccataagtttaccagacacaacacctgaaaccgctaatactgatccaacagataaatctattcccgaagttataatcgcatatgtttctgctattgctaaaacacctattactgatgtctgcaatgctattgtaagtaaattattaacagtcaaaaaattttcacttaatattgtgaatactattcccattaataaaagtccgataagaatccctgaattctttattaaatattttaaatctacagttttctcttttgaatttgtaactactttttccatctccatacctccaaaactttaacttattgcataagaaagtatattttcttctgaataatcttttttctctaactctcctgcaacacttccttctctgaaaataataactctatcgctaaccccaataatttctggtagttctgatgatatcattattacacctattccgccttctacaagcctttgcatcaattcataaacttcgtattttgcaccaacgtctattcctctagttggctcatcgaatattaatattttaggatttctacttagccattttcctattattattttttgttgattacctccacttaaatttttagccaattgattcatactcggtgtttttattctaagaccttttatataagattcagcattttctttagcttttttatcgtttacaactttgaatttgctaattttctctagattagataaattgatattatattctactgattggcctaaagctagtccgtctttttttctatcctctgttaggtatgctattccttgactcatagcatcatgtgttgatcttacctttatatcttttccttctattttaaattctacaatctcagctttatctgctccaaataaaattctcgctaactctgttcttccagatcccattaaaccatagaaacctaaaatttcatttttgtataagtttacattttcaatatcaagcttctttccttgtttaacttttttgatttctaagataacttcttttttatcagaaacctcatatttagctgtaggaaatttattactcatatcacgtccaaccattgatgctatcatatctttcatcgttatgtctttgtaagcacaggtctttataaaatttccatctctcaatattgttacagtatcacatattctttcaagttcctctaatctatgcgatatatatataattcctacacctttttctttaagttcttctattaccctaaataagttttcggtctcgctttctgtcaacgcagctgttggctcatccataactagaatcttacaatttactagtagggattttgctatttcaaccatttgctgctcagccacacttagatttgaaaccttttcatctgggttaattttaagatttaaactatctagtaattctatagctctttctctttgacttttatcatcaattataaatttaaaacttttattcattttctcacgtttaataaataaattttccgcgacagttagatccttaaatagattgaattcttggtacactatacttacacccagttttaaggatatatcaggatttaaatcttgtatttcttggccctctataaatacctttccagcatctttttgatgaacccctgctaatattttcattaatgttgactttcctgctccattttctccaactaaagcattaagttctcctctttttaataataaattaactcctgataaagctttaactcctggaaatgatttttctatattttccattcttaacaattcatccattttatacttcaccacttcctattattttctcgctaaacgtttagctttttttatttaattaacatctaaccgttattttatttaatgatatcacattatggtatcatttacaatatgtaattacataatattatagaatttttcacctccagtttttatttacatacattgtaaatagcggagttaatattatagtaattattactgcagcagcgatttgagtagttgcagattcaacataaatctgaaatttattatctagtaatgctaatgccgaaggtgtcgctatagcattacctgcaacactagataacgcagcacctgcatatcctggtcttttatttatggctctatctattaccaccaaaggaattcctgttcctacaagaacaatgagtccaagtaaaagtccacccaatccagcttttacaacgttttgtaagtttatagaagcgcctatgcaaaagcccattaaaggaattatcataattattcctggtttaaaaaacgcttctatatcttcatctatatttccaattaacattccaactaaaaatggccccattacactaataaaactaattatcgatatattagccttgccacctatacctaaaattataagggtaaaaaaagctcctgtattaaaatttagtatattctgagcggctaaatctttttcatcaccatactcacttactagagttagatataaattattattgctattagtagctgctccaacaattgcaattgtggatatacctagaataccatcaaatccgaaatatgcatttaatgtaattccaataattgctccagataaaactttggcggctaacaatacggatcctcttttaaaacattctttgatatctctaattttaaaatttgttcctaagcaaaataagcatattcctattatcgtggcagatccttgtgctgaaaataaagcggttgtaaacgatcctattttcattacatctggtataaaagtatttattacagcagctaatattaatgggaacatcattaatccaccaggcactctttttatagtttttaaaatttgcaaaatgttcacctctgtttgctatatacttttttcaattatgttttgctggtaactttagtttcacttcatatatttgcatagatctagtgaaatttttatagcatatactcatgggtaaatttctatcagcttaaaaacacaagtgcctgatatattattataaattcttaaagagttgttattgtcccatcaagatcccataggtcttcccaacctttagcaccttcccataagaatacttgtcctttaattagacgacaattcttatcagcctcttcaagctctttcatttcttcatcagttaaaggatcttcaattgcacttaaaagattactatagtattcattttcatgaattgaaaatggaattggtgtatgtccatgttgaactccccatttaacacaaattactgctgggtgaacattgtgcgcttttgcaattttaactactgtaggttcttcaatatctgcaatatcatcatcagttttatctctatctggacgagttggtgatccgattgggcagaatccaattacttctataccattatctttacagaatttatataattctggttgttggaaacatgggtgcaattccatttcattgacagctggcttaatcttagcatctcttaatattaattttaatttaggaattgttacactagatgttcctatatgttttactagtcccatttcaactaattgttccatttgtctccatgtcttcatgaaatcttcatgtatatatggttttgcatttggatcacgagaatctactgatactcctttagcatggaagttagggaatggccaatgtacaaaataacaatctaagtaatctaattgaagatcttttaatgtttgcttgcaagattctataacattatcatgttgatcattccaaacttttgatgttataaataattcttctcttttgattccacttgctaatatttccttataaacttcgccaatcaaatcttcatttccataaacactagctccatcaaaaagcctaaatcctaatttagctgctccttttactgcatttgcaatatcttcagctgaaaaacgatctgaaccgaaagttcccattcctattccaggcattttagcccctgtatataatgttctttgtggcactttatttgggtctataggtgtaaaattcatatttatctctcctctttaatttatttcttatagtttattttttataaattcctttgatatgatttatcttaaaatagctattaatcagctattggttaagcttgtctattcttatataattaacttttaaatctcaaacaatacttttgtggcgcaagcttctctgtctctcattatttcaaatggtgctaacccatcttctaatttatatacatttgtaatcattgattttaaatctattttcttttctttaatatattcaactgctgtagtccactcatatcctggataaggtgcactataagacatccatgaacctgttatatttaattctcctcttaaaatcttttcaaaagtctctggtttaagtgttaaatctctagttgcagttcctatatatacaactgaaccacatttttttactatctctaaacattgggcttgagctataggtgatcctgaattttcaactactacttctggcttaccatgttcagttaaataatcatttaaatccaccttcattgaatttattacatcatcagcacctaatttttttgccaattctaattttttgtcaacgacatctaccatataaactttgcctgcacctactgctttcaaacactgaagtgctaaaagacctatagttcccgcaccgaagactaaagctgttgctcctgctttaatattaattctttgaataccatgtagtgctactgttaatggctcaatcatagctccttctttataatcaacttcatctggtaatttaactacattttgagatttaactgctacatactctgccatagctccattttgcctagagcctataaatccataattactgcacattgcaggtctaccttgctggcaagcttcacattttccacatggtagtaatgctcctgctgtaaccctatcgccaaccttaacattctttactttctctccaacttcaactatctgtccagagaattcgtgtcctaccactataggaaatgaatgtacacctccatctaaagctcttggaagatcagatccacaaattccacagtacttaacttttattaatacttcgtcatccttatatttaggtatttctaaatcttgcaattctacctttgaaataccagttataactaatgctttcatttctacacctcgctttttttgaatgtgtccttcaaattttcatatatttctaaatatataggataatatctcttatatatttcatgagccttcatatcaggttcgtgtactctagtgatttttatagttctttgaactgcttccctataatccttataaagaccagtaccaactccagctaatattgctgctcctaaggtagtcgctgtatctgaagttggaactttaattcgttttcctgtaacatcactttttatttgagtccaagttaaactattagcagctccaccgatagcaatcagttcctcaacatcaacatttacctcttttgcagtttgtaaattatgctctaacgaataagcagttccttctaatatagctcgtactatgtgtccctttgtcttatcatatcctagaccatagaacacacctttagcatgtttatcccatataggtgatctctcacctgccatgtacggtaaatatatcactccatctgatccaatatttacaccctttgctttatttactagtgcatcaaatgaattttctccagtttgttcttccatatgcttttcgtattctccaaattcatttctaaaccacttaagactacctccaccaactgttcctccttggagcagccatgcattaggaattacatgaaatcctaatatcaattttttatgaccaatgggcttatctagacaaatactcatgccgccagcttgtccgccttgttcctgcgtttgtccaaactcaataactccagctcctaaagttccgcaggccgcatctaatccaccagctactactggtgttccaattgctaacccagtttgctttgctgcaatatcgtttacagtcccaacaacttgatcacaaggaactatgtctggtaacttttccataggtattcctagttcttcacatagtttagcatcatattttcctgtcttcatgtcaaagcaatgaagcccatatccttgtgataaatcttgtgtcatagcacctgttaatttgaatgctatgtaactattactttgaaggaatttataagctttactgaatacatcaggcttattttctttaagccataaaatcttaggagttgtgtatgtagcatcaaatgaattaccactaacttcgaatattttgtcctctcctattttttttataacttcctcacattgttttgtagatcttctatccatccaaatcattgcattatgaagaggtttaccttctgcatctacaggcagtgcagcccagccttgtccatctattccaataccctttatttgttctggattaatatgactctgttcaatgcattcttttgttgcttcacaaacagcattccaccattcttcagcatcttgctctacaaagtccttttctggataatacactgaatatgccttattagattgtgatactacatgtccatctaaatcaaatattgcaaccttacaagctgatgttccaatatctattcctaataacaacttttccattgtttcacctctttatagattaatatttctaattctattaactttgctcagttacaacgccttttttaattaaaatatttgcatataaagctgattcgccagtaactacaacagcatatgcttttttagatctttcataaaagtcccatttatccatatattcaaaatctgtaaaatcatcatgactattcttaactatttttctatattcctcccaaattgttggaactataggatcaccttttactacttccatcaatgccactggcttttcaacataagtatcaagaggaaataattttaatatagcctccaaaacttcaggaacattgtgtccatctaatctaactaacctttgagaatatgttccagctggaaaatttccatcagaaatcacaatttcatctgtatgacccatttccattaaaattttcaaaagctctggtgataatattttcgaaattccttttaacatattagctcctcctaattgtttcacctattaactttatattatagcgaaacgttttgtttttttatttaaaaatcatgtgtaatttcttacacacgtattttcacttaacttttccaatagattttgtaacaattaaatctgatttcagtctatttattgatgggaaattgctattatccccactcattcttttaagcaataattttgctgtcgtttcacctatcttttccataggttgaactactactgatagcggcggattcaatacccttattaattccatattatcgaaacctattatcgataaatcatcaggtatattaatccccatctcatttattgccattactgcacctaatgtcatttcataattagttacataaacggcagttggcggatcatccatgctcaacaattccttgaaaagagcatatccactatccattctgtaatctccgtattttattaaattcgaatcaattttaaatgaataatcttcatgcactctataataaccttttaatctttgctcagcagtatacatttcttgaggtcctacaattacacctactcttttatgtcccttggtaaataaagtttctactgcattatatgatgaatttaaattatccccaagtactacatcacattctatgtcttttaaaagtctatcaataagtattactggtattccactttctaatatatcacgtaactcgtttacttctttccctgatggtactaaaactattgcatctactgatttattgactaagaattctaatttcttcttttctaagtcataatcttgcttatagtcacatattatagttccgtaaccatctttcaaaagaacatcttctatttttgaaacaattgatgtaaaaaacagattatttaaatctggtagagctatccctactgttctagttttattagtttttaatcctcttgccatttcattaaccttaaaattcaattcttcaatggcagcttgaattatttctctatttttatctaaaacatttccaccatttatgtatttagatatagttgctattgataagcctgtttttcgagctacatctttaattgtcgcacttattataaccacctccctaagtgaaacgtttagcttaattcaatattatatctttctattttatttgtcaatagataatgtctaattttactaaataaattagtactaatttattttcttatatcattaattacaaatatctaagccagtgtttagattgaggaatgcacttcaacctactatatcactttagagtttctatatttcattttattatcatttaaattactgcctagtacttgcctttttagcattcctctttttgattcattctattttttattgtactatttctattttcttaactcctcattaaataattaaaatattagtcatctaaataggataatacgtttagctctgtatattaatgtttaatgttcttacttataatctccataaaagtttctgggggtactactcttacgcttttgttttcttttagcatgtttgtaactttctccacattacttgcttcttttgtccatacatgaacatagacaaaggtgtatgcttctggattatggacatttgtttgacctaagctgaccctgtcatttatcttttttactagctcttcttcgtcttcaagtgaattccaaagtagatctctgcaagacactaaaggtttattattagaccataaaatttctcctttataattatcgtgtctatgataatcaagataaaataaacctttgatatttgattttttagtaaactcattccatagctcaacatcatgaaaggcggaatcatctattattgatacgtaattttcatttactcttttcatataactatttaatgagtcaacatatgaacctaacttattacgaggaaatttgcttggatatatgtatccatttccagatggagccacaataaaattattccttggattttcattgcttacgcttttataatataaatcaaatacagtaggacttaaataatataacgctggagtcatagaccaacctaaagaaagtttgtctctattttcataaccaaaccacttaggtgaaccataattagttccaaggttccactgctgattatctccatctgacattataaaagtaacatagtgaacattttcttctttaggaacttttaatgaagagtttttattaatatgaggttctttgaaagcacttaatgtagttaaattataggaccaatctgctgcaaccatgcttacaccatattttgaagctgtactcacgttaataaactcatctggaccccagcccaaacatgtagcgttattatccatagacgaaaacaccttatctctaagagctgttttatctacacttccttcgtaaaatattaaagatttagtcattatggcataatctcttaatgcatcaattctatcaggggaaagctctattaccatggaatgatttaatcctttattccacaaattatcataagcccaattttcatatgtatttctacaatctcctttattttctataccaagttcctttattttaggttccagcgtttcatcaataactatagcgtttttaaggcctgctaaggaacaagcattatttattgaaggatctttagtttcaccattataaagcacgtacccttttatatagtctttatatatttttattagctcccaaggatctgatatcatttcataaggtacattatgattactttttaaatcttccaaccatattttataatcaggctgagaagaattaagtgtatatatttgaaaagaacaatgattattaactagcccctgaaggctagttatcattgttctttcaccaggtgtcatagaatctaaagaaatcgcatataaagatttaggaattatattatttttcatatgaacagaatttacatttgataccttgatagcattagatttatctgtttcatctatactcgaagctttactattccactcactccatttagtattaaatgaatctccgttagctttgcaataatcataaaatttatttaagaatcccattctttcattattataaaaagacttcaatgtagtatcctcaaaatttgctaatgccaattgtcttttaattataccatcagcattgacatccttataattattaatcatgtcgtacattatcatgaaagtagatgttcttcctataccctctttgcaatgaaagtgaagccaagaatcttttggtttattttttatgaattccataaaataatcaaccatatcatcagtaggtattccaccatctctaactgttactctttcatatcctaaattttttgatttagtaagttcttcttcgctttgaactgttttaacatccatagtttgtttagaattattataaaaagttataggttcatttaacttgatactttttaaatcctctttttctttagctataacttgatctcttgtaagtcctacattagcattattctttgcatctgcccagctaactgagaacccatttatgaatccgtgacactcttgtcttaaatctattactgtcgtagggagagaagtatcaattgcctttattaaaagatctatattattccctgaaaattgttgactgccagaaatattcagcttatctaaccccttaagatctaaatctttattgtcctttacaactgctaaatcagtagtttttcggaaatgctttggtaaaacattattataattaactgagtccaaaattagatgtacgccattatccttatccgacggtacctgagctattgcattgttattcactgcaaatgagaaaatactgacaatcagcagcgttaaaattgtaatccttttaaaatttttcttcatgttgttcctcctatttttagataatcattagttataattatattatccgataggagaataacttttattcaaaataataatttaaagttatataaattaaaaatttcatcttgtattccaaaccatatgacaatgctatatttgctttacctttatttattaaaaatcagtacattataaagtttattatctttttacacattttttatccttcctacagtataagatattaaatctacaatattcatattttatatgacaaatggaattttataccacattcaagtatatctataaattatagccatttcatttatagaatttatttttttcacagaataaatctatctgatgtctagctgccgtaaaactataacttctttaagaaatatctagcagtagcacgtcctagatgatttaattaaaacaaaattccataaagtataaggaggatgaggactagcatgtgcacagcaataacgctacaatcaaaaaagatggaaaatttttttggaagaactatggatttttcctatgatattgagccagaactttatgttgtacctaaaaattatgtatggaataatactcttaatatgagtaaaatttgtgattattatagctttatgggaattggacaagaagcaggtgaaatgcttggtttctttgatggagtaaatgaaaaaggatttgcggctgcagcattatattttgcaggttatgctaaatacaagactcataaggattccattagcaagcaagctgtttcatccttagattttcttcattatattttaggaagatgtgaatcagtaaaagatcttaaagaaatattaatggagatagatattataggtcttgaagatccagtaacgcaaacagtggctcctttgcattggattgctacagataaaagtggagaatgtgttgtcattgaacaaacagaaagaggtttaactttatacaaaaattcaattggagttatggccaatagtcctgatcttcagtggcacatgactaatttacgaaattacatgaatgtatctccaactcagactagtgatgcatgctggggtaacattcatttaaggccatttggtcaggcaggaggaactatgcagttacctggaggctacacatctccagaacgatttgtaagaacagcatatcaaaaaacacatattaaagcacctagtgacagtttagaagcaataaatacatgttttcatattatggaaagtgtttctattccaagagggatagtaataacaaatagagatacttatgattatacaaaatatactgcctttgttaatacaaatacttgtgaatatttctttaaaacttacgataatcctaatattacaaaggcaagcctttgggataactataaagaaagtactcatctaatctctctaggaaagttaaggcgtccaattaaatttggggaaatatagtattgattctaccatttaaaatatataagctgcacttacgaatgacaaaatatccatggatttgaccgtactataattttatgaagaataaaaaagttcaccatacaacaatgatgaactttttttagtatctattatactctactattaatttatttttactgcctttaaatctacttatatcttagtcaaactatttatgatacgaaaaagcatattatttttctagttcaattactatatcatctaatgtaatttcatcgttcttagggtgattctcatctataataggacttgtagaaactacattcccatttccatcacttgattcctgataagcattatttgataaatgtacttttggagttattattagtttagttgcatttggatttaactccccaaaacttgacatggattttccagcatatcttccttcactaccttcatttgttgaaacacttgttgctttataaacatttcctaaatcatcttttacttcttctatcggaatatctacaataaagtatttctcttgtaaatcatttgaaatttcttgagaataatttaatgtaaatgttgctgacgttttagaaatactttctatatttaattgaactccttttttttcagttgtcttatttaccatttgcttaacattatctaatgcttttaaattaattttgaacttccaatttccacttatttctttagaattttcggagctcatatctcctatatctgtgaaatttaattcaaagtttatggcttttctttcttcatctatagtaatagtttcttgacctacataagtattctcatcaaccctttttactccagaacttcctcctgtcccgccatcataatcttttatagtaactctcggtccattcatattaaaaaatggattatctcctaaatctttatcacttactatttcataggtataagttaaggtttttccatcaaatattgcttcttttattgtgactttaatgccattactttcttgcgtaactcctaccacatctgcatattccttatatttatcatatgcacctgttctaccattatctataaacctaaatatatctccaactatcggaatttctgctgcataagatggataggctactcccaaagttcctgcacctccaattaacaaacaacacaaaactgctgccgctattcccttatttctataggatttatttttatttatagacttctttaaatacttttttacctttgctttttcaatatcagtcgcttctattatctccatttcatcttcatctatgtctatatcatttagaatttcataaatatctttcatattacactacctccaaatttagcctaagttttttcttacctctataaattctattgtctaacgctgctctggtaagtccaaactttctagcaatatccacagacttttcccctagaaagaacttcataataaatatgtccctatccataggctcaagagtgttaattaagtttatcaattcatttctttcttctagcttaataatttcttcttccactaattcatttgtgcttatttccttatcttctatgcttacattcagattcttaacttctttcctgtaataatcaatagacttaaatcttgctatcttaaatatccatttcttaaaatcaacttcttcacctgtaaatttatctgaattattccatactgaaagaaacacatcatttatacactcctcaataattccatccttgttaagtggtgaaagtactttatatactgtggatttaactaatgccagatatttatctactataaattctattgcatcttctttcctctttttcagcctactgatataatttttttcggtacacctcattgaaatttctccaatccattattttcgtaaaagcttttacactttatataacgtaaataaaaatgttttctctcattttatttttatttgttttacatatttctattttattactatataaagattttcacattcattaaatttattaaacctcttcgtgttaaatcgaattaaggactcatagtaaaatggggctgccttctctgaatctaagaaatactttttacctaattgactttcctttaatatataaattttaaatagggcaattcattttttataaaatcatttagtttatagttgttagtagtccactaagactctaatgaattaaaccttttagaactcatatagacctacataaattttctttatgtctttacttcaactgttttaattctttgggacttaaaatatttttaggatacttatgtaattcatgaaattaatacgtatataatatacgaaaacaagatgaaggaggtaaaaatatatggctgtaactaaaactattgactctgtttctcttagcattgaagttcaaaaaggattagataaaactggcgatccaatttatactaagaaaactttctcaggcatcaaaacagatgcaacaccagaaaatatctatgctgttgctgatgaaattaaagctgttatggaagctaatactagagactactttataaatgaatcttctagtttagcaaatgcttaagcagataagtgagataagcgagataagtgagagtccaaacctatgatttggtttctcgaacttagttaaatcatgtatatgatttaacttccttaaactctaatgtaaacagaaaggtggtgaattaaatggaatattctttatctatgacttttttaactgcggctggtgaaaaaagtactttaagtgtttctggtgctaaaccaagtcttacaaaagacgagattaatgcacttatggatactgtaattgctaaaaatgttttcaaaactaattctggtgatttagttaagaaatctggtgctcaagttactcaaagacaagttactaaatttgatgtagcttaagttttaagtaacctaaaaaaggaagcttatctcatagtggataagcttccttttttattatcttcattatctaatgattcaattatacaagttaatatctcatgaaaaatcatgcttaagatttctacgctcctgctgattcaaatattgccatgattctacaaaatgtacccttctgtaataaaactcatttttacgccttgaatagtaaattacctatcttctcttatcccctcttcaggtttaatttttatttttaatatttcagaatatattctcatcactttcacataataaaattaagtttttgattacataatattttaatttagaaaggtgagtgatctaatgaaaaagtatccactggcatttttaatttttttactattaatatttaatatttttacaatccctgttgtagctgagcctaaaaccttgaatgaaggattttataaagctccagatttaaatttgtctcacggcattcatactgtacaaaatacttcaaccagtgattatgcctttattgctattttcgattcaaatcaagtaactaggcaatatatgcgattagatcctcagtcagacaagtatattttaatacctttagaacctgaatttgaagtaattgtatctggtaaaggtagcattattataaactagataaaatgctcaattcattttcttgttatatataaaaatttagaggtgattatatttatgaaaaaatttatttatgcattagtattcttcttctttatttcttctaatattgtaatttcaccttgtatggctgaaagtaaaattcttaagcgtggtttctacaaagttgaagatttaaatttatctctagatactacacatacagttcaaaataattcttttaatgagcggatttttatatttattttagattctactgaaactcctgttcaatctattcgcctatggccccaatcgcaaaaattcaatttatttcctctcaaagctggatataaaattataataactggagatggtgaattagttatttcataagggatacttttatagtgtctcttatgatataattcctttaaagtattctttatttcattcttttcataaagttttagtactttccacaaataaatttatgtttacttctaaaatttcttcatgacttatactgaaccctaattttcttaacatatttcatggcaactacctaattatcactcttagttatttctacaaatacaccatcgttaattcctagttcttttcttatttcttttaatgatatctataactactatcagtaaatatgttattaaagacaatactaaataaactattatcgctggtattatgctgcccatcttataccattgattaataggtaatattattgatagtgataataacaaaaatccaaccaacatattattcattgatttgaaagaaataatagtctgaattataaacattatcggaaataaaatataaattccagctaaaatcctcttactataaggaaaatgagagtctacgaatataaataaaaatgttaatacactcggtaatatagttaaaagtatttttttcataaatcataactcctttatttaatactatcccattttccatctttcattttcaaagttttattgcaaaagcttgcaacaagattatcatgtgtcacaactaatattgtcttattatgcttttggtttaattcttgcaatattttcatgattttaatgctattttcttggtctaatgcacctgttggctcatcagctagtataatttcactttcttgagtaagtgctctagcaatggcaactctttgctgctgccctcctgataattgcctaatacttttattttttaaattcaatatatctaattcatttaaatactttattgctttatttactctttcttttcgcgcaatccccctgaatttaagaggaagcattacattttctagtacgctaagatcttttattaaggcaaagttttgaaatataaaagaaattttttcatttctgattttagataactgattaagcttcttaaagtctacttgaaaatcgtcaatataatattcaccttggcttaggatatctatacatcctaatatattaagcaatgtgcttttaccacaaccagaaggccccataatagctataatatcacctttatccacctttaagcttattccatctacagctataacttcgttatcaccttttccataggttttatatatatttcttaaatctaatatactcattctgtaaatcctcccatcatatctttcggagtcaacttgtttatttcattaaagcttattagcataattaaaataattgttaataataatatccccatggaaatatataaatttaataataagttttcattaataaaaaatgcataaacactcccacagttctttaaataaaataaacttcctcctataattccaataagtatatttataagaaattcagaaaaaaatgttttaaatatatcttttttactaattccaaaagaataaagaattccaatcctatctacatcttcggctattttgtaattaattgtagtaattattgatgcagatgcaataatggtaattataattattctaaatatttcataatacttttttgattttatttcttccaaaaatttatctaaatcgtcaccaaaatctgaaataactatatcatcagaaatttttcttatatttgattctaatttagttgaattattttctttgtcaccattgaaaaatattgttataggttcatatccaaaattttgaaagaaggtttcttcacttaatggaataataaaggacttatttaataaaaatgagctatctacactatttgtataatcaaatgctaatacatccttcttaaattgccctacaattttataagttatattattaactacatagctagtgcccaccttaacttttttagccaaatcatttccgacaatcacaggcacatattcatcacttctaatccattcctcttttgaaatttcctgagttatattgttttgataatgttctatcattccataattaaatccaattggatgtatcaactcatcagttgtatctttttctgtaaaattagactctaggtctttagaatctaaacccaaaacatcaattggaatatcagtatacaaatccctttgaataaacccgtaagtataattattttttgatattaacttaaggctttcctttatatcatttttataatcttcaatatctttattttctttaaggatcattttataaaatgtcatgaacttagaattatctatggaaattgatctgttgtacctatttctatatgatttatcaaagttaattaaagaaaccaaagaagcagcataaaatatccataaggctacttccaatataattaatacattaactataaagtttctttttatatcaaaaaagataaatttacttttcatactacttaccttatttctttcattattttaaatctaattacattaaacaacacgagtatagatacaattatagatattataaatattagcattgaacttaatataatatttgaaatgttaacagctgaatattgagatgggaaagacttcatcataaaatctattgtaatttttgataaagctagtccagcaataattccaatagaagatattcttatgaattttgcaaaaaccactttaaatacatcagagtttttagctcccaatactttcataatagcaactttttcacgtatatttttagcaaagaaatatgaaaataaaagcaaatttgctataccaagtattatttgatataaactatttttaagttcgtaaacatttttgaataaataatctataaccgaaatcctcgagatctctttttcagaagcgttagtattttttaggttaatttctttaatgtctatattacttatattattctcataaaaaataacattaggaaccttagtgtttataaaatatagagatcttataggaattatactgctgtatttaaatacttcagtgtttccaagaaccccaataaccttataatcttcattaaatatttttatataacgttctccatttttctcttcaactaatctttctagaccaaaacctataatcgcaactttttcattgctcattaactcttcttcagttaagtatcttcctttaattagatttctgctttctatgtcaaccccatcagagcaaggccatatatcattaatataaaacttattatcaacttgtatttgatcttcaaatggctttaaaataattttcttataccctgccttttgaacagcatctactatttctgataagcttggattttctttatcctcatctttatttacaacttcagctccatcaacatatttagtctcatgtactgtatctatttttagatacttataatctttattaaatcggttttgttctgtaactctattataatttgaatatacaatacttattgttaaactaaacgcaaaagttgacactaaaaaaccaattattaaaaacagctctatcttagtatatttattcatacattactccacatgaatattaataacgcactgatctttactaatattcttatctaaattttgattttaaactagcctacattcacgtaaatgcgcttttttctaaacccatgagtttgatatataacccatcttccacacgttttgtgatgaggcagtgtatgtccactttcctagaattgtggacttcttacagtctctctagcataggcatagacataatcatcactacctgaaattgtatttacgtctaatgttttacatatacttattttaacatatataacattattactaagatttattttttcttattctatatttctattgccactggacaaatgtaattctacttcaatttgggcattcgaatccatccagcaagttttatcatttaccttacctacaaatgataaagtaacagaaattaatataaaataaattgtaaatacaaaaataaacggtagttggatttctcattcctaactaccgtttttacttttatgaatctttatgattatataatgttattgtcatataaaaactcactatcgttcattatctcatcataatcaccatctctaataattgaatgattacttgaaaaaacaattgctcttttaaataccccttttacatattcaaagtcatggatagaacataaaatagtttttcctgcattatttatagctatcatgaattcttttaaaaatctcttagttttaggatcaagtccgttcattggttcatcaaatatataaacttctggatttaaaactactacggtagctatagaaacctttttcttttctccaccgctcaaatgatatggctgtctatctcttaattcttcaatttttagtaattttaaagtgtcttctaccctttttctaacttcttcttcatccatccccatctgtcttgggccaaatgcgatttcatcatatacatttgaacagaatagctgtacatctgaattttgaaaaacaaaacctatttttttatgaaaagcctttgagaactcttcattttgcatttttttattattaatttcttcaccttcaaataaataacttccactatcagcaattattaatccattgattaatttcattaatgtagacttcccacttccatttacacctattaaagcaatggcttcacctgcatcaatatgtaagtttacattttttagtgcggtaacttcagcatcatatgaataattcgcatcttttatatcaatcattaaatcacaacctatcaaaataaaaatatgttaacacaaaaattatggtaagaataaaacaaatataatcaaatagcttaaatttaaatttcgtatatactttatatgtccctgtaaatcctctagattccattgctccatacatctcttctgccatctctttagactttataaacatagttcctacaactccagaaagtgcagtacttttatgattgtttttacctactgatcttaatttaagagcataaaccatatttaatgaaaattcgcctaaaattataatatattttatagtaatatcaagtaccaaaataaatatatctggtattctaaatatttttaaagtaattattagttcattccactgggtagtgcaagttaatatactgacagaagcaactgaaactaatacttttaatgtgatcattaaagtattattgctataacctaaaaaaatagctggtaacaaaataataaacgtaaaaattgccgccgccatacttgctttgacaacatattttatttcttttatacttaaaagatttattaacacaagcataaacacagttgtaattacaataaagtgaaaatttctgcttaaggaaacaaaaataattagtatgagcgttgatattaattttgttaatgggttaattccaaatttagagtttcttattttagtttgctgcctaaacatagcaagcacattaaatattgacagaatgctcttatctataaaagaattcttgtcttttagcggtgtataattgtctttctttaaaagccattctggcattaataacttcctttcttataacgtatattaggcacatttaaaagagaacccaaatataaaatttggactctcacttttgttttgctacatattgctgaattgatctagtaaaccagcatagtctcactttatacttttgttgtctttttcatacttgctattattctaaatactaacaatagtattgcaacacctgcaactgctgataaaatatatccaaagctatctggaagccctgaaacagaataatctggcattaatgcattaaagctaaatccattttccatgcctttaggtataaatcctaacgtattaccacctgttactacagaacttatttcatcagttccccattctccccaagctgtacctgtagctaataaccctaatggtgataggcatattagtgctattattaatccatatacaggctttgattttgtagtagctccctcataaataattcctggtgaaactttttttataaagcttaatacgccaacagttataattccttctaatactcctgcaactacaagatgtggaataagcattgaaggtatagtaattgataaaggataaggacaatatagcggtatacctgctgcatctttaaaaagtaatggctgtattccgaattctattgctgcacataaagcggccaaatttattccaatatacgctgcaataaatgtcccaatatattctcctttctctgtcttaaatttctcttttaaaaacttataaatataatagcctacaaatggtatgatgaatgccatattaaagcaattggctccaaaggctaaaatacctccatcaccaaatagtaatgcttgaatcaaaagtgctatcgtcactgaaatacatgccgcctcagggcctaaaagaatggcaattaatgttcctcctacagcatgtccagtggttccacctggtaacggaacattgaacatcattgttaaaaatgatagtgatgcccccactcccataagcggcaatttctttttagttacctctttttttacttttgttacaactcttgtccaaactggaatcattgccgcacccataactgcgcaggtagctgggcttagataattgtctggaatatgcattttaattcctcctttaaatcacgttaaaataattagacttgctatttcctgaatatacccaatttttaataaaaacaaaaccacaaaaactgattacaaataaagcaatcaaccttcgtggttattaataatccaaattaatctattaatttatatatgttgcaattcacaatgtacatttcacaattcacaattacagctaaaattcttttaatatttttagaattatgctaaagaattatttttgccatatatattgtgtaaaaactgtataccctcgtagtatacaactttatgatactatacaattccaaaattgtaaatattaaattacctttgaattcttgtttttattttttcttcaatatatgtaacaaatgaatttaatccttcctcagttcttgatgatattctaaaggtggctgccaatggatttaattctttaacattttcttctactttattgtcatcaaagtcaaagtattccatcatatcatacttacttaatacaactgcatcagctttagaaaatagtaatggatatttttcaaccttatcatccccttctggaatacttaaaacagcaattttaaaatcttcaccaagttcaaactcagcaggacagacaagattaccaatattctcaataaaaatcaaatcaatttcatctaaatcaaagtatcctaagatattataaattgcctttgattctatatggcactctccttctgtattaagctgaataacagaaattccaagtgaatcaattttttcagcatctacttgtccagcaatatcgccttcaactacagcaatattaaatttatcctttaattgttttattagctctataatcaaacttgttttgcctgtccctggtgaacccatcacatttactaaatatacatttttacttcttaaaatttctttaatatcattgttgaaatcttcgtttaattctagcaactgttttacaactttaattttcatttattcacctcatatctgcaattttttaataactttattattttgtgtttccaataatcatataaaatctcttctctttattctataataatatatgttaagaataaaatcacagattaatttcggtcaatttaaaattatatagtctttttatggaatatgtgaacaccaatcacttaatatttctaaaaagcacttgacttgtagttaacttcaaggtatagaataatatcagaaactataaataaaaatcttatttataatttagcactactttatttatgcattaactacttttattaaattatatctcttaatcatagcgaaaggaatgatcattaatatgaaaattgcagtaatagatgcacaaggtgcaggccttggtcaaaacatcataaagaggattcgcaaagaaatagataatgatgtttatattattgcacttggtaccaactcatttgctacctcaaaaatggtacaagccggtgcaaatgttggcataagcggtgaaagggcgatcagttcattttgcaagacaactaaaatagatagtataataggaccaatcggaataatctgtagtggaggtataaacggagaaattactactatgatttccaatgcaatatttaatatggattgtactaaatacatacttccattacaaaaacatggcatttatattcctggaactagaaatctacaaattaaagatataattgaagaaattgtacttgatataaaaaataatatagaaaaattctaatctaatattaatagattaaggttaatttactccccccttattattaatatccaattagtatataattgatttcatatcattcaattatatttttcaccaaataaatggaataatccttttagtattcttcttatactcttgataatctgtcttgaagctattttctaatatcttttcttcaatcctaattctatatccataaatgacagcaataattgttatagttacaatagttccaattatgcttctaagagctaatgctattccaattaaagatagtatacttccgctatatgcagggtgcctaatgtatctatatggacctgtttgaattattttttggtctaaatccacttgcactgatacggtgaaagatcttccaagtgtcaatactgaatacaacctcaatataattccggcaatgataactgcacagcctatccaaaacattatttcaggtaatatcattaaataattttttctacaaaaaagattcaaaaatattatagttatagtacccagtactagtaccaagcaagagcctttatctccttttttcttattcaaattctttctattttttagtgaagtataactaaaaataaatacttctgccataatatataatataaatactacttgaaaaacttccttaaatatagttgtctcaaaatacgaaactccaaataaatacatcgtaattgccctctttctatttacctgataattttctatttatatcctctgcatcattctgaattgaaataaaaatacttaatatcgttattccataaaccaatactattataataatattcttaatcacatcatatattgatgcaatttcaataactttcattggtatgcctatcaaaaaagttattatagtagtcatggtatattctataagtatatgaataacctgagactcaatttgcaaattttccataaaataaagaactgtatttattaatataataattaagatcagaaatatttctgatttcacattaatagtatcttgcttattcataatatgcataataattgttacaataattgctacagtaaatgcaatgcagcttcccaaaaaatattgatttattcttttcatggtttcctccaaatctatatttacttatatatttagtttacgttttacttcttgcacataacttcgattaattacaagcttttctccatttgataatgttgcaagcaaccttccattaatctgacccttgactttttttaatttttctatgttcataatgcatgctttatttatccgtgtaaattttgttccatatagtttttcttctagttcatacaatttcatatcactttgataaacattgtccttacaataaatatatgttttgttatcaacagattcaaaatagtagatatcccttgaagaaatctgtgtatattcatttttaattcttccatttataattaactcttcttcaaatatagtcgcggctaatttcttaacatattcatttttttctttgcatttaatttgtatttctatatcatcaattaaaggcacttcaattatttctattctcataattttcctcctgatttatttaaagaatatcacagaattatagccataacaattagtccacatgtatattgcaaatatacgcatgtaagatgcactaagtgaactcattgacatcaataactagcttcagcgaatttatctgatagtaaatcttagtactcaataaaaaataatagacagtatattgactacattggaattatatgctattgtaactttagacagtatattgtccaactaaggaggagatattttatggataactataaagcgctttttttaatacaacaaatatatgcaactctgttttctcttactaataaaattcaaattaaaggtgatgaatattgtaagcctttaactagcagacagcttatggcaatggttgctattattcatttacctgaaaatgaaacgactctaaataatatttctaaaaaattaggtactacaaaacagagtgtaaaacaattgattactaatttagagaacaaaggatatgtcattactgtaccaagccaatatgataaacgtgcagttaatgtgaaaataactgaagctggaacagatgccatgaagacatgcgctgaaaaatcaatgggtttctttggtaagctttctaaggacttttctgttgaagagatggaaatcttatggacattattaaagaaattatatagatttgatggcgaagaacaagatggcttcgaagaagaagctgaatttgatctgggtgatgatacacttgaaatacaaaagagagcattaaatgaatttgatagatcaagaaatgaaggaaaataaaaaataaataaaggcggtacaatattatgaatgatattctatctaataactctcaagatcttaatgactttttatctgaatacatgaataagtggaaaatcccaggaatggctgtaggtattattaaagatgacgaaataatatactgcaatgggttagggctgcgcgatgttgacaaaaatttaaatgtaacaaaagatactttatttgctataggttctgcaagtaaatcttttacgtcactatcaataggcatattagtgtatgacggcaagctagatcttgatactcctataaaaaaatacatgcctagttttgaaatgcataataaatatgctgaagaacatcttacattaagggacatgctttgtcatcgttctggattacctagacatgatattttatggtatacaaatccttctttaagcagaaaagaactggtagataaaattaaatacttggaatttagtaaagatttcagagaaacatggcaatataataatttgatgtatgccacagctggctaccttgttgaactagttacaggaatgacctgggaagaattcgtgaaatcaagaattcttgaacctcttggtatgaacagcacaaatttcacagtagatgctttaaaagagtattctgattacagtaagccatatgcgcaaaaaggtgaagaaattaatcaaatagactttagaaaactagattctgttgctcctgctggttctatgaattcaagtttgactgatatgttaaaatggcttaaccttcatttaaataaaggtacagtaaacgggaaacagattatatctgaaaaaactataagtgagttacattcaccacagctcccttgtgagctaattcccttaaaatttgatgaattgcaattttcatcttatgccttaggctggtttgttgaagcctatagaggaagaaaacatgttaaccatggtggaaatatagatggattttgctcctatacaagctttcttccagacgagaatattggcgtagttattcttactaatttaaataatcctgtctgtgctatgcctatagcataccatatatacgacaaacttttaggctatggccatagtgatttttgtgaaaaactagaggatgaagctgaaaagatgatgaaagcaatggaagctgctactaagcctacaatagactcaaaaaaagataactcagctccttcccactcccttgaagaatatactggcatatatgaaaatccagcatatggttctttaaaagtcgaagtaaaagataatagcttaaaattaatttataataatatagactattcacttaatcataaatgctatgacatttttaccatgacaataacagaatattacttgattgatgtaacctttaattatgatagcacaggaaatattaaaagtgtctcaataccttttgaggagactgtaaaagaaatcttgttcatgaaatgtaaataataataataataatatatatatatatatatatatatattgcaaaaataattcttcatcataattgtaaaaatattgtaaaaattttagctgtaattgtgcattgtgaattgtgaatttcaacatatataataataatacagaattgcatttatagatcttctttatttgcaattctctttataagttcagaaccttcttctacagcaataatatctactccaaaatccactaaaaaatattgtgaaactctattttttagcagtacaattttccacttgcagattctcttattgattaacaaacactgatcatgtgtttttaatatttacaaaactctaattattcctaataccagaccaacgcaaaaaccacaaatagcaccatttatccttatccactgcaagtcatcgcctacacgctcttcaatcaattttataagagtttcagtatctaatctttcaatattatctctaactaatctgcctatattttcatgattggaatttatgtaacctgatacgcgttcctgtatctgctgctctaatttatttattaaatcaatatcttctgatatactgtctattaaattgcttagcattggcagtatattatttcttatgtaatcttctttaacataacctaatattatatttcttaattcatctaatatttttacactaaagttatttagttcaacattactgcctaatttcattttatactcatctattttttgtatgacttcttcattgttacttatgtttcttatattgctctgcattaattcaaggagtgtaattctgctggtattatcatgtttttttaaatcttttaatattacaacgactaaatcttgagctatttttcctactttatcttttcctaaaacatttaagactgtatttaatgaatattgcattattccacttatctttagtttatttatagaattgaatactatatttccaagttcattctttactttttcttgctttactatatcttcaagcttaataagtaaattatctaaaatcttctcttcataattatttcttaagaatatgctaattaatttttcaagaaagtatttagaatctaatgtaatcaaatatttttgaattagtttaagcaaagatgaagaaactttttctataggaatatgttctatggcacgttcaataatatacattcctgcttctattccttgcttagaacatataatttttttgcatatatttaatatttttttcactacttctaattcatgtactttatttataatacttgatttattgagcaagttgttttcaactattgatactaaaccgtctgttattcttttacgattcctaggcagaagtgcagtatgtggaattggaattcctaagggataccgaaaaagtgctactactgcaaaccaatctgaaaatccacctaccactccagcttcaaatccactttgcaatatagttattataggtgtattttgtggaaacaaagtaattataaaacctataaacataatgactaataaaattaaggctctttgattagttttcattttcatattatagcctcctatattgtcagtatgtaaacatattgtaaaatttatactagactgaggcataataaaaaaattaattggcaaatttaaattctggatctaatttatctaattttatattccaatttgaagatttgtaaatattataatcagaagttattgccatgcaagaaacaccttgcaagctgtctataaatttcaagccattatctacacctgctatgaaaacagttttggttaaaatatcagcaagcatattgctatcaggaatactgctgtctacaactatagttacactcattacaccattatctgttggataacctgtgcttgggtttaatatatgatgatacctcttaccatcctttataaaatatctttcataatctccagaagtagaaagtgcttgttctgataaattaattatgcccacataatcttgatcgctgtcttttctaggatgtttaacgccaacattccatggtgttccatctggcttttgaccaactgtatatatagaactacctccaaggcttatgatcccacctttaatatcgtaatttttatagatttttaacacttcatctgcagcaaatcctttagctattccacctaaatctattgccataccttcttttagtaacttaatactattattctcttcatttatactgatatcattatatccaactagcggtagttttgatttaatctcttcatctgtaggtattctttcgttatcagttcctattccccaaagatttacaagtgggcctacagttatgtcaaatacaccattactcaatttagaatacttaactgctgcttcaaccattttaataatctcaggatgtacttgtacatattctttacctgcagcttgattaattttacttatgtcactgctatctatagtcacacttgccatttgctcaatctcatctaatcttgaaagagatgcttctatagcttcattagcttttggaccatatgcttttagctgaaaaacagtatccattttcaatgatgttttagtaataatctcctgattctttgaacaccctgaaaaaataagaatacatagtatgcatgtcattaacatagatatttttttaatcactttaatcgccctcgtaattcattttaataaatttattaacctaccaaacattttacatcattttagagtcattttatagaattttttccaataaagtaatatttttatttagcattttatagataaacagtatataacttagacttatgcgataatccaccgaaaatagaaacattgttatttcacaggactatgaaaatttcactgaaagcactaaattgaaggtttcatcattaatgcttgctcccaatttcattgtgacaagcattaatggaaccaaccgttagcggaaactcgactcacatacgttcgctgagtaagtgattcacaccgaatcaaagattcgggttcactacttaagggcttttaacagctcattttcaaatgttttctccatattatgacccttgtggttacaaatatatttatgatttctagtaaagatacgaactcaaagttttagaaaatttgtaaatatgttcatctaataaatctaatcattaagttgtttatctatatataatagggttccgtattgataacaatacatatccactgtttcaatttcctgaataacagaaatattgaaatttcataagtttgaatatcattgaggaaccctatatagataacacaatcataaactatacttagactatgaagtatcttccaaccagaaatgagtgatatacttttgtggagtgtttcattggtaattttgatggatgtgattctttggctataagttgttccaatgtgctagttcaaagcttgttctttgaggctagcactttgggtgcaactttatagccttagaatcacccatcagaattacctagaaactggaacaaaagtatattattcatttcggtgagttatacgcctaagtatagattatagttggtttattgctaaaacttactatgaatagtataatctttttatgttaaatactttaattatatgaatgcaaactatagtctgcatttaagtaataagggaatggagtgaaattcttcaactaccccagtaaccgtgaaactgacgaaatcaaaggcacaatccaaaataacaagtccaatctgttattttttgattgtgtctaaagtgccactgagaaattgggaaggcttgaaattaggatgaagttaagtcgggataccttgttttatacaccgataatatcctctgagggtgggatattaggcacatgaaaataaatttcaagtgcaacgctaccatgaatatttttcatcagacaagaaagtaaattgattttataggaggtctattaggtcagtccacttccgtaggatcgttgaaaataagctggtaaatgaacttgttattttttgaatgtgacttaagtaatcatgcgttttatgaaaataagacttttaagttttattctgatttttataggcatgtttattatgaatctatgcatactctcgatgggtatgcttttttgttacccttaaatacaatatattttaggagggcatcatgaaactaaaaaataaattttcatcactctttttaatagttatattagctatgagtacacttttcggttgtggtaataagactgcaacaatgacagatagagaaggtaacagctttaagcttcctgaaaaagtaaaaactataatatctacagcgccatcaaataccgaaatattagttggcctcggactttcagataagctagtagctatagacaaatattcgtcagatgtggatggtatcaataaagatttacctaagattgactttaagaatccagatgctgaaactcttgtgagtctaaagcctgacataataatagcttcaggacataataaaactgggagtgaagacccctttgcagctgttaaagaagctggaattcctgttgtatacatacctactagttcaagtatagaagacctttataaagatattgactttatatcaaaaatcactggcactgagaaaaaaggtgatgagatgacagctaatttaaaggatgaaataagttcaataaagaaaattggagatactattactgataaaaaaaatgtatattttgaaataggatcaacttcaggtttatatagttttggtaataatacatttttaaatgaaatgattgaaattgtaggcgccaaaaatatctttgctaatgaaaattcgtggatatctccaagtcctgaatctgtagtaaaagccaatcctgatgtaatacttacaaatgaacctacaagtaatgctatcgataatataaagactcgcgaaggcttccaagaggttactgcagttaaaaacaataaagtctttgctattgataataattcctcttccagaccatcacaaaatatactgaaagcacttaaacaaatagcaaaagttatttaccctgaggaatatgcaaatgtataaaaaaattattatattattaatcccattagcatttttaattttatgtatcgggacttctattggaagttctgataccagcctaatccatattgcatcgataattggatataaagttttaagaattccactacttaaagagattaaccctaatgatgtggcgataatttggaatttaagattgcctagagtttttttagcctttcttgtaggtgcttccttatcagttagtggtgctgtggttcaatcattacttagaaatccacttgcttcaccctacactttaggagtatcttctggggcctctcttggagttggattccttataatatctgggttttcaatacctatactcggcaggcttactcttcctttaacaggctttttatgtgggcttttgactgtatttattatcataaaatttgcctacaaagttgataacagcatgtcaacttcaactataattttatctggcatggttttttctttattttgcagtgcaatacttacaacagtaacagccttatatagtgaagatataaaaagcatagctctttgggaaatgggttctttttctatgaagggatggtcatatgtacaaatgggaataccattctttataattggaataattggtgtcatgcgctactgcactgaaatggatatattatcttttggtgaagatcaagcaaaatcagctggagtagatgttaatacaataaagactagacttcttattttctctgctatattaacgggttctgctgtagccttaagtggaattattggttttgtggatttaataattcctcacttagtaagaaggatcattggagcaaagcataaatatgtaattcctgtatgcataattttaggaggctgttttatggtgattactgatttagtagcaagaataattataataccatcagaattaccagttggggctattactgctctgatcggtgccccattttttgcatacatatattttaataaggcacatgaaagaaaataataaatcaaagtaggtgatgattttgttagaacttaagaatttttcttgtggatatgacaaaatagatatcataaagaatataacctttaaagctaaaagaggagaaattctttgtatagttggtccaaatggatgtggaaaaagtacgcttttaaaagctataggcagactcattgaatataaaggaacactaacatttgattcaaaggatataaaaaatttacctgtgaaggaatttgcaaaacacattgcacttatgactcaaagtaacaatgtttattttccttacacagtttatgaaactgttgctttaggcagatatgcttatttaaaaggggctttatcctctttaagtaaggaagatgatttaataataatggcggctataaaaagtgttggccttatagatttaaaagataaacttataagtgaattatctggcggccagcttcaacgggtcttcttagcaaaagccttttcccaagattcagaaattattttattagatgaaccaacaaatcatcttgatttaaaatatcaaattgagattctagaatatttaaacctttgggcaaaagaaaataataaaattgtaatagctgtattacatgatttaaatttatctaacttatttggtgagaaaattatattactaagccatggcgaaatagtcagccaaggtacacctaaagaagtatttctagaagataacttaaaaaatgtatataatatagacgtgaaaaatttcatgattagtgctttaaagcagtggcaataagatatattggtaaaagaagtgaattgattgaattaattgaattcttattttttaattatagctaatataattaaaccagtactcaattttcgatacatataatatagaaatatatgatactttaattttgcattttttaaaatatattgtacatagtatagatatatatctaataaatattaactgacacatgtatacgcccccctttattggggacatttttacgtctattattatccatgcgaaaacatattattcctaatcttcagcatattctaatatatcgccaggttgacactttaactcacgacaaattgcttcaagtgtagaaaatctaatggcttttgctttattattttttaatatggataagttcgcatttgtaattccaactctatctgctaactctgaaagtgatatctttctttttgccatcataacatctaagtttataacaattttcataataatactccattaaactgtaaggtcattttctttctttatttcaactgctttttcaaatatttctgataaaaccaaagctataaatgataatataacgtacataaaaaaacttcccttaaggcatccagattctgtacccaaaaaagtaaaattactttttgttttccacttaaaaatcccatcaatgactgccatgagaatcatgtaatatccaatttgtttaaaccttttaacattatcaaaggaaaatggggttgaattagtactatatacaattttacgtaaattataaactactaaaaagtatataaaacataatataagataaacaaatgaatttacatcaattccaaaagataatatactcgttataaatcccaccactaatatccctaacacaactaatataatatttaataatactttgctaaaactagtagctaaatgttttttcataaaaacatctcctttttaaatattcctcatttacaaatattaagttgtcaattacaaacattgcatttagatctacaaaatagcactttgttttacaattgagttaaatatttatttattaccaatatatcactattattatccaatttcaatataatattattgattatcaataaattgtattatccatgcctctcttaaatcgtgtaacacttagacaaaaagtttacgtcatttatggttacaaaattataattctataaatccaatttttttataaagatttacagcatctacattttcagggtgcacatataagattaaatcatcgtatcctaaattcattaatacatttatactttttttcaaaagattacttgccatcccctgtttcaaatatttcttaactgtaaataattctgaaacaaatggtttccctttaaataaactaataagaactacagcagcaatttctccattttgtttaatttgaaatgaagcatctggaataaatctgccaaaagtactttcaacaatactacaaatctccttatttaactcttctattgtttcaccattgaagtctacggtatcttgaaatgcgtctaacatagaaactgataatccatctatatcatcagaatctatcctatcaaatgtataaattccttttagttcttgtggtgcaagtttgcaaatcatacctattctttcactcatatattattctcctaatttttttcttattttgtcctatatgaaacttatactgtaaattataatatattttctaatattacattattgtattttcaaataagctttttataattacttagttaaatctacatattgtaatttaaatttgccactatgctgacacatggactattataataaggttatagatcttagaaaaactttttttcataaatttttcccctataaatatataaaacaaagagtaacattcatatccccgttatgacatgttactctttatttgattcaaacaaattatcaatttgagttgtcgtaggatacgatgctattcctattgaaattgtaatttttataaatttatacttgctcatccaacaaatttaatatttctaaaatcccccattattcaattctcaaagtgtatttttataattttctaagttaattctatagatatttactaaaaattagctgacacatgtatacgcccctttattggggcatttttacgctagatattagaattatgcataaagaaatatcacaaaattcatttctgaaataatgtgatatttccacttacttatttatttttatctatctatactagtgcttttttataaccggtatccatatttcacttttaaacgttggtgaagttacatctttattctcattccataaaatttctggaccttgtgtttgttcatagtttgaagatggaaaccattcggaataaatgcgcccccagacattttgcaatgtgtctggaaatgggcctacagcttcaaataccgcccatgttgatgcagcaacttcaagttttgataaattatttggacactcttttgttgttgcaacacctatataatggtcaagttctcctttctcctccattcgtccttctgaaaaatttaaagatgcacttattagtcctcttggttctgtgttagataactctttcaattcattaatattttcaacagttaggctttgccacatcttagcaatctctggatttactccattaaaaattataggcacccttttttctattccaattatataaaatgcttctttctcctcaattctatagttcatttcatttcctccttcaattgataatcgaaaagtcattcgcggataggcttttaatgattttccattatatcgagcctctgatggtgttatgccatgtaaattttgaaacgctcttgtaaacgaatctgctgacttgtatccatatttaacagctaaatcaattattctcacatttctatcattaagttcaaaagccgctaaggtaagacgtcttctacgaatgtactctgataacgaaacacccgcaagaaaagaaaacattctttgaaaatgatattctgaacaaaatgccagtcttgctacttctttaaaatcaattattccatcaagattttcttcaatataatttaatgcttcattcattttttttaacgaatccatttagtaactctcctttcatcaatagaatatcagaaattacatttatccatccgactatttctgcacaattatgtaggattaattaattacaactaggtatataaaataaacatctattagtattcattatcctaaaatattattaatcatatatgtattattaattctatatttaacattattcaatttccaaagaagctttttataattacttagttaaatctacacattatagtttaaatttgccactatcctgacacattggactattataataatcttataaagataataaaaactttttttcataaattttccccctataaatataaaacaaagagtaacattcatatccccattatgatgtgttactctttatttcatttcaaataattattaaactcatacatgacttagtgatattaagtagctaaaaatcacaaattcaattctcccatgcagttcaatttcatattctatcatctattatcttaatttataacgtcacaaattagcttatttatataactttaaattgtctccttgattttcaacccacaagcttaaaagttcttttagctcctcaaccttttccttatctgtagcactttcattaggtttaagtttttcaacaactttaaactcgaaagcactttctccataagctgcccaatcttcctttaattttttagatttagttctccctaaattcagctgaaatttgattgattcaaatggtttatataaattagtacatatatctacgaaagaatatccattaactgtattatatatttgaattattcccatttctatttcttgttgtttataattatttattatctcttttttactcattttatccataataacttcctcacatttcttataatatttacttccatcatcatttcttcccaagtatccatagtctactaagtatcgtcgtattatcgcatcatcttcgtaaataggcttaataattctctttacttcagcttccgtatactctttatttggttcaaacaaattagcaaaccttggtaataatgcttttcttttctcctctttagctggaaagtttctaagttttggattggccattttactattcccatcgtcagctaactctatagctgctaaaaaagctcttgcttgtctcgccctttctcttagcgcaaatctcatatttcttactgttgattctgcacatccaagcttaattccaatttctttattactatacttgtttgacaccatttccaaaagctctttctgaatttcagtaagtccagtatatttcttatcaagcatcagtattctgtccatagggctcccatgctctgctgtatgagtgcttatgtcactactatttttacctgtatatttcccgcatatcaaacaaagaaattctgcttttttgctatcccatatgtaaccccttttaaagtcgtcaatcgttgcatcgcgaataaactctttcattttcttctccttgtctattaattcaatagacatcttatcattttaatatatatgtgtcaattttactgcttaaaattggctaataaaatatcttatagatatttcattagccaactttcaaagaatattctacaggttactacatcatgctaactcatagtcagcactattatattaaaaattatatatgtaaagaatttattgtaactgttattattaaatttcaaatgcataggagttcgtaaagagagatatgatgaaccttgtataaagaagcttatagtgccagtgttgtagtgacttaacatcaaataaattaataaaagagctgactatgtattatttatcagctcttcattaagtattttttatattttatgtttctaatggtttgatccagcttatagtgaaaaaacaacaatgttaatatattccatacaaaaccttcaaatgcataaaagaaatattactttttcttatctttttctattttgtgtctctctacaaaccttcccattaggaatgcaattactccaactccaatacctgtctgtacgcagaaaagcagactttctacctcgcctggcaattctccacctatccaagtttccatgactggcttaaaccaaggctcgtattcagtacctgtaatttcagaaactactttacttccagcatcatcagagccaccaaattcagcgcctcttaatgtgaatagcggaataacagcaattaatgccgcaatgattagtagaattataactgtttttttagtctttgacattaattttctcctcccttcactaatccaagacctgtcaattcagattttgcatatgtttcaaggccaattataataacaactgtcaaaataccttctataactgcaagtggaacttgagttggtgcaaatactgcaaggaatttagctgccgataccataaaaccgccgttttcagatggatatgcaagtgcaagctgaatacttgttacacaataagtgaataaatccccaattgatgcagccaagaaaatacctacatatttattaacttttaaagccttacataatctatatattccataagaaacaaatggacctgcaatagccatagaaaatgtattagcaccaagagtagtaattcccccatgggcaagcagtattgcctggaaaataagtacaataattcctaagatactaacagcgcttggcccaaacaatattgcaccaagtccagtaccagtcatgtgtgaacagcttcctgttactgatggtatctttaatgatgaaagcacaaaaacaaatgctcccgccatagccaaaatggtaattgatctacgattttcagacaaagtcttcttaattgataaatagcctatggctatgaatggaatgcaaatagcaccccatataatgcaaaattgtggtggaagatacccttccataatgtgcattgcatttgctgctggagctactccaaaaatcaaagcaaatgctgccgctagagcgacaattctcttttctttcttattcatttttctccccctcaataaaactttaatatttctaatattaaagtctaaataataaaataatataaatttctatttgtaatatcgctgctttttttatatgcaaaatgatcttatttgcagtaaagttccgtattgtagcatagctactcttttcgtaagtgcatagctgctttatatataagtgtagaaatttctatttttgcagcatttctttaaattcttttatacttttaggatatgattttatgtcctttaaaatatttttttctataagtgattcgtaaacttctaacaacgttggttgctttaaatttgcttgttttaaaatttccatattttcaaaaatctctagaggtgatccatctgcaataatctttccatcattaaaaacaaggactctttcagcccatctataggtaaaatccacatcatgtgtagatattaacattgtctttccctctgccccaagttttaatagaacttcttctaacatcatcgcatttaatggatctagagctgctgttggttcatcaaaaattataatttccgacttcatcgcaataatgtcagcaatacttacacgcttcttttccccaccacttaaataatgaggtggacgatcctttaaatgagaaatattcatatattctagtgcttcatccacccgttttaatacttcttctttgggaagctttaaattcataggtccaaatccaacttctgctctaactgtggatgcaataatttgattatcagcatcctgaaacactatccctatattttttctaagttcctttaaattctttttatttataacagtatctctataaatgatttttccttgttctggggtaagtaccccatctagatttaagaaaaatgtggattttcctgatccattagaaccaatgacagctattttctcaccttcataaatatctacatttaccccatttaatgcagacttcccatttccgtaagaataatggagatcttcaatttttaatattaactttctcataatcgttcctttctaagcacatgaagatacataacaaatttaaaaatcttcttgtatgcagcataacctctctttctaaaagatgctcttatataaaacatagctactttttctaagaaaatgatcttatatgtagcatagctactttttctaaggtgtatatttttcatcaagcaaatcaatgatgcaagtggatttattattttttgaatgtgcctcaccttgtaaaataccaaagtaaaaccaaaataattatgaatactgccgagaagacaatctgtatcacttctacatttttatcttcctctaaaaatacaaggtccccatcataacatcgtgattccattgcatcataataagcatttgctttcctaagtgaaatgataagcatattacttgtaatgctcccaaatgtatagcatgaagttttaaaatcacaataaccttgacgtgattttgcagaacttttcatttttgtaaatacatccattaagataaatatataacgataaataagactcattaattctacaataagctttggtacatgcgcctttctaagtacataaataatctcagaagttggggtagataaggtcatcatctgtagagcacttatagctgcaaaaatcttcaaaattaagaataccattttcttaagctgaacagttgaagtaaaaacgtagcaaaaaccaagatataaattgtactgccctattggctgttttgaaaaatcaatagcaatagtaaaagtgctaagtaaaataaaagtaattggaattgctaatattgacaggtattcagctgatggaattttccctttaataactgtaagataagccattgcaattatcacagtagcagatacatatggattgttaaatacgatgcaaagaacaagcgtcaaaactgataaatacactttaaattcagcattccaatgtctgatctttgaagcataagcataaaaatcaattgaatatccttctccatgtttatgtccaattttatgattatgatgatgaactctctccctatgagcattcatattttgatgtttccatataaatactaataagaagacaaccaccagaaacacagcacataaaataattattttttccatacctcatctcctttgattttatatctacaatttacttccacacaaattaacaattaaagtttgctagttatatatgcgtactatgccataatatgtgctttattatagcttgtctttaattcttatatagtttttatgcaaaataaaaagcccttctaacataagtgttaaaaagacataataataaaacatatttattcatataaaatatgtaaataaattttcattaaaacgccccctccatcactcgtagagtttagtcacattaaaaagataacaactcaatatgatagcttatttactatcatactttatcgtcacatgcacataataatcctctatgagatgcatctatctcgtcatctgatgaaaagttaaaatatgcatcgcatcttagacttgctatttcctttaatgtgccttttggtgcaaaacataggcaggtcttctgacttaagaatcatcatttaaatacgccttccctatctttaagtggcatccaatgtatttaaactcctctaatacagctacgggatagtttaggaatttcacctaattcccttttaattaatcaaaaatcacttaaaaaatttaattaagtaattttagttaaacctatattttatttataaaattttgctaatttgcatttatattcttaaccataacatttttagtaaaaaaaatcaatccaattttctactatatagatatcattgcacgaaggcgattactgtactttagacaaaattaaaatagttactcatgaatctagtgctaaaactgcagaatgtattgattgtaattctttcggattacactaataaagaatctatattttgactacaactttctttttaatttaagagaatagtattattattaaattcttactgaaaatagagatagcatttctaggtgttctgctatctctattttttgatatgtaatttttttgcaatgaatttctattattttatcatactactataaaaagttctatattatctatcaatcaattctttcttaacatattcattaatagtatattcttcaccttcaaatatctctgttaaatgcaatattatttcttgttcttcttctggaagatctcttattgtatctttgattgtatctatcgttacatctttcataaaataaaatcaccaccttgatgttattatgagatattatattacataaattccaaataatccatagtataaatattggaaatttgctaatgctataaatgctaatcttttatagcttggcaggttgcataaagacagtgaattaattactagtttactgtcttttgttctttttttaggccttatttaatataatgataatagctggatatcttttgtgtcatatatacctaagggattatatatcatattgtataatccctcctcataaaagacttactaaacatagatttgttaattacatatactgtcataataaactaagcttcctatattaatttattatcttttatattttgtaacatctctcatactctacaatatattaattaatataatcaacattttctcaatgcacattatttcttaaaagaaataaacagaaaatattatcacctttcatgtttattttttatataaaaagcagtagttggtgacctcctgactactgcttttgtaaatagaaaacaaaatttataagtaaaatatatacaagatcagcagatgcaaactacgtctactcactacaatattatatttatatctaagtaacgcccattacatatcatttaattttctatcacaacaatagagctgtacttcccatccttctaaaggcgggtctactacataattttcgtcaacataacttcttataaattgcgctgctctcttctcggcatattttgcatttaacacattaccgtcatcgtccatttcaattacgttagcaaagattgcatatgcttgttccatagcacttggctcttcaaatatagacgaataatcaatcccctccaataacggataacctacagttccatttgcaatccaaaatgagaaagttcttaatgcaccactaaatgaatgacttaattttttcaaacaaatacctcctccttatacatcatcagccttagccattaatatcagccaatattatattggcgtaaaacctattgtccactatttttatatttgcattgtatttttcccatattcttttagaagcaatattttcttcgttaattttagcgcttaaatattttattccttttcttttagcataatctaatattttggagaacgcgctgcttgtatatccctttttccaataataacttccaatccagtaaccaacttgagccttgtcttcttttatattttgatggctcaatgaaattgttcctatggctctaccatttagtactatcgcaaatatttctgaattggtacttatagcccatttattattatgattaataaattcttctttagatatattacgatcacttgttcctagctcagcttgtagcttttcatcattgtttagtatttctaaaatctgaattgcaaaatcatcgtctatttttttcaattctatatcatcttccataatttaatacctgcctggtttcactttaatttagtaaatttttaatctgcattactgttaaccctgttttttctgctatgacttctgcatctaaaatatccataagctttttagctatgtttattctttcttccattctcccctgatttttagcttcatttattttatctctttcaaattgtttttcagtctccttacttctccaaaaagatattgcttctgaatcagcgctcatatattcaattcccttttgtgttattttaacttccatttctctcattatcccaaattttcctttatactctaacattccagacttagtgagttctcctatcctccaaaatatatagtcatcagaaattttctcttcactatatcccattacacttccaacaattcttgcacattttctaaattcattttctgtatacttcaatatatttatatcaaaataatcttcacttacagcttgtgccctgccatccttaaagatacgaagtattgaattattatcttttaatgactcccactgattaattaaatcatgatattctttatattcaattttccttcttatttttataaattcttttagcttctcagtaacaatttcagctaccgctctgtatgtatatatgatactggtgccctcatagatcttctccgaaacatttataaaataaatattctttattttatttttcaataattccaaagcatacatcattccacatatctcactacagcattccccataccatagataaattacatctgtatccttaatgtttgaaatttccttataaaattgcttgtaagattttttaagataaccactttcacctaaacgaattctttcatcgtatttattaatactatccaaccactttaatctctcatttaaatttatgccattttggattgttccaatggaaacatcatcaggaaacactataacttttttcccctcaaataattttttctttttaacagcatgcttcaaactacctcccgctgattgcgaaaagcatatatgtataatactctccatactccacctctaataattcaatattaataataacattccaccacttgccatccatatttgatgttgtggctattattcttagtttatcacctaacaatttaaagtgaacataaaaccatatcagcctcaaacccgcatttttcaagcatattctgaagaatatatattcttctatggtaatattctaaagaatacatattcttcagaataaatatggtaaagaatattagaatattctcttcctaaaaacttaatatcaattaaaatattttgcttcaaaattaattcttcatgtcacatgagctatgataaattatactatttcttatttataatcctcactcattttttctagatttttctttcgataaaagatatatattgaataaaattcctagcgcaccaataacacccgatagaatataaatcaaaccgcttgttttttcccatatgatgattgaactaattattatacatataaatacagcccataaaaccgaaatgactatgtttataatactattgttcaaagaattttggttagacacaataagtcatcctctctaaaataataagattgtctaaaattattatagtgccaatatatagataagccaattataagttagatttatactataaaatatatcccaactagaaatgggtaatatacttttgtggaatgtttcattggtaattttgatggatgtgattctttggctataagttgttccaaatgtgctagttcaaagcttgttctttgaggctagcactttgggtgcaactttatagacttagaatcacccatcagaattacctagaaactggaacaaaagtatattattcatttcggcgagttatatgcataagttcaggtcttagttgggttatctataccaaaatcattaatataagtgtgacattgtttatagggacagcaatgagaaccaaacttatgctactctccgccaaaaatttcatagtcctatttgctccatctgacttatgaaattttcactgtaatgatctaaattagagcatgccagtatttttgcatgctctaaatatctaattgctttttcatatttcaaatcctgtcttgtcctcttctgtaatttctctaattactttacatggtacacccgcagcaattacattggctggaatgctttttgtaacaacactaccagagcctataattgtattatctccaattgtaaccccctgatttatattaacgcctgctccaatccatacattattgcctatgtttacaggttttgcataacaacctcctgctactcgttcttttgcatacgttgcatgattagatgtataaattccaactcttggaccaaataaaacattattccctatgtttatccctccaccatctaacattacgcaatcgaaatttgcataaaaattatctccaattgtaatattaaaaccaaattcacatcgaaatgttggttcaaagtgaactcctcttccaatacctttcagtaacctttttaatatttcttctctttcatgctgaggcttaccaaaactattattatattcgtttgtaagaaatacggttttttctcttgcctcaatcaattctgtcgttaaatcattatacattttaccagataaaattaattgtctctgttcttctaaattcataataccctccaacatactttatatataaataatctttgcttgccaatgcattaccattataatcaaattatatcatatattgtttattttttatcatcccttgacgttaataatcaatttgagctatactaattatgcaaaatggactggtggcagctaaagctgctgcctttttatttttttattattcatgtatattatttaaaaattatgttaataattaaaatacgtttcctattttcaataaataaagagatagccttattatcattcacatgatattttgctatctcttatttttgttatttagcaaatttactaaacaataaatatattttttaacgacagttaatatttcttatacaatctaaagctttttgctttgtattttcgcatgcttccattgctccctgctcatatcccttgcagtatccttcttcacgtcctgctttcacgccatcacaataccctctattttgtccttgattatacgcttcttccaatgcatctcttccagggtaatccattcttggacagcactcagcatcttcgctaagagttccttcacaattaatggtatacatgattccaaggtcatcacaatcacagcactctttgttactcatttttttctcctccgtaatcaataataaaattaaatatttctatttaatggtgtgaattcatttatatatttttttcatagcgcacatcatactatcattaaattatagtacataagaatatcttcacaattctatactatgtattaatttatgatttgctataaaagaaataatgaaaatatcaattatcttactaatttttatcacatttttattgccggataatatactaatggagtggatatattttcattattaattcttaatctcatactaatgtatgatatagaacattgtgtttcctaaaagagaaaagcagtagttagggccttcctctctactgctttactaagttttatcatgagaagtaatatatataaacataaaaataagcagtagtcaggttgttcctttctaccgcttattttattagaatggagcaagaacaacagttgtacctatttctgcagctattcctttctactacttattttattagaattcttcataaactctaggatcttgattagttgtacgaccatcttcacgagaaagtccagaaatgattttcatttcatcttctgataattcaaaatcaaaaatatttagattatctaattgatgctcttttgatgatgcttttggaagtggaatagcccctaattgtatatgccaacgtaaaattacttgtgaaatagattttttatgtgtttcagcaattccagcaattttctcatcttgtagcatactattacctcttccaagaggactccaagattctgtaagtataccatgttctttgttacaagcacgttgctcttcttgattaaaataaggatgaagctcaatttgattaatactaggagcaacaccagtttcttttattaaagttactaagtgttcaggcataaaattgcaaacacctattgatctaattaaacctcttttctttaattcaatcattgcctgccaagcttcaacatataaattgattcttggattaggccaatgaatgagatataaatcataataatctaatccagctctaaataacgattcttcaactgtattaatagcttctttatatgaatgatggcgaccaggtaatttagaagtaattataagtttttctcttgaaacagagcattttcttacagcttctccaactgcaccttcattttcataattaaatgctgaatcaattaatctgtaccctaaatcaattgcttctttaatcctattagctccatctataccatttagactgtatgtcccaaaaccaatgcttggcactttaagcccatcatttaatgaatattctgtaatgttctctaccataaattatcaatctcctttaagtttccaatattctcataaaatttaataataacgtttattgttcctttattttaacgtttactttattatagcatatctttgcttctttacaaaaaaatggagggcacaaaattattttcatgcccttaaaactattttatattatagaaaattaaaaactaaacagaatcaggataactatattttaattctaaatttgtattattaataatagtatctaaaaacagcttcttatcctccattgaagaaagcgaccatagaggtattactaaactttcaccattcattgtaggtataaaaatatattcttctaataaatacaaaccttttatagaattccaattatgaactttctcagaaaatttagtattagtttttattcctttttccataagctttaaatgtgttgtttcaaatgtacctattaatttatctgtttcatatattcttagaagtcttcttcttaatgatctgttaaatattttttttctagaaaagaagaatataatgtatataataataatagttacagtatataaagtacttccaagtaaaaacatcaatccaagcagtataaaagaaacaagtccaacatatgtacgaatttgttttttataaatttttgtgttaacaatatacttcatattaaaatttattaactcatcccttgaaattttaaactctatatccataatacctcctattttgtagcttattctaatcttaaagagaagcatttattgctactatttaaaaatatgttaatatatatgttgaaattcacaatgcacatttcacaatgcacaatttcagctaaaattcttgcgatatttttagaattatgatgaagaattatttttgcaatatatatctaagcaactataaacttttcttcatttttatatatgttgttttaccgtattttccacttaatattcatattataaaaatatcacttgcacaaaatacagtagaaatacatcatctcaattttcattaagtacacattttaagaatgttgtgtaggaatctaatcccataaatctaatgagtaatctttaaataagtccatgccttcattatatttattccaattcccatcattagccctatattcattactataatttgattccgcaacatctttagcaaattgaaaactccatactattttatctataattttgtgccaattttctatggatccacatttttcaggataagaattaatatttatttccttaaatttcctcagtcttggtaatacaaaatttattatagttgaatttaaattccaacattcactattttgtattttggataatccctttttctttctgaatcttttattcatatttcaaaaccctttctataaactacttgtgattttagaatagctcattaaataaaatcgcaaatccacttcctgaataataatgtttccaatttactatttatttttacttattcattatttaaaaaaattacgaatcaaacttgaccacttaatcttgtaccaatcctatcatatctggttcaagtgtaacatagtgagccatccaacagtctgagttttcagtaccaatttcatgattattaatacaaacagtatttataccatctaagccatcaagtccacaacatccgtttaatcgagatgtatcggagtgatgttttgaattaattaaatcatttaaattaataattatcttacctttagattccctatcatatcttccatctccaactatgtaaaaaccagaaggaatataatcttctccatcattctcatttagcaaattcaaattctgtatctctaacaaatgctttgttatttcaatattgcatagtttacataccagtttcatatttatgctcctaaaaatattgttattaattcgtcatagattactattcagaaccaaattcccatccatataatgattattataacatatatttcaaaacaccacacaactgctcatataatagctctctacaattcttttactaaggacatatcagaaaagtacaaaaaaatagagggcacaagattactcccatgccctttaaactattttatatcacaaaaccaacttcctaacgtatcttttaattctaaacatttgctcataggcaaattttgagtttcaacccagattccattttcatttgaattagcatagatacgaatatcttcaaaatattcttgcacatattccatgtcaaccccagcaaaactaccatctcccctatatccaattggaagatagttagttcttacatatccattagttttattaattattccatcattaaactcattcatatcacaatcagtatctataccatttacacatcctgtttcagaatattggtgcccaactctattagcaaagaaattagaatttaatttccatggattattattataattggcctcccatagtggataactagcaattctgtcatccaggttatctgtaaaactagtataagtataaataccaatttgcatatttgatatctctttaaatttagcaataaatcttaatataaagtccattaatccatcaaaattactttctacatctaacattggaattagatcatttgctttatcctttatagcattataaaaactattagcctgagtttctggctcactagtcccaaccaagaaatgataaaatcctgtttttaatccttcgcaatgtgcattggaataattaacctctaaacagcgatctttgaatgttgtaccttctgtagctttaatgtaaacagcttctattcccgaatctttcacctgtccaaaatttatgcttccattatgattacttacgtctatacctttcatatataccatcctttctactacactccctttattatttatttttatataataaaaacacttactttttgatatgctccccttataatagtcagttaaaataataaacttgacagtatgaagggaacatatcatttccgtaagtgtttttagttcatctattattatagatgatttcagtattaattttttatagttattatttagaatttctaaaatttttctatgaattttatttttcttcaaatgaataatatattcataaaattaaataagggctctttttcttatcagagcatagtaggtaagcaaaaaattattgtaatatacacaaaatatatgttcaaattcatcaaattcaagatctgaactaatatatattgttgtttaaaatggagtccaaatagctttaccattttcatcataagttttttcacttgaatcaattatatttccattgcttgcatcaatattaacatgtgcaaaattaccgtttggtgatatcccaatcacttgcattattaatttatcactagctgccccatttaaaggcgcataatatatattaaaatgatatcctattgcaaaatctttatttggtattccaggttttaattctttttgttccttggcaatctttattgcatcagttgaatcaatttttatatcagaatcgctaattgcttttctaacaaccttgtttttatcttctaatacctcagctttaccacatgatacaaatatattatactcagcattagatttagtatctgtaaaagttacattccatacagcacgagttccattagctcctgattctgctgatggctcaaccctagcatctgtactgataatctttgccagctttgcatcaggcgataattcttttacttttgtatatgctatagaaattgcttctttcattgtagtttcttcttttgatgatgtcgtcggggacgttgtttgggaaactaaatttccacgaatttttatagaagtaactataattaaagatataaataaaacacatacaaaggctaaaaggaatatattttttttagtattaagtttaaacaaagtatctcctcctattataaataccttccaaatttgatttatcttcattaaatataattacataatattcaacatcatacaacctgtttttccctaaacgtacagaaaatgtaatcaaaaagaaattaattctatatataaatatctttgataaaccaaagactgggatattgataaatgctaacttttcaatttaacaacaaatatttccgaggaaatacctttcaaaaaatcattatgatatatacttttccatcttagtggctgcctgcttttctagctgcttgatcctttgataagacagctttaatttttcctgaacaacataatattttctatgttctatatgaacaatttttataatgtcactttcttcttcagtcaatatagtaagcgcattttctatcctttttaattctcttttcttatttaattgctccttatataaagcttcttttctttccattaacttttctgcttgctgttccacgcttgaagtaatcttataagtttttcctgttctttctcccatctctattccacttattcctatgatttcttcctcaagctcctgaactcttatttctatatcttgtatgtctgctaaaatctctctatatcttcttactttatctattgtactgttcatattaaccacccctagtttctaaatttctaaaaataaacaaaattcattttgtatataataggtctccacattgaaaatttgatatatatatgttgcaattcacactgcacatttcacaattcacaattacagctaaaattcttttaatatttttagaattatgctgaagaattattttggcaatatatatatcataaacagagaaatttggtacatgtttgtaacctcaaggttcatactattaagtaggcattttaaaataagctgcttagattcttaatgagaagttgttccacttactgcttgtcacattgaaagtgagaacatgcagtaataagttcaaccttccatttagaacatttcagcgaaatttttatagtcctatagaacaaatatttattcaatttcggctgagatttatataaatttgattttgaacattatattatttaaactagtatagctagatgaatttagctcaaaagaaatggggaatgatgccacaattttggttattaaaaaccattacaatgatgcatttatatgttatgatgtaattgtaatcattcccaattccttgtttgcagagtgatattcatatatcactcctccttactcattagccttcttacttactaatctttcaaaatttccttatacctctccacaaaatagattttagtttatgcaagttttatattcacactatgatttatagataacacaatcatgaaccatacttagactatgaaatatctccaaccagaaatgagccatatacttttgtaatcacaaggctcataatatggaatgtttcatcatttcggtgaggtatacgcataagtgtagattatagttggtttatctatagatatccaatttgagaattatacttatagcttgaaaaatctgctatatcagaaaggacaggtactcttttgtgcagtgttacattagagaatatgttgcaggcatttcttcatcataagttgttccatttttgcttgtcacgagcttgtctcgggagcatgctgaaatggtgcaacttatgatgttagaaatcctcaacttattctcagtaaccgaaacaacagagtacctgtcctttcggtaagttattgcataagtctaaattttattttggatatctataaataaaactatttatcattttctactggtatgaagtttgtatctaacctaaacattaataaataaaatcaccacataagtcccttttatagactattaagttcagctctaagccattttaatttattctttattaattctatttctattcttaaattatctattccatctaagcatgtaaaataagcattttctgctacatctctttgaagtcttaattctgcaacctctttatttcctttgactaattccattattaaggtagctggatatttatcttccctaagttttaatatttcttcggcttgttttactttatattctttctctgcttgagcctttttaagccccaaagtttttaattgtgtattactcctgtttaatgctatgatgcatgtatttaatctttgtataattccttttgaatccatattatttctcccctcaactttattaattaaaactttattcttgatattttcatcatttttacttgtctcattattttcataatctaatgcattaatttcttttattagagcaaaataattttcgcactctaaatctttgttttcatttgcatagctatattcatctttcaaaacctctccccccattaactcagtacttttcttttctaagattttatttatcttatctccaaattcagcatgctttttaaaaattatttttcctggcatattgctgctttttaagcatatgcaccaatgtatattggacatattctcaccttgtataatgaacatgtagtaaaaattcattatacttttcctttcttaataatttttactatacttaacataagacgctgtggattagttttttcacctatagctagactatttcaattgaggatataaccacagctttatgcttatttgttaattagttagataacgcatgacgttttatatagagcaaggatacatttagcatgaagctacgtggagcatagcggactaaattaaaaaaggagttgttcttatgatttatattggcattgatgtagctaaagctaaacacgattgctgcattattgattcagatggtgttattattaatgattctttacgtatatccaattcacgtgaaggttttgaattactttattcttcaatactttccgtcctacctaacaaggatatttctaacgtaaaaataggacttgaatcaacaggtcattatagcactaatctccaaaactatttgtatgctaaaggctttcacctatccattctcaatcctttagctacaaatcttttccgtaaggctcaaacccttaggaaaactaaaaccgataaaacggatgcactagttattgctaaaatgcttttctctgatgatacaaaatcctattcacctgtatcatatcaaattcaagagctaaagtcactaactagacatagatatcgcttaattggttatagatctaggcttaaactatcaattactagacttatagatataatttttcccgaattaccaaagtatgtttggtctattcatcaagtctctgtttatgctctcctatcggagttaccgagcccgaaggaaatatccaattgtcatttaactaaattgacaaaccttctggctaaatccactaaaggcaaatatagtagagcaaaagctattgaaataaaggaagtagctagcaattctatcggaactagcacacgttctttatcttttgaacttcagcaaattattaggttaattcgatctgttcaagctgaaattgatgctttagataagcaaataaaggatgttgttatagaaatagactctcctttaatgagtattcctggaatctcttatacactagcctcaataattctagctgaaattggagatatagatagattcactgatccagcaaagcttttagctttttcaggacttgatccatcaacatatcaatccggaaaatataatgctacacatacacctatggttaaacgtggttctacctacttacgttgggctatattaacagcatctagaactgtttctatgcgtgattccacttttggggattatcttgcaaagaagcaaagtgaaggcaagcattactatattgctatgagccatgtagcaaaaaaactaatacgtgttattttttatcttttaaaaaccaatacttcatttgtttcacaaatttaattccttaattttccaagcaatgtgattgctttatttgtcatgcacttttttattgactaaaaaatataatttttttattaacttatattgacttcatatagttagtctcagtctataattattttcagtgccttgaatttcaactataaaatccttggtcatttcatatattctacttcctattgcttcatcaaaatttagcagtctttcaactgtgaactcacttgaaacaataagtggcaggtgattaaaatatctataatttatcagttcaaacattatatttatgtctgtttcattaacttttcctttatataaatcatcaattaatagaatttcgcaggtttgatatttgcttaaggtctttttataatattctttgtctaggatattttgtttaaggcttgtaatcacatctctataaggcatgtaaacaacttttatattatttttcaagaaattatttgcaagagctaaggcaatatgagtctttccgcttcctggattaccacaaagtagaattgaatttttcctatttgatcttatctcgtcaaaactcatataataatctgttgcaataaatttcatttttttagaagttcttgaccattcttcaaaattgctaaaggtcttttctaaattttctggatttatcccactatttttccataatcttttgacattttcaatctctaagcacgaacatggtgtcatcagtggctgtgcatgaaactgagcttttataatataacctgtatctttgcatttttcacatttaaaatggcctgtctcttgtgcagcctgcacctgcttttggtttccgttctgggattttgatattgaattttctctcacctgatttaatattctttgaagtgcgtccataaatatacttttcctccttcaatggatataatccctgccaacaattctctatgctgttttctaaaatcttaatttgtgtttcttcgtcttgagataaatcttttaatttattcaataatatttttaatcccttatctgttattggctttttaattctttctctcatttttataaattctagtatactttcaattagcaacttatttttggtaaattcttccataaaaatattattcttataattattatagtttttattattcttgttagttgttacttctttgtcagctgtttgtgatatgcttgttaattcactgttagaatgcctgatatttttctcttgctttccttggtaaagttcccagtttactatctttataagtcttccagtctttgttacctcttgtgttagaaaatcatatctttcaaattttttaagagcagttcttacattttgaagcgatattccatcaccacttttcttaactattccctctaatgaagttacaaattgacctgcttctgctttaaactttgttcctttccattcccactcccttttttcatgatttgccatacttagaatcgtaatcaatataaccttctgctctaaagttgaatttaaccaaatagccttttcaaataaaactctgtgaatcttaaaccagccctcgctcatcttatcaactcctataccatcttatagctttcgtattttttatatatcatcttacatctacttctcttcccttatcgcacatccaaaaggaatcatattcatatgtggcacattttaaaccttctaactcttcgttatcttcctcgtaatcaaagctctttaattcaatagaatctgctctgcatactccatctttataatttttacaggttctccagttacacttaattaacaatttgaattccccctgacataaaatatctatctcgataacttttgtttttcacctcttctaatgcagtcataaattttgatgcatcttttattgtctaccctgttatctttaaatctctaaatatgtcatctgttgagcatttataaatatctgcaagtctttttatcagtgcaggcgatggtcttgtccatccttgctctaacttataaaatgtacttttacttatttttaatgcttctataacctcctcactatcaagaccagagtttaatctccttaatcttattggtgttaatttcatatcttctcccccattcaatcgactttcttagctgcttgtctgtcttactatacttatattttatcagtttttccgataaaattaaaatccgtttctatcgtcaataatgatatttttatcaattatatcagccatacttatattttctctttttcccttaatcttcctaattaatttatcagtatatatgataaatatgtaaaattaataagggttagatattctctagctcttattaattctttaatcatctttatttttacaagcctcttccacttaaccatttatatgatattgtcttttagaatttaaaaattttatactttttaagcaaatcacaaaaacagcctacatatttaatgtaagctgtcagactctgtataatatggcggcaattcatatccttgccttataccaaaatctcaggcgacatggacctttttatcatttttatattccttacaatccaaaatgaaaattgatactcgcctgaaaataatgtatgtatatatattacaatccacatttcacaattacaggcaaaattcttgtaatatttttagaattatgatgaagagttatttttgcaacgtatatattttatatatttacatgggttcttttatataaaactggtattgccaatgctataaggattatccccataaaagcaggtgctgaatgaccaagtgatacatagatttgtccaccaatgataggtccaatcattcttgctaaagcctgaatagattgactgcctccttgaatccttccttgttcactggaatccacagacttagaaagcatcccattgaatgaaggcccaaatattgaatcaccaaaaccgaatacaaacattccaatgataaagagaggataaaatgatagcaaagccgatagagcaataaaagcatatcccataatctccgaacccataccgagaattgctatttgtttatcattaagttttagtaaaagctttggcattataaggctctgtgaaatgatatcttgaaagcccataattgaaaacataagtccaattactgtaggcttccagctaaaagtatctattgtaagttgtgaaaaaactgcctgcagagatccgtttggtatccaaagtaagaatcctgatataagcaacatctttatacttttcatagaaagtatgctggcaagctgtgtaaatggatttagtctcacaaaagtgatcttctctagtctatcttcattgtgaagactctcaggcataaaaaagattccataaacaacatttagtaaagttattattgccccaaaatacattggcacagaataaccaaacttagcaagtaatccacctagagttgggccaatgacagtacctacgcctacaatagcgctcacccatccaaagtatttagttctctgattactaggaattatgtctgcaaaatatgcaaaaatagtgcttatggtcccacctgttataccatctattatgcgcccggcaaatagtatccataaggctcctcctacaccaaagactacgtacccgattgctgaacccaagagacatactaagagtactggacgacgtccatatctgtcgctcaaagcgccaagtcctggagctgctaaaaacacacaaactgcataaacagatgtaagaagtgtaacaactatagcttgctctcctggattacttgtataaggctgaactaaaaatggaacgactggtgctatgatcgtaaagcctattccacaaagaaatacagatataagaccgaatattaaagcgtgtttatctataatttgttctgaactttgttcattatttgatttaaatttggacatttaaaccctcctatcaatatttgttatttaggaaaaatttatcaagttggattgatataaaatgagtaaatcatcctgttagtagttgctattttgtctcattaacaactattattaccgtgtaataacttaggatttttgaccatccctccaaaatagaggaatgagcaaagatacctagtatccttattacttggagatcccttccgaaacaattgtttttcctatatcctttaacataatgttaagatcttctctttcattagctggtccatttctcaaaccagtaacaaccggtacctctgtaacatcaaattcaagcagctcaaacatgtgcttagtataatcaatatacgacttgaatagctcaggatctggatttccctgattaaatgtaagaactagtcttttttcagctgcattttcttccttgaaatatggagagtatcgtggagaaaatcgtgcaaacatcctgtcaatgatgatctttccttgagcactcatctgcatcatataaatcggcgaaccgaaaacaatgacatttgcacggtcaattgcatcattaagcttttgcatatcatctttgataacacacccctgatcacctttatgacaggcccaacatccttgacatggtttgatatcaagattattaaaatcaaagtattgagtttcagcaccttgctctttcgcaccttcgagtattttatttactatccaggcagtattcccttcttttcgtgaactagcactaattccgattatattcatactttttcctccttgcatatcttttctatctatagtttgttttgtactttctgatttcattttaaattctcctttcgtagcaggtattttttgtttacctctcaacaaaaccatcttaacatcattttgtttacctgtcaacaaaataccaacaataaaaatgcagcctattacaaatagttttaggctgcctgttgtttcattatagatatccaaatttaaaattatatttatgtgtgataacttaccaaaatcataaatattttgattccgaaaagctatgaaaatatcgctggaggttctaagcagcaggttgtatccaccttagcatgctccaactttcagtttgacaagctaaaatggaacaacctacagctaagaacctttaacagctcattttcaaatgttttctccacaaatatatttatgatttctaatgaagatacaaacttaaattcttagcaactttgtaaatatgttcatctaataagtctaattttcaagttgtttgtccatacgcgtaaagctaatgagtattttaacagttaaatcatatattaacagttataaaaataataaaaaaagtcattcctaacaataaacacaaaaaagaaaggaatgacttttaatgaaaattaatttaaattcattaagtagtatggataaaatcaagaaaattattaatcttttttcaaaaagattaataacaaaaaccgccgtgactactggatttacacaaagaaatagtaaattggatggatttacattttttaaagcatttacttttggagtttatagtcttgaaaatccatcattaagaaatatagcaaatttttgtgaagatataaaccctaatttgaaagtgtctaggcaagctatagaaaataagctcaaggcaggttcaaactttttaaaaactattcttacaaatattattgaggataaaataattaagagcattaaacacaatcacattgaaatatttaaagcctttaatgatataaaaatctgcgatagtagcttaatcaagctaaatgactcgttaagagattcttataaaggtttttcagaagataagtcggcatctgaaatgaaaatacaaacagtatatagtttcaaaagtaagcagattgaaacatttgaatttgaggatggcacaacaaatgataattcatatatgaaaactttggcggacaaaattaacactaatgaacttctattagttgatttaggatatttcgataaaaagtgttttaaaatgcttgaaaagaaatctgctttttttcttagtaaaattaaatataatactgcactttataaagaaaattataaaaaagggaattttgaaaaagttgaaatgattgatttcttaaagaaatcgagcggtgttatagatacttatttatatgttggaatgaaacaaaataatagagaagaatttagagtaataggagaaagattaccagaagaaattgtgaatttgcgaatccgaagggctagagaaaaagcaaaagctcaaggaagatccccaaagaaaattgacaaggaactaatgagctgggttattatgataacaaacattgaaaaagagcaagccgatgtggacatgctccttgatatttataggttaagatggcaaatagaactcttatttaaatgctggaaaagctacggaaagattgaccatgtcaaatcagcaggaattgattacttaaattgtttgctttatggtagattgataataactttactaataaatacagtttattctgaattgtattttaagtataaaacagaagaaaatagagaaataagtatgctcatgatatattcaactataggaagtaaacttaaagaaatatgccttaatttcattcctaaaaaggaaaacttggaaataatatatgagatactagtaagtttaggaaggagctgtaagcgagaaaaaagaaaacgccaaactacagagggaaaattaatgagctactctcttccccctacaatttggtgattactggttaagctttacgcgtatggttgtttgtctatatagataacacaaccagaaatgagtaatatacttttgtaaccacaagggtcataatatggaatgtttcattggtaattttgatggatgtgattcttaattgaaattccaaatctatgatttggtcaattgaaattactccctatataaacttaattatgctcctgttttcttaatatatcttagtatttcaaaaaaagtattagctaggattatattttagtgtaaataccccaacattacctaaaaaaagagtataactaataaaccaatgggaattggctatttttaatatgaatgcttataggaatccatatactacagtagtcaatcctcccatgtctaactggatctaagtcctaaattcctttgtacctcttacttgtagttggatggtgattaatgctcagtgccctggtcttatgccataaagtaagtgttgcatcaccttaacctagctattatttttttataaataagattgtttagaataattatgctgctatagataaaaactgattgtgttccaatattatagtaggttcataatttgtatttgtttttgacattccaaagaaaactcttaagagtttacagcctactgctattaaagattgcatcccttttagttgattattacttcgtgtcgtataatgcttatgtagtgccttaaattcttcattagcattaatgaaaggtagtaaatacttaaatagtattgcacgaaccctcgaatttccacgtttagatattgttgttttacctttcttttctcctgattcacttattttaagatctaagcctgcataagctaataattgttgtggaactttgaaatttttcaaatctccggtttccgctaaaagcgaacctataaacattgaactaacacctttaatttcaacaagattttgagcataatctatttttttcagtaattcattaacttcattttctataagaactaacatttgatttatatttaaataattttccagataatgttttagtataatcttctgcatttcagaacatttatcgagagctatagatttttcagctatctcttttaaaagctccacatattttgatatatttcctgtttttacttcttcttttatagtacttactatttttttagaattagtatttaaaatttctctctgtgttggaaaattcttaagaatagctattgatgtttttgtattccattttttaaacaatagcttgtattctggaaagttaatatcaagccatctttgaattttattatcaagcctaactttttctttgattttttcttctctaaatcttattagttctttcagatcagtaaatccactatttcttttgtttatagttgaatatttaccaaataaaattgtttttgcaatggccatagcatcaatatgatcagtttttttattctccattcctagcaaatctctcatagatttaacatcagatgcttcaactaaaactgccatggaatttgatatcttatctacaatatagtcttcaattcttatccaataatgtcctgtaggttccattccaatgattgaatcttttaatttataagtagatttaattttatttatccacatatgaaataaatttaacccttcatagtcagtagtaaaagtaatagctttactaagttctttaccttcagaattaaatgctctcgcgacggagttgtatttagcaacatcaattcctataattaaagttgacttagtatagtgcttaatgatattatttgtttgcattaagatagcctccttgatagttatttaaatatgattgagctcatattttgattctaacagtaggctatttttttatcaatttctatttaagttcattacaggaatgctcagtgaacgaagtgagtcgagtttcctttcaactattccaaatgtgctagttcaaaaagtgatgctccaaattttacatttggtaagcagaactttctctgtgagcgcttgttctttgaggctagcactttgggtgcaactttatagccttagaatcacccatcaaaatcacccagaaactggaacaaaagtatattattcatttcggtgaattatatacataaattcaggtatctaaagtgtattaaaactagtttcttgttccttaacggaattttgctttccttgaagcagttttgctgcaatagccgatacaattggaactgtaagtataactgctaagcttccacaaacagcattaagaatatcaattgcaacaccgtttgagttaatcaattgcctaaactgtacttgataagagtacattaaaataaaagagaaaatggattcacctaggaatgctagaataagagtattactcatagtccccatcatatctcgtccaatattcatacctgaactgaataattcactaaaagacgcatcctgattttgcttctttagttcattgattgaggtagcaatagaaatagcaatatccattacagctccaagtgaagcaataataatacctgtaaataaaagatctttcacctgcagcttgctttgtccagcaatgttaagcaatgcatctgtatctgaagatgtatagccagatattcctagaatcctactaaaaataagcataattacaactgacacaacaacacctgccactgttcctaatacggcagacaaagtttttctatcaaagccacctactagaaagagggttacgcaagaagttacaatgacaagtaatatagttgccaagatatcagacacacccatgaaaagtaatggaacaaaaataaataataccgtggtcaaggtaaatattattcctagcacagaatgaaaaccgcgccatccacctactaagcagattgctccaataaaaaggcctataagtacaagcaaaggaaaaacacgatatggtgcaaacatataaacatttacgtatgatttatcatcagtagatgtattaacagacaccacaatatcctgtccattatgaagaataaaattagtatcataattaagggcattattaaccttaaaagtctgtcctttatactgcccactttctataagtacatctacaatttgtcttccaatgtaaagcccagaaaaccctgatgaatttattacctgttcatcaattgagagaaccttacccttttcataatgcacttctccaccagctcctgaactaaatggattataaataggcgtatgtgagctaaaaagtatagccagtataatgtaaacagacaaaatggcaatagatccaataattttgccccctattttaatagatgaaatccaacctaattttatattcataatattcatgctattctcctacttctatactgccttataaaaagcagtttaattttatatgacaaacagtccagtcaatattaactgaacttttgtctttttctaagttatgcttatttattatttttttgtaatagtgtagctatcaattaatgattgattaccaattgtataatcatttgctgcataagtcctgattgtaaatgtatcatcagtgaaacttacatatgagtaagatggaacatacccctgccatccaacaacactaaatgaatggtcagcacttccgccaattgtatcattattacccttgttgaagtcataatatttacttcctgtacctgaatcaagagtaaagtaaactgttcccttaggattagttacactgtctggatattctttttttgcataagtagcatttggatttgtagtgcctggtacagaagcgttgctactatttttcaaagtttcaggagcaccagtattaggatcaacagcacttccatttaacatttgtgcagtacgagtatagtagtgatcatgtccttgtagtacaacatctatattgtatttatccatcatttttgtccaagtattacgtattgttaaaactggatcatcaagttcatttttagtattgtgattagcttcgctgtatgcagattggtgccatgtagcaaccttccactttacatttggattagctttaatagcctctgctataaattggtcatgatcagcagtaccatagttatttgcattcaatactaaaaataatactggaccagcagtaaaccagtagtcaccatcatttccatattgtgtagcacctaacttacttatatttggctgattgtagtgatagccataatattcacccatttggtgatcatgattaccacaaaaagcagctaaaggcatgttttgcatgtaattcactgtagaatctggattaaagaaatccctatattgataccattgtccatcagatgaatttgaaggttgaactaagtaattatagtcgttaatttgatctcccattgaaaaaaggaagtttaagtccttattttgagtcactagtttcagcatattattccagcctgttttatcatcatttaagttcttgtgaccacctgtagcattagatttagcagtacctttagaattatcaaatgcaccaatttgtggatcaccaaaagcagcaaacgttactttatctgtaggtagtgtggtaattgtataaactggactccaattaccttgtccatcacttacagaataagagtattgtgtatccggatctaacccttttactttcgctttatttgaatattcaccagttggagcacctgctgttttcttcccattataaacagcatccccattattagcaggagtagcctttccatcaatatctgtaagggctgtctcactctgattaatagattgtgtagcttttacaacagtttgttccgcatcctgaatatctgcagaagttggaaattctgtaccattcatattagatgtacgtgaaatttttatttgtgtctttccagaagattgtgtgaaccaagcaaaatcaagctcttttggatcagaaccaacatttgcattaatattataaggtcctgtaaccttaggtaatgagaaattttcaatacctgatgtaccagcaatttcagcattaacgttccttataaaaggtatactggcagacgtagccatgactgtagctacagcaattggaagcatgaatttaactttcttactaattttcatataatcttaccaccttctaaatattttgttcttatataaagttactacttttattttaaataccagttaacttatagttaatttcactttaaatattataatttacctttaattacatatttttactaaaactatggctatataactacgttacatgcaattttattacaaagtaattataaaatttctggtatatgcccacaccaaattttaacaatagcagataatcattctagatataaatctaatttatagtttttatgtctatatagataaatcaattataatgagaccactgaaaaagtcctcatatttttgtacaaattctttgtcaaaaggagtaaaacaccagaagttcttctaatagccttataacaacttttcagaatggctaacctataaaagtgtgcaacatttccaaattagtaatacttttttgtctttcattgcctcattgtaagctagatttacactatgaaatatataccaaatagaaagcagaaacatttttatgcagcaggcatttgaaaataagctgttaaaagttcttaattgtaggttgttccactaatgcttgtcacaatgaaattgggagcaagcattagtgatgcaacctgcaatttagcactttcagcgatatttttataatcctgcgaaataataatgttcctgctttcggtgaaatattccataaatctgtttgtctataatttgaaagaaaaaaatacagcccattccaaatggaattaggctgcttatggttttattttaattattcagatttatcagacttagtatctattccaagtttattcatttctgcgtccaaatgtctactatatttttctatgaaaccaagcatagcgtcaaattgttcatcagtcacttgctcaaatacgactttatctcgctcctgaaactctttatgtagcttttcatgaatctcataaactttttgcccttgctcagtaagcctgaaatagatttccttcttattatctggcttctgatagctttctataatgcctctttgtataagcttctttgtcattttacttatagctcccctagtcatataaagagactctgcaagttttgtcacgttggaatctacatttcttccgatgcattcaatgtaatgtacttctgatgggttataccccttaagactatcttccatcttaagtttattaagccaagccatcttattaaatattttcctaaaatccattaagacctgttcttgtttattcatggcctaccctcccactttttgacgcattaacaatattatattactcttttgtttccatttcaacaatattaaaatattattgtaagaaattgaactatacgtaaaaagttatttgtatacctattgtgcttacttatattttattgatatctttttatcctcacttcttacaaatgtattgcaagtattacaattataactatttgttataatcttgaaaacattacctttttcatcttcttcatttctatccacagtatttacattcataatttctaatgcatgacatttaggacaatattcattaaccataattcccacttcctcataacataattttgtatttaaaaatattttttatgattcaaccgttttttattcttgccaaaaactacatatacttatgttgaatgtaattttcactaaactattatatttatcttaaatccaatttttattatatgacgtatcactgtttttaaaagctaatttaaaaactactcttaaaattagattcttcatccttagttcttagaatcaccaattatctcgaacaactcacaaggcttgtctataatgtaatctgcacctttttctgttagaagctctctatctctaaatccccaagtcacgcctacacatttaactccagcatttctagctgtctttacatctacttctgaatcccccacatatattgctttatcagtagtagaatctaattcctttaaagctttaattactgtatcaggggctggttttttagcaatatttgaactttctccaattgcaacttttatatattgttcaaaataaatcttattaagctcttttactgctgcatcaaatttattagaaacaattgcgagcttatagttttcctttgataaaacatctaaaagcttcatgattccttcatatgctttagttttattttgcatattttttgaataatgactgcgaaaatctgcaagacattctttataataaggattatttaagccatcaggtacagaaagctccattaaacgcccaactccgtttcctacaaagcttctaacttcttcgttctttctagatggaaaattatattttcctaatgcaaaattcacgctatcagcaagatcttcaagagtgtcaagaagcgttccatccaaatcaaatataactgtatcatatttcttcataaatagtatctccttaaaaaacatataaatttttaatttacaacttattgttagttaattataacaaaaagcaattagaaatagaattctacattaaaaaaacatatatatattgcaatccacaatgcacatttcgcaattcacaattacagctaaaattcttgcaatacttttataattatgatgaagaattgtttttgcaatatataaatataaaagaggtaatttacatttttgcaggctacctcttttatatttatattttattattctcttttaacctcataaaatacaccttcatcaaaataaagtaaagtattattgtccttgatgaataaagttattttatctgatacatttaattgcataatagaatcagtactaacacctatttttgagagattggtcttatactcactcgccatattattttgagttttgtttgtcatcttatattgtggattattataagattcattaccaaaggtcgctaagttattggacaaactaatctttaaacctattagtgatgttttttcaccaacagatacctttgcataccctgctacttttttgatttcccaattaccataaaatgatttttcatcattactagtttctttatcattgttttgtgacttagaattattatttgtgctactattgtttttctccactgcaacatttgcatctttcctgtcagtagatgagctagcagtcttatttgtttcagtattattatctgtattttttgaatcactgttagtagtagtattatcgctattatctgtagtagcctcagtagttgtatcattattggcttcgttatcattattttgtggtttttgatttccacaaccacttaatgttactaatatagctgctactgataaaataatttttatttttttcaattttattctccttattggattaactcgttatattttaatatgaagatattttaacataaacatacactgcttacaatttttatattcactctaaattgtaaaatgcgcttttgtaatattattctaaagtgtaaattatagaaataaccttcggaatctctgcaggttatttttatctctccaaacatctatctttaatcttctttagggcagcgtttttctttctaataattttatgacaatatattttctttttagctgcataatcagttaagtctatagcaattatttaaatcactataaacttattatagtcaaccagaaagattaatgaaacttgatctagctcaacatctgatattattttttgaagttcagctattttatcattattacagataatctttttagcaaatttaagataacagatgaaaacataagtctcttatatactatctcataatataattcagtttctatgatatcagcagtttcattttatcaccctaaccgttaaaattaatatatgtaattacattaactttatttaataggaaatgagtaaccctaaataaatcacttggaggttagaatatggatatagacttattagaaaaacttataatttttcagaaaaataaaaataattttatggaaatcttatcttattttaatccaaagataaaatacctaagctataaactaaaatattctgaagctgaaacagaccttataatatttctttatgaattaattgcaaaaataaaattatataaatttgtttctagtgcagatgctttaaggtatataaaaagatgtcttagaaatcaagcaattaaattatcatataaagttaatcgtgataaaaattttctcatctttaattctgaccatgaatcattagaatcatttaatgaaaataattctagcaatgattattcagatgtatttttcaatgatttaatttcatcattaaaacctagacaaaaacaaattgtttattataaatttcatatgcagctttcagatattgaaattggtaaaattctcaaaatatctaggcaatctgtaaataaatctaaaagagtttctttaaatctactaaaaactaagttatatatggagggatgatattatgtatgatgatcttataaaagttgctatgactcaaggaatttggacattactcagttgtgtgcttatagtatacatattaaaagcacaggaaaccagagacttgaagcaggaagaaagagaaaagaactatcaggaaataattagagaacttactgataaattaaaccttttagattcaatgaattcagccttaaatgaaatcaaaattaagattaattaaagtttactttttagattttcttaagatatgcccagttatttctttgagatgtgcattaaaaagtgttcaataatataaaataaaagtatataatctttaaattttatggattatatacttttattttcgtgtaagcataatgctattatgtttatttttgtcatatatttatgtataatataatttaaataaacttagattgaggtgatttatgattttaatatttaaatatttagatattcttctattccttgtttttttctgtatttcattaatttttatgataaattatatacaatcctaccgtaggttagttggagataaaaaagctaatttagtaattgattcacatttatgttctaataaacactcatactttatgtatatctttattatatttcttataataagaaatattgcagaaagcttttctttatacttactgctaagtaattgtattcttatatttattattatcttgtgcctatttttatatgataaagttgtatctaaaatgtattttcttgaagatggaatttttattggaaataaattcattgaatatatcgatataagaagtcttgattttatggaagagaaaaaagatgttttcattataaaaatatattatatttttttagaaaaagattttactgtttcatataaaataaatcatgattcaaaaagtaaaatcgaggattatattaattcattgagtgttaatgttaatattaatgagaaatagataaaactattaaatccactctatctaaaattcatagagtggattttttattatagataagccaactaaaacccaaacttatacatataactcgccgaaatgaataacatacttttgttccagtttctatttggaatatatttcataatttatgattgtgttatctatataaatataaatcttcaaaactaaatttatgtagcaacttgacaaaaccgtaaatattttagtccaaaaaactatttattccagttattgcttgattcatacttatttattctttaaaattagtataatattgaatattattgtaaatttgtatattagatataaaatgggggatcaacatgaatgaatttatctgctttttggaaaaatattttttcctagcgctttcaatagtactatttgtaaccggctttagctgtcgtttcaatttatcaaaagctattacttcttttaaaattaatattactaaaagaaaatatacaataatcgatgaaaaagaatacttaagatttgagggaacttacgatttaatcataggatgcttatcttttattatttttttaatagttacattaaaggaagacttgatttttcctgtgctaactatagaggtaatcatcataaatattattatttacttttataataatctaaaaaaggactttctacaaaataagtaatcaatagtttacaatataacaacattgtttctatgtaatgtgaaaaattttaattctgttgaatattccatttaacttatgcaaataattattaatgaagtattaacttttcaactatggtaaagagatagcattttagattaccctgctatctcttttttattgtttattaaattttatccttatttatatgacacaataattttgaatatttttttataaataacatataatactcttgtaagatagtagtaatttaatttcattaaaagtgaaccacctgaataagccctcatttttaagggcttatttttgtattattaaataagtatttattctgcatatatatattaacttttcacataataaaataaataggttaattatacattttgattaagaaaggtggatgattttaatgaataaatttcgtatggcgatattagctttcttattagtattatttactacattaacctccactacttatggcctatctggtaaaactctttctcaagggatttacagtgcaagagattcaaatttattaataggtactcctatgacagttaagattgattctcctagtggtaaggccattatctttatacttgattctgattattcaatgaaggaaatggtaaaattagagtctgagtctactgaacatactttaaagccatttgattatggctctttaatcatagttgttggtaattcaagtgttaccttcttctaaaaggcactagaaatagtgtctttttcatatcttaaaatttatttatagttttatatcttatttatggaaacttatagcatcaatactattatacacacaataatattaggcattaatataaccaataaataatttactatttttgtctttctatttttatcatcttttccttcacttagataattagctaagtatttatcgccactaacaaatgaaccatttaaaatcccacatataacaatacaaaatgcacttaaaaaaccagatatttttaatgttatattataatcattcattaaaaatcctaatatatatgcaactatcgcaataattaaaccaatagtaaatgataccttcaaaacatttcctccttaagaattctcatatacctattaagaataaacattttaattttaatcatcataattacgttttaatataatcgctattatgcattattcatagtaagtatatcccttcattttactttgtattactaatatgagatttataaaatgaaatcctccaattgataatataacaaaaatattagaaacattaaaaactattattactattccagctataataagatacgctgaatttaatattgcaaattttaattgcatcctaaaaaattctctaggttttataattgtcattgctgtttttcttgcaaatcttttattgtagtaagtaattttatctctataacaaatagaatatattaaataaactactccaattaaaattggtaatataccaagccaattcatctcaaatcctcctaatcaaaatgctctattatagataacgcaactatgatctatacttatgcgtatacctcaccgaaatcataaatattttgattccgaaaagctatgaaaatatcgctgaaggttctaagcagcaggttgtatccactttagcatgctccaactttcctagggaagctcgactcattacattcgctgaggaagttcaagaacgcaaaataaaattttggactttcacttcacaagctaaaatggaacaaccaatagcgtaaactcgactcacattcgttcactgagtaagcgattctcaccaaatcaaagatttgggttctctgcttaagaacctttaacagctcattttcaaatgttttctacacaaatatatttatgatttcttgtgaagatatgaacttaaagctttagcaacctttttaatagccatttcgtactctgtaattccacttaagactttaaattcttcattatcaataattgcttcaagcattttctttctaattattttttgttcttcaggttttatttctaattcaactttattaaaataaggattgctgctgtagtcatatcccatagaaattacttcttcaatataggttttaaaccatttggcagcagcttctttatctccaatttcaatatataattcaacatatttgcatgcagctgatcccaatccaatgtgaaacatatcttgaatcttatggcatgcatctaaataaagcattgccttttcataatctttttctttctttgatgtctttgccattgtaattagcataaagatactattgtttagataattcaacaatttattgctgcaaaattttttaatttcttccttctttccctgcttttcaagaataactgggtatagagttactggatccaagcttttgggaagttcattaagtgctctttcgctttcttcataatttcctaaaatcatattaatatgagcaatgaaaaacatagctatttgcatatatttaggatctttactttcagctaccttattaaacaaatctaaagcttcttgtctttttgtttttataaactcttctgaatcatcctcagacatcataaggtatgtgttaagtaaccctgcaacttcgacttttaaatgaatactgtttggatattcacttagatatcttttacattctttctcaccaactgcatatccttcatgaagaaatagttttgtgagctttgattttatattattaacttcttcttcagaaagttcttgatgaaatgataataatgtatcaatagttgtgcttaaagctctggctagaggagctaatattgaaatatccggcattgaatttccattttcccacttacttactgctcctgctgaaattccaatcataagagctaattcctcttgagtcaatttcctttcttttcttaactttaaaattgtttctcctatatttaattcgctcaattctatacctccgatatttagaattcaaaatgccttttgataaatttattataagtttactttttgcaacaaacaatggaggctgattcatatttaagttaagaaaacttgaatgatattcaactttaatttatttaaaaatatatagatttcatgaacaaattctattaaaaattactatgcaatacttacttaatgcattataattgtgctgcacgaagttttttccactttcgaattttgctgcgaaaagatttaaaaggtgcaacagtatttatatgaatccatttccaaactggccaattagatggtgttgactgtgcccactttctgcctccttgattaaataactcattctcattaaaatcttttatccatgaaataatatcatctacatttgaaatgtacatttcctttaactctgctaaagaatagccattatacttagcataaaatctttcatataactttcctagttgattccatttaaaatctttatctggtgttattacttcctttccagctaattcatcactttcccagcttttaagcagctccatccacccaagttgatatgcaataatttgtccaggtgctctatcaactccttctataataagattcttatcactttctgctacatcatcaaattcctttataaaaagtgttgatgtcttttttatttcatttatgaaagtttctttatccgcatattgctccataactacacctcctattttgtataataatacagcataaaacttgacagcatcatgtcatattaattaactttactaaagtattaattagctttagtaaaatataggttaatataaacaactactaattccatgtatataattagtttagctccttcaatggctttttcatttatattttggtgaaatctgtgggtaatttctaaaattataagaactatatggtcttaactcagatttccttgtgttgttctacattataatttctaatccttttcctgtatccctctaagatcgtagtattgctatttttttatacctattttaggcatgactctatataatcaactggcacatccatcctaatagccgtttcttctacggatagaccactatttaagaatctttttacgaccatgactatattttctccaacttcgataatatgcttatcaggatcataaaatctaacaacacgctgcccccaagaatgttctaccataggatgtacataattaatatctgagttgctgttaagcttttgaataaagctgtcaaaatcatcttcctcaaaatataattctgctgcatttccaccaaaagcaatttcatcattctgtttgcctataaatgataaccaagtatcttttgtttgtaatgcaacaccaccagtcaaagttacatttgctccaaaatcaacaacaacctctaacccaagtacttcataataaaatttctttgatttctccatattagaaacaactatcattggatttgaaaacttcattttattcctctcctttagctagctttatctcttctaacctttcctcagctgctttaattgcctgagttcctgttttgcaaagtacatttattcccttaacaatagttacaattacatatgcctctactaattcttccatagttaaacctgcttctacagctgcaacagcatgtgcctttgctccacttacttcatcatctaaactatccaatatagtaaaaatcaattctcttgtttttttaggaaggtgtccattttcaattgattcacgcattgccaaatatccacttaacccatctggcgaatatttagaaagtgcatcagcaaatggaggattccatttcaattcttccttataatatttaagtatactttcaaaatccttcataactaaactccccctcattttttattttcttaagagtattaacccaaactatattttcttaacaatataatcaacaaatccttgtcttactttttcaccttcatccattctttctaataccctaatttctttatgcaatatttccatatcttcaaaatatgtatctggctcacattcctcaaaatatgaatgtattacaggagcgtttctctccatttgctcatattgattttcaccaatagctaaacctgttccataacgtgaatcctttgtggtaagaaaattcacaaaaagtaatcctctaggctttaatacacgtttcatttcctttattgattttaaaacatcttcttttctcatgtgaaatactgaattatacgaataaacaaagctaaatgtttcatcttcaaattttaaatatctcatatctccgtgttcaatatttaaatcttgatttttatcatttgcatacatattagcctcttttaattgattaatatcaaattctattccatgtgttttataccaatattctgaaaacaagcttagcggtggacaattccctcctgcaccacaatctagaacaactttatccatagttgtttcattacagaacatgataaatctatacaacggtatttgcctaaatatttcattcattttacctagtcccttctattaaaaatattttatacaattactcaatttagcattgctacagccttttatttctcttaaaatattctgacattataactaaataataacatatattacaattataaatcatttaaattttattaagtttaagtctatgtgctgaaatataaaattatatttttttacttaaaatctttagaaaaccaggtgttcgattgaaactaaaatttagaaacctaattacaatatatatttttaatagacttcaattaaatttattacattctttgacacaatacatctatatcgttcaaaattctatgtatttcagatcgaatagcagacattttataatttattttggcatattttgtttaaatttagattaaaatatattctttagaaagaaggaactcttaaatttattgagaattttaaaatatagataaataaatataaaaatattgatttatgaggggtgtgtttttatgaattttaattttaacactagtttttctatggagtttgatgctattgacaataagcataaagaattatttaatcgagtcaacaaacttctttatgctttagaaaaggaaaaggatagtaatgaaattttaaaagctttagactctgttgaacattatgcaaataataattttgatgaagaaatgacccaaacaaaatacaactgttctgaacttaagatgtgccacagaaaacttaatatggaaataagaaaattaaggtattcatttgaaaatccaggtatttcatcattatttactcctctaatgcagaaggaaataatgaagtggaataaaaattacataattggcttacataagtattcatatgcatttttaaacgagaactcttcatctgctgctaaagttaggttatagcaagatgatttagctgaaatattagcttggttttttacttcttcaaataataactacccctgcatcgtgtttcacggcacaggggtagtttctatatatcttgtattagtttgcaacatctcttgttctattcttataataattttacttcctaactttaaatatattatggaatatcccaattaaagttaatagtttgcattatcagtccccattactgactttcaccgattataacacgtgcccatacgtgtacaccaaaaatataacaagaaataaaatttccaattatataaaatatcaaatattcaatttacaccagttgttctacattctccttcgttctgttaatttataaggaaccatttaaatattaaaaaagcaagactaaaatcttaacgggtttacttaaagggtgcaaagtcaaaaaatacaataataaaagagtgcaaaattacattgatttttgcactcttttatttgggcttaaatcaatggtttaaaggtatttgtgtaataatttatattaatttttacactaacttttacagaagaaaaaacaaatgtaataaattcattacatctgcaaaaatgcttgtaaaaacatctgctacaagtttcggtaagaaatacagatatttagtttttgaaccctcatacctaaaagggcaatcaaagatttcctctatccaaatgaaccattgcaacaatcacttttgtaagtggtttggactaccacaacagaagtttgataatgttaaaattgaacatactatgccctctattgatgaagagtacgctatgtagattgtataactaatttatcagataaatccccaattgaatttgccgactacttggcaagagtaaatagtcactcaataaatgctttctttaatcagataagaagaagtatatctattcttgaaagaccacttgttacagcaagaggtgagggtaagagttatatttactctaactataacccaaagtatgcccaatattctataactatattaagaacattttataacttttgttggactttcaagagtggtaatggtgatgtgctaacacctgcacagagaataggaattactgataagcagtttaactataatgatataatatttttcttaatacttatttatttcattatattggtaaaggttgaaaagttagtctataatatagataaacaatagtacaaaaatgtgtctcaaccgaggaatatattataataaatgttagtatgaaattttgctacaggttttatgtatttttgacaggaggtattggaatgaatttgcgtgaagcagaagaaaaggactttgaaataatatacatgatgggttatgatgcttggggcgatggtctttctaaaccagattatcttttaacttgtaagtcgtctattaagtatgcaaatggaaagtggtatgtattagaaaatgatgataatgttttatcaagttcgttacttatacataacttaaatcatcttaattgtggtactggattagaaataagaggaattggttctatttctacaccaatacatttaagagggaaaggttatgggtcaaacttaatagaaaagactatgtcatatataaatagagatattcctatagatatttggtttttatattcagatattggtgcagatttttataataaacttaaatttgaagcattacccaataattttcaaaaacgtacatcaagtcttttaatggcttattgtcagcctaatacttgggatataaatactaatgctccacagatagaaatacctaattatttttaataaaaaatgttacgcacttttctcatattgttcaacaataacatattaaatgaaaaagcctatgctaaaactaaatttaagcataggttttttgttgttaattttcttgtaaaaattactgcaaatatttgttttgcacccctaaagtaaacccgttactaaaatctagccttgcttttttaattcatatagataagccaattataagttagatttatactatgaaatatatcccaactagaaatgggtaatatatttttgtggaatgtttcattggtaattttgatagatgtgattctttggctataagttgttccaaatgtgctagttcaaaaagtgatgctccaaattttacatttggtaagcagaactttctctgtgagcgcttgttctttgaggctagcactttgggttcaactttatagccttagaatcacctatcagaattacccagaaactggaacaaaagtatgttattcatttcggcgagttatatgcataagttcaggtattagttgggttatctataatcttttatataaattactctcttattaatatgttcaataactttacatcagttaatgcttccattccatattggatatcagcttccaatgcaaaaatatcaccttcgcttattattgattcgtcattttcattgtaaacaactttggcttctccttctattacaataaatagagattccatttgataatattctttatcaatgctttctccttttgcatacgaaaagaatctaacttcatgtttttcattatctactaaagccttacttgctattgtatttcctgaatgacttatcatatccttcattttaactggttcaaatggtttgatgtttcttaaatacttcataagcttaatcctctttcactactattaatagcatcttcatatcttcttttgctgttacttgatgctgaatatttgcaggcataactaccacttgacctttgtgagcttccattacttcatcaccaatttttacagtagcaactccttcctgaataacaatcatagcatctcctttagctgcatgaggtccaactccttcaccttttccaaaagctaatgcagtaagtcctacacctttcttttgagccattgtaacagtttctatttgaccttccttgcagcttactaagctgtcaaaatctattgcctttgatttttctatattcttaattaattcttgcatattacattctccttttcatttttacatgtaggtaaacaacctctctccattgatttatattttgatacatagatagccatactagaaataatagggactcttttgtgcagtgtttcattgagaattttgcagtaggatttcttcagtacaagttgttctatttttgcttgtcatttgcttgtcaaaggagcatgcagaaatgggtacaacttatactgttagaaatccacagtgaaattttctagaaaccgaaataacagattccctgttatttcggtgattatatccatgactctaaaattcatttagtttatctacaggtaagctgtaaatgtctctattagttcttcattatttttgtttatattgctatcaaaatatagatctaatacaggaatttttatttcttctttatatttttctcttagtatttttagtattgtagccgtattttcatacattgagcttacaacaataatcccatcaacattttctgctgttagtaatttagcaaatctatatcttccacttcctcctgcataatttggaagcttatcttttagtatttcattaagactatcaatatccttattaaatggagatctttcttctagaatcaaattaactttattaataatcttcttagcttcatctactaattttaaatattgtttattagtcttatttctcttattgctaaaatctttatatagcatatataattcttctgcaaagggctgctttacaatatcataattttccattagcctttttatgagattattatttaaataatctttatgcactaccaacgattctccaactataagcagtttctttttattttcttttaatatctcattgtttaggatttctaatttttcatcaaaatatgagtctgatatattattattttttattgctttaatcaaatcatctaaggatgtttcttttttatcctcatgtaatctattaattagatcgcctattaccaatgctttaaagaattctagaccaaaatctttatctcctaagtaatcttctataaatggcgcttgaagatttaattttctgccacattctaatgctttatattgtataagcttcccatactgcccaaaggttccacttccttcatctgtaggaagatataatgtatattctttttcactttctttaactttacttatgacttctgatattaaaccagttagtgagaaatattcttttcctcttgaaaattgctttccaatttcaattgtgctttcacttacaggttctaatattgtaacctttgtattttttctttctaagaaagcttttagtatatcgctatatggatacatatgtgggattatcaattcattttctatttgattctcagagttttgaagtttgttatcaaatttaacttccttagccatttcaagtttcttactaaaatcatcttcagcagcttcttcaaattttctagccgcatcattttgacttactgctacaaattctttagttaaattaacttgattaagttcacacaattttttatctacattaaaatccttaacttcttcaactttattttctaaaagatcattagtattacaatttttaattgaatttataaatgcttctacccttgtaattactccaacttttgaagaatgttcatctacttctatatgcaagtatggcttacttcccatctcctttttgaaataatgagtaagaattgtatctggtccgcatccatgattagtaatatatattggatataaatttttatgatttcttataatttttgctccagttattatgtgctgtccaaaaggccaatacatattagaatattcttcgcctatattcatttcagaagcttcaagatgagttaaatgaagtactttatatccacgcttttttaattcattttctatgcccatgtttaatgctggatcaactatgttatatactctgcttatcataacaaatactttttcatcttcacctatattctttaaaacatccgatccaagtgactcaagatttttctcataacccataaactttttcatgcctgacattaccgctgccgctgtttctattttgttttttccaagatcttttcctatacttactaaagttttaatcatatattgtttaccaaaattaaatgataatgttggagatattaattttatatttttttctgctaagttaaacacgctttcaattatctttggtgaagtctgcatatacacacatgcataatcttctctcacatctgaacctgcatgcttcatagtgtataaatgtggcaggaatatataatcaactttcctctgtagaagccacgctacatgcccatttatcaatttaactggaaaacatgtttcttcaaaagaatactcttggctaaggcctattatatcttcattagttgcatctgaaagtaaaacattatatcctaattttttaaatatctcattaaacatcgggaacattttattaagaaataatactcttggtatccctattgtttttttattagcatctttatcagttatatatccgtctaagaagaatttttcacctttatttgaataatctatactgctattttgtttcttatctttctcgttattctttatactttcctttgttaaaactgctgttcctaaagcacctgtaacactaaagaattctggaacaataatttctttattaagtaaagctctaaatgcatttactactgcttgattatgagcaattccaccttgaaggaatattttatttccaataggtctatttccaacaaccctatttaaataattttttactatagagtaagcaagtccagctgaaatattctcaatactttctccttctcctattgctttacctatgtttccttcaataaaaacagtacatctatcgcctaaattgcaagggttctccccttctaaagcaacctttccaaactcattaatacttattccaagcttcttaatttgctcttctataaaagctcctgttccagctgcacatattttattcatctcaaagtcttttactaatttattttctatacatatatattttgagtcctgaccaccaatttcaaatatggtatcaacatcactacatacatttatagctccttctgcttgagctgtaatttcattcacaattaaatctgcattaattaattttccaatatactctctaccagaaccagttgtacctattcctttgaacttaaagtcttgtcctaatctttcctttaatatatcaaaatattcagtaacaacttcttttggttttccattagtttttgtataaatataatcaattacgttgttatcttcatcaataacaacaaaattgatacttgttgatccaatatcaacgcccaggtaaccttcttttaaattattatttatacaagtatgcttatctaagctatcatttactccgaatttatctaatttttcaaataagctatttttaggcttttctataattaatttttcagaagagctaagtttatttacatctatagttaatcctttttcttctgctatcttgcaagcaccaaaacatgtaagtagctcaaaattttcttcaattataatgtctccgtcttctaactttaatacatcttttaaagctttaactactcctctgttatgtattaccccaccagaaagcataattggtttattgagcttatttttttgaagaacatttgctttataatttctaacaagtgcatggcataatccttgtaatatatcctctacttttaccccatcctgcatatgatgtatcatgtcagtctttgaaaaaacgctgcatcttccagctatccttggaatttctgtagctttttctgtgtaaagtgatatatcttttatatctatagataatcttgaagcttgctcttctaaaaaagaacctgtaccagctgcacagcttgtattcataaagaattttacatttttaacgtctatatctgtaatgtattttgtttcttgtgcacctagttcaataatagatttaacactcttatttttaaataaagctccttcaataagagaaatactgttattaatatgatattttttatctaaattaattcttgatgataaacttcctgttatcccaataaccatatttgattctttattaattgctttaatcttctcaattaactcactataatatttattaatatttcctttatggaatatataattactttcaattaaattgtcattactatctaagtaaacatacttgatcgttgaataaccaatatctattcctaacttattcatatcgcccctcctttgatattaattctcatttacttcttataagtattatattatactttcactatagactccgtatcatatgatacgctttaaaagaaatttatgaggagtctgatgtcagatttagataatttaaatatttcatgtacttctgaagtccaaatgattgaagtatttataaactaaaataccctatagagttgacttttttatcgtctattctataggataaaatctaattatcttatgatccatcaactattaaaaataaagttttcactatgccctttaatctgaagtattgctcaatcttttcgtcaattaaacaaaaattacagggaatgcgattttaaattccatatttttagttaagactagaaataaattatgcaaattaatcaatagttagctacaacaatggattatgccactatctttcatctctataatcacaatcacaagtacgagctggtggaatactctgtatgaagttgaaaacattttccggatcatatttagctttaattctcctaagtctagcaaaattatcaccataatattcatgaccataatcttttatacacaaatctggtacatttacatatgatccagttatatacggctgcaatcttgcacgtgtcttctcaacaagcataatattctctcgtgcttcacctttttcaatccatgatgcatcccattccaaatagtatttagtatttctccagaaaaaggctgtatcctttggatttacactattcatagcgcctccagagttaaggaaaaagaaattagattcgcttccttttgctttctccaagaaacttcttattgcttcaattcccttttcaggtagagtttgctcaacccaggcagatgaccacgtactcttctgctcatcgaagaaaggttcatttggagcccagaaatctattgcctcacttagtgtaaccccatcaacaagcacctttaaaggacatcctacttctatcaaaggtcttatcaatttcctaagttctgctttagttccaaggaataatccctgcgaacggagaagaccatttgtttttgaatatatctccaatatggtaccaagtcttacatctacaaacggagaccacctttgccatgcatcaataacttcatctaattgctcccaaggccaaattatttgaaatattcctacttcagcaggagcacgacgtattctaaatgtgtatgaggttataataccgaaattacctcctccacctccacgaatagcccatagtaaatctggattttctttttcgctaacgtgcataatctcaccatcagcattacctatagtggcagctaaaatattatctgaaatcactcctgctgttcgttgtatagccgtaattcctccaccagtacttattccgcctataccaacagtagaactatctccaaaaggagcaaggaaaccttcctttgctagcatcctcacaagaacaccaacgcgtattcccgcttcaactgtggcaactaaatttgctttatctacctttactcttttcattagaccagtatctattacaattccaccatttgtttgtgaaaaatcttttgctagagcatgcctgccgcttcgcatcctaattggtacatcattctcacaggcccatttgactgcattttctacatccttattattccttgcaaaaacaaatacactaggaaacgcattggtgaacggattccagttcattcgtgcttccctatattcaggatcatttggacggattacctttccagttaattttgttttgcatttcatatagtcaccctcttttgtaaattagccttatataaaaacaatgtatttttttacacaaagcttgttatattttataatatgaacttttatagaattagtaccaccttttgactttacatctaacataatgctataaaaataatacgagtttttgcttagactgctgtgaatcaaaaaggcaagtaccctcatattttcccctataccttttcacaaaaaggagtatacaattttcattaatatgtaattcaacatgtgactttttcaaacttattatgatctgagattagtcttttaaattcgccaccaagtgaatatttctttattctcttttaaaatgcaaccttccgaataagcttttctcataattaatcccctaacgaacccaatgatcacatgattatccatcgatataattttctagagaataaataaatcctcgacaatactacaattaatattgtcgaggatttgtttaattaacatgatgtcttcctcttggtactataaaaggtgaattagatactggatcttgtattaccacacaatctagcccaaatactttattgattaattccgaagttataacctttgatggttcacctttcccaattaattttccctttcgaagagcaaatatataatctgcatatctggcagataaatttatatcatgaagcaccattacaatagtagttcctcttctgcggtttagatctgtcaataaatcaagaatctctacttgataagcaatatcaagatatgtggttggttcatctagaagaagtatatctgtctgctgcgctagtgccatagctatccaaaccctttggcgttgccctccagataattcatctacactacgattagcaagctctgttatccccattatttcaagtgcctcttctacagcatcaaaatcactttgatccatgctttttaaaaatgcttgatatggaaatctacctcttgaaactaaatcccagactgttatcccttctggaactactggtgattgaggaagcagtcctaaaacttgtgccaattttttagaaggcattgaagttatttttttaccgtcaattacaacatctcctgagattggctttataagccttgcaagtgtttttagcaaagttgatttaccacatgcatttgctccaataataacactgattttattacttggaatagttatatcaattccatcaactataatctttttttcatacccagttactaaattttttgcttcaagcaattgttgtttttcattcattatgcttgcccccttctgtttatagttattagaagcagcagcatatatggtgctcctaaaattcctgtaattacacctacaggaaatcttgtactaaatacaaactggccaatcatatctgctccaagtactaataatgctccagccaaacctgatgctaaaacatttggcgaacctaacccaactagtcttgctgaaattggacctgataaaaatgcaacaaaggctataggccctgtaatagcagttgcaaaagcaattaaaaatactgaacttaagatcaatgctattcttattaaatttattttaatccccagtgttgtcgcaaattcatctcctaattctaatatttgaagatgattagttaagcataaaataataactccaaatataataacaaccacaagtaagcctggaacatctttcatgctcatcccatttaagcttccatttaaccatgtgagtgcttttgaaacatcatgttctgaagccttaactagcaaaaatgatataagggcatttaacattgcttgcattccaattcctacaagtattaatctgccacctgaaaatcctgtgcccttagagaacatatatataagtcctgaaaccaaaagtcctgaaatcacagctgctatagaaacaccgcttccactcatatgaagaactaatatacaaaacactgctgcaacactagcccctgaacttattcctataatatcaggactagctagcggatttctaagcatagtttgaaatgtgtttcctgcaatcccaaaggctagccctgctaaaagtccacaaagcattcgtggtaaacgcaaggttcctatagtaaatgtagcgccttgtatctcttccccactaagtactcttataactgtacttaatgaataattagtcttaccatataaaagcatagctgcgcaaagacttaatgttaaagcaaagagaattatattaacgctgatcatgcgtttttttctttttatataaccttcttttatcatagagtgagtagtttttatcatatagccctcaccttcgctttccttgcaatgataataagaattggtgcacctaaaaatgcagtaataattcctacctgaagttcacctggacttccaattactcttcctaaaacatccgaaatcgttaaaagcaccgctcctccaatagctgacataggcactaaacctcttaaatttgaaccaaatatgagacgtatactgtgaggaatcattaaacctacaaatcctataggtcctgcaatggctgtggttgcaccgcatagtataacccctgcaattgcacatataattctaatgatccctatatttactccaagaccagttgcaacctcatctcctaaagccaaaatatccaatgctggtgctgatattatgcttattattaatccaattattaaaaatggtaacattaagccaatactctcccaagttgcaccacttacacttccgacctgccaaaatctatatgcatctataacctcacttctaggaagtattactacacttactaaagaggttaaaactgcactagtagctgagcctgccaaagcaagttttataggtgtcatacctccgctgccaatagaagctatagtataaacaaatattgatgtgattcctgctccaactagtgcaatccagatatactcgttagctgaatttatattaaaaaatgctattccaattacaacaaataaagatgcacctgtattaactcctaaaatgcttggatctgctattggatttctagtgattgattgcataagagctcctgatattccaagagaagctcctgccataatgctaaaaattgttcttggaatacgttctcgaacaactaatgcagcaaaagaagtatcgtcactatttaacaaagcatttattgcttggctaattcctatattttttgacccaaacgccagtgatattattacacatatacctagtaaaaaaatactacctaaatatattcctactgtctttctaaatctcattatgctttatctgctgcctctccaattatttttagatattcatctattgttgctggaattgataaggcagtaggagtacaagatgctgcaagtgctgatccatcttctattacggcaactgatcctctttttattgctggaactgttccaagtagggcatctgattgcaattgttttactaatgtgtcatttccatacgttactattacatctacatctgttaatttatcaatattttccgaactaatttcaagagcaaaactgactgaagtttgcgcaagctttttaacactctctggtaattctaatcctaaatcagttaaatatgctgctcgaggatctgttggaagatatatataaaatttacctaagtcagctggattaaagtaacagaaaacagcctttttgcctttaagtttcggatactcactagttttttctgttatttgcttttccaaatctgaaaccaatttgtctccttcatcttttttacccattgcagttgaattaattgatatttgatcacgccaatatgtttgccaaggaagtttaggatatgctacaacaggcgcaattttacttaacaaatcatattcctcttgcgttattcctgaatatgcagctaatataacatctggctttgcattactgatagcttcataatctaaaccatctacatcgtcaaaagtaacaggtttgtccacacctaactctttatatttttctgctgtccatggcaataaaccattttcatctgcttttccatagttagctttagaaactcctgctggtacaactcctaatgctaatggtacgtcttgatttccccaagaaattgtaacaactttttctggttgcttttcaattacggtttcaccaaaagcatgtttaatagtaagcggataagttacagtcgcactttgtccaacattagatttatcttcatttttagccgctccacttgagcatcccgttattaataaagtacaagcaagaataatcgtagttattccttttaatttcatgataatcctcctaattgttatgtattttattgaattaatatttatttgatttttatattcaaatgataatgtttttcatttgctgtcggtatttattttatattcatcagtaaaatttgtcaaccttacattggaggacattatcttgaaatttatggtaatacttattaaataaaattattttctttatgttttgtaaagactttgccttcatagggggttcctagaaaagaacaaaatcgcaggagactgtgtttaagttccgtattgtgcttcgcactcttttcatatgagtagattttttcacgcatctgccttttcgaacgcatgtgagaaaaatctgcacatcagaaatggcagctatgctgcatataagaacattttatgcaggcgaataagatttcttttttattctttttttaatacaaaaattagttaatcaaccttttttaagttataccctcaaggagtacctggtctacagattttattagaatataaattcctaaaaaataaaaaaatatttatgataaatccttgttttaattgcgtttctaaacagcaattaaaacaaggatctatacataaatatttcaaaacaaaattacataaaatttattattaatgcacaagttctttaagcaataaaacttattttttgacttaactaaatctcgctttaagacatttgataaattaatttaattctatagatttagaagtcctcttaatattaagttcagttaccattttatttgaaaacttgtccatatttataaaatacattacaattaatccaattatggtaaatacaactcctgagtatataaatgaaatattaattgcctttattgcagctcctgtctgtacagtcgctgttccattatattttccaaagtcaagaatccatccgagaattgcagtaccaaggccaccccctaatttcattccaaaacttacacaactgttaattaatccatctgcgcgtataccagttttccattctccataatctacagcatctgcaacaattgcgaaaattccaactattagaggcgccataccaaacccttttataatacttcctgtcataacaagctcataagaagcaggattaattgccataataataacacctactaatttcactagaaatccaaacatcataactttccatttaccaaatttacttatgaacttaggtaaaagtgcaaatccaactatcataggtgcataaagtgctaaagtaagcattcccattaagttagcattatttaatacataggttgtataataaagagtagctcctgaaaataaccccatatctgtataaataataataaacataatcgctataagtaaaaaatatttatttttcatcaaggagccaattcctacttttaacttgaatttttctcccttttcatcctgatttctttccttggtaaatgcaaatgttatgaatagaaatgcgcatgaaattattccataaataactgaaagttttgaccatccatacttttcaactaatgggtttgtaatcattgataatataatagtaaatgaaataacaaaaacaaatcgaattgaactcaaaactgaacgttcctgtatattgcttgatattcttgatagcaatgtacaatatgacaaatttgatgccgtgtatacaattgacactaaaaatatataagtgatatatgcataaatcagcttcccaccatcgctgagactcataggaacattaaacaataatatcaaaccaatccccataaatggtgcactccataaaatccaaggtcttgttttcccccaccttgtattagttttatcaataagtgctccaattgataaatctgttacaccatctaaaagtctcgcaattagcatcagtgtcccaactgctgctactccaagtccaacgctattagtataatatatcatcaaaaaagaagtaattggcacatacacaaagttacatcctacatcgcctattgaataagaaatcttttcttttaaatttattttttcttccataaaaatactcattcctttcatagtactcaacatataaagtaattaaacgattactccaagaatatatatgttctaattaatgatgcacatttatcaataaataataaatgctgaaatttttttgagttttcaataattcctattcaaaaagcattgaattctaattaaaacttatatattataaaaatatggcttgatatggcagagtaaagtaattatatttttatgtacagttaatattaactaatcaaccaactaatattaactgtaattaaactaatacttttcactctgtcatttcatttgtatttgagacaattacaatgtaacttttcccatgtgtagatctgaatctgcgctgctgcttcctatatacacctcatactccattttctctaattccatttgttctgtttttggattataccagcaaagttcctctttaggacaagttattgtaacttctttgctttcccctggctgtaaatttacacgagcaaaacctcttaacaattttacaggtctctctacagatgaatttttgaatccgacatacatttgtacaacttcatcccctgccattttccctatatttttaacagtacatttagcgataacactatcatcagatgcatcaaactttgcatcactaaaatcaaacttagtataagatagtccatatccatatggagcagatggttttacgccctccttttctaactttgtatatccatgatagtaatcataccattgagatgttgtatcccaatttacttgtggaagatcactttctttaaatggaattacatatggtagttttccacttggattaacatcaccaaatataatctctcctattgcagttccgccttccatacctggataatatgccatcattatagctccaacgctttctttccactcttccatcattatcatatttccaccaattaacacagctatagaattggtgttaacaggacctacttcctgtattaatttaatttcattttcatgaagacctaatgaattttttctatcgccacctactgctcctgtataagattcaaattcatcttctgatatatattcaccttcatcgtcatagttatatccaactacaaatataactgcatctgcatctttagctaattcttttgcgtgttccaaattttccccattataatatacaacctgcgctttaggtgctgcatttgcaattccctgtaatggtgttataacataagctggtcttacctgacttgaaccgtgatctcctattacttccttatcgcctaactttcctaacacaacaatttttcttgctttatctttgtttaatggtaatacattattttcattcttaattaatgtaatcccctctcttgctgcctgaagtgcaagtttaatgtgatcttcacagccaattacgctctcatcatattcatttgaataagcatcttcaaatgctagcaatgtacgcacgatacgtaatgcagattcatcaattttactttcttttacttgtccgttttttactgcctctactaatttatctccaaaaaactgagtgcagcacatttccatatcttgtccgccattagctgcttcaaccgtatctctaactccccaaataaagtcactcataacaaatccatcaaaatcccattcctttttcaatacctgatttaataagtaatcatgatgtccacaatgagttcctttgtataagttataagaactcataatagctgctgcacctgcttcaacacatttcttaaaatgaggaagaaatacttctctctcagtacgtttatcacattcaacatttaccttaaatctagaaatttccatttggttaaaagcaaaatgttttacacatgcgattacattttcgtcttgtacacctttaactaatgctcgtcccatttcccctaagtgaaaagattcttcaccataagtttcttggcttcttccccagcccggattatatggaaggttaatgcatactcctgcaaataagttccctttatacccatgaacttctttacctatagcattacctattttttcttctaatgctgtatcaaatgttgcacctctaagcattgatactggaaaacatgtgctttttcctgcactacaaactacacctcttgggccatcacagaaaagcataggaggcaccttcttcttctctattcctccagctggataaggataactattataatgtttttgctcatcagcatctctcaaatcagagagcatatcattaagagtaacatttccacccattaaggaaaccttttcttctaaagttaaagagttaactatttcctttgccttttcagtataagatagtctttttaatttagtacatttcatttttacatatctcctttacaatatttttctaataaattgatagattctttaaaatcaaaacgcaaatagccttgtacattaggatcagcatttaaacttgccccactttttctgtattcagaaggggtcacacctatttcttttttaaaagctctgtaaaaagtactttcagaataaaagccacaatcatttgctataaaactaattgacttgtttgaaaacttaagcatatatttagaagcctctattttgctactaagcactaaatccttaggtgataatccaatgtttgcctttaagaaacgataaactgatttctcgcacaagcctataaatttatatagttcatctaatactgtatcctttttacagtttttttggataaagtttattacctgcatgagcaattctgtgttttctgtttctttcaaatctacagctttttgatgaatatcatataatgtgaattcaaataagtccgctattaacatataaactaaagattttacccggtaagtgttaaatatttcatcattctgactttcaagtccaattttagcagcattagtaacgtatgcatcatatccgttcttaggtttcttatcatcaagcttgctatttaagtaaaaataatatgatctattatcatcttttgtatttttgaataaattctcattcatctgaataaacaagcataaattatcttctttagtacgttgtaattcatgtactgcttttgaatttaataacacaatatcccctgcttccaaaaccgttatcttggggcttgcatttactattagggatcctttcagaactaaaattaattcataatcataatgccaatgaaaactagaatgttcaattgatgttacaaacacctttgctggatatttctcttcatgctcaattgtttcaaaaatatatgaactcatatttcccccatttcatgatacactataaacactttgtaaatatttacactttgattataagttatatcaaaatatatttgttatcatttttgtacaaattctatttcattttcagactactcatattataactgaatcatataaggcacatgaaaataaattaaatatttcatattatgtatagacaatccataagctgataaactgtataaaaacttaactaatccactaatttctagctattctaaatcataataaaaaaatgtaacaataatttatctttaaagtctcaaacccaataatttagaaatttatgataaaatattattatgcgaaaaagaaatataataaatttaacagaagatggaattaaccttttattagaatctattaaaaagtaaaggatgtattttatatgttaaatgttaaaaaaatattattaggtgtagcttgtgttgttgttatcaccagtataatagttggaggaaaatatctaatctctgttagaaattatcaaaaaacaattaaggaattaacaattaacaacgtagatttatcaaagattcccgatggaaaatatattggttcatacgatgttaatttaattagcgcaaaagtttcagttacagttaaaaaccacaagattgaaaatatagatttactagaacataaaaccgatagaggcaagcctgcagaggttattccagacatggtagttaaagcacaaagtttgcaagtagatactatttcaggagcaacaaatagcagtaaaacaattttaaaggctattgaaaacgcactaaagcctaatcaaaaataaaaatatatcaataaaagaggctgtaaatagattttgtttttacaagaatctacctacagcccaaagcataatctttatattatttctatgttcacataagtaataacatcatttcagccattaattatttttttatatttccaccttattacttatttacttatatattcttagataaatcttaaatacgttattctcacactctgcccaaatctcacccttatgaagttctactatattctttgaaatagccagtcctaggcctgaaccactaactttagagtttctagatttatcacttctataaaatctgtcaaaaagttttaatgtatcttgtaaaccatcgttagctacttcgtttttaaatgaaatggtcacacactcgctgctttctattaaatctacatatatatcagtgccttctatcccatatttaactgcatttgataacaaattttcaaaaactcttcctagtttgcttgaatcaacatttaaaattactttagaagcctcatactctttttttaaattcatatttcttttttgagcctcaacaaacaattctcctatactttgctccaatatctcaaccacatttgcctctctcttatttaaagatattccgccagattctaacttggaatattcaaataaatcttctataagcttatttaacttataagctttttctatggaaacagcagtatacttctttttattttcctctgtagtcttttcgtcccctacaagctgcatataagctataagcgaagttaatggagttcttaaatcatgtgaaacattagttataagctctgttttaaattcttcctgagctctttccctttcaatattttccttaagtctctctgccatggaattcatactttcagccaagaatccaagctcatccatccccttcttttgaatcctataatctaaatttccatttgaaaattctactgcaccttctgctatttgttttatatattttacttttctgctggttaaaaagaatgttaaaagcattgccgcaattacaggtgacaataaaataattaataattcattatcagtatattttttctcatcaatttcattatacttcttataaatatatagtttttctcccttaccatctattgtgatatcataaacttgatatacattcccatccttgtattctctattaagccatttatggattttttctacatctaatttatctccttctacattttttgatttcagcaatatgtttccgtctgcatctgctattacagcatttacattatataattttgcaacattatttaagtactcttcacatgattcatcatttctatttacaaatctgtttatatcaacaaaagctttattaaaattattaacatgcccagacacagtaccttcatatatataatatagaattgcacctattcccactaatattattaaagcactaataacattcattaatataaattttatattcaagctgcttaagctttttattattttattcttcaaccctttcacctcttatttatcaatcttgtatccaacaccccataccaactttatatatttaggctctttcgggttgatttctatcttttctcttatatttctaatatgaactgctacagtattatcagaattgaaaaaaggttcatcccatacattttcatatatctgttcagtacttaatactcttccgatgtttgttgctaaaacttttaagatttcaaattctcttggagtcaatctaacgaatttgtcgtctacaaatacttccctagttgctgtatttatcacaagcccatctatgcatatctcatcatcattttcttctcttggctcattaaaacttgtagttcttcttatttgggatttcactcttgcaacaagttctaaaggattaaatggctttaccacataatcatctgcaccaatatttaatcctaatatcttatcactgtcctcacttttagctgacagcattattataggcatctttttttcttctcttattttcaaacaggtcctaataccatctaatttaggcatcattatatccaatattattaaatctatagcttcattctttaatttttctaaagcttctaatccatcacaagctgtgataacctcaaacccttcatttatcaaataaatttcgataacttctcttatatctttttcatcatctacaactaatattgatttcttcttttccatgctatacaccttgccttttccttatctttgaatctctatatttgcacattttatggtaaacataattacctgaaaaaataatcatcagtggcataagaggatatgcatatctgctacatgtaaagtatggaagatacactgcattcatagttattatacttagggtaataacctgttttcctaaagtgaaatttttttctttaacaacatttctaatactaataattgctgtaattaatataaaataatgttctataaacgcaagcaagttttttatacctatagattgggtccaataaaatggttcataccaaaaataaaaagtctttccaattgtataccaatatacaaatttaaaaggttcttcttttccgtatatatttaacctttcaattccttcctctacttcatattcatcattttgtatagaatcttcacttctcctatattcaactccccatcctttatcctgattataattaataaatgtaccttgtaaaaatggattaccactcgactttgtaaagggtataaacatattaaaattattgtaatttcttacccaccaaggcgacattataatgcaaaatataattactactatactagcatatttaaccatttctttcatcttatacctagctttaatccagactacaaatactactagcgggtatgctgctattgttggtttaaataagcagcctaaactccaaactattcctgccagtacataatattttgtttccttagtttctaatgctttaatacttaagtatataagcagtaaaatcaagaacttaaatgtaacttccattaatataaggtttgcagaatatatctcaacaatataaattgaatcaattatacaagctactagagctgccttttcattaaaaactttttttcctattagaaatattaaatttaaactgcatatctgcagaacaacttgaaatattctaaatgccataatagcctgaaactttccaaacattattacaaagaacgaaagtataaatgttaatcctggcattatataaactgtcggcttacttatatcttcatatgaaaatattctattctctaccaaattccaagcgcttcttatatatttaacatcatcattatcaaaactctccaaacttccaagcaatgtagaattaccatgtttgaaaattgaaatgagagccactattgtaaatgatatttctaaaagaataagtccaaattttatccttttattttccttataagtaataaacatatttttctcctctacttagcaataataaatgttccaattattataaatattgctcctaaagctttgttaaatgtaaaatactccttgaatattaaaactccagcaagtattccccctatataacataagctttgcaatggatatatcctgcttaattcttcctttgataatatgtaaatccaaattactgtagcaaacacatatataattcctccacctaatatataaggattaaaaaacatatcaataattcctttaattgagaagttaaaactactttttcctataccaatcttccataatacttgacctgaaaccaacattattatgtttaagaataacaataaatacatcatctattctcttgctcctttataaattgccaaatcacagcattttcttgtatcagcctaactaatctcctctttatctcatatatttgtctaactaaataagctattgcaaaaattaatattatcaaaaaaattattattccattcataatttaatctccttatttacatttttaataaacttgcttttgagctgttatcaatgttgatagtgttactttaatcatgtaatatatcgattttagtggtgttatagatgactttccttcatatctttgcctcatatttactccaatttctttaaccttcaaaccatttttgtatgcatatactatggtttctacttctggataatcctttggatagtattttgcaaaaagttctattgcctttttatttattaacctatatccagaagtagtatcataataattacttccacataacaacgaaactaatttagaaaaatatcttattcccattgatctaaatgtacttggtatataattggttttctctacaaaccttgaacctataatcatatcgaaattgcttttttccatttgtttaaccaaattttctaaatcctttggatcatgctggccatcaccatctatttgcacagccacatcatatcccttatttaaggcataaatataaccagtctgaacagctcccccaatgcccaagttttcatttaaatttattacttctgctcctgccctttttgcttcaaaatatgtattatctttagaaccatcattaactacaatgacatctgcaaatacattattatttcttattgaagttattacattataaatatttttttcttcattataagctggtattataatcaaacacttcattactttattctcctttttccttgatcttgtataacttaattctaattatcaaaattgaagaactatttattaaatttatgaagaaattatgaagttcatcttttgcatccgtgtttatatatataagtacacaattactagttatccaacatactagtacatgtttaaagtttttattttataataaaaatttaataatactgaaacatagtgatctagatttatctaataataataaaaatacagtaaggccttctttacaggctttactgtattttatacaaactatttctaattataaataattcaaaatttctatactaaaattaaagataactttagagatagagatttttcattcatctgatttttaaattctatatgaaaaaatataacatttgaatatatttccttatttatttgataattctagtaatgcttctgctaatacatcaacacctaaagctatgtctctatagtctgtccactcgtctggactatggctaattccatttttacttggtacaaatatcatagctacaggtgcaaattctcccacaaacattgagtcatgataggcaccgcttatcatcatatcataagaaatatttttttcttcgcaactttttcttaatatattaacaatagtttcatcacatttcattggcatatcattattttctttaattagattaacttgaacgcctcttttttcttcaactttcttaatctctttctttaattcttctacaagttccgtttttgtctcaaattcacaatcacgaatatcaatagaaaacttaactttgccaggaatcacatttactgcattaggtattacttctactcttccaacagttgctgtattatattcactattgcatttgagtgcaagtttttccaagattaaagcaatttcacaacttgctgcatatgcatctcttctatcttccatggaagttccaccagcatgagactggcatccaattacctctactgaataatttgtaggtgcacaaattatcttaactataccaactggtaacccttttttttcaagtttattattttgttcaatatgcaattctattgctccaaaaacttgtcctttttttactggtatatctttaaatttttcaaggttataacctaaatcttttaaaacagactccaatgttttctcattttcatcttttaacttctttgtatcttctaatgttagatggccagccattgcgcggctacctaaacaacataatccaaatcttgtaggctcttctgaagtatatacaacaacttcaatatttctattaaattttattcctgattccttaataagtctaagtgcttccataccacctacaacaccagccattccatcaaacatacctgcattaagtacagtatctatatgcgatccagtccaaaccggtggaagttctggtttgcatccaactaatgttccaaatatatttcctatactatcttctcttactataagtccgagctttttcatttcgcttttaacatattctctagctgctatctcgcattctgtaaaaagtactctagttgtaccaaactctggagtagaattataggtattaattttctctaaccaattctgtatattttctgcatttgcgttatttagcataatcttcacctacacttacattacattttgtggagtacctcttaaccatttttcaatattgtcaaaaacaattacagctctcttttcaaaagcttctgctgtagcaaacgcaacatgaggagttactattagattctttgctccaaacaatacatgatcaactggtatcggaggttctacttcaaatacatctactccggctcctgctatttttccgctgtttaacgcttctgcaagagctgcgctatcaacaactgggcctcttgctgtattaaccaaaattgcactttctttcattagtgatagtttttcactatttattagtcctttagtactttcatttagtggaacgtgaagtgatactatatcacaagtagccattaatgtatctaaatctacaaattcaattccttcaacatcttttttagttctgctgtaagcatatacttcacacccaaaagccttagcaattgctgcagttctcatccctattgctcctgcccctactactccaaacttctttcctgctagctcaaagccaacaagaccatttttagttcctccttcccttgtaaccttatcgcaaggtattatatttctataaagagaaataaccattccaaatactaaatcagcaactgcaacagttgaatatccagcacaattacataccataatatctctttctttgcagtaatccattgctacatgatctactcctgtaaatgcaacacaaatcatttttaaatttggacaattttctattacttccttcttatatggaagattagataatactacagcatcagcatccttacttctctctattaatgtttcagtatcttcaactcttgtatcataatatattatgtctacttcacttcccaaaacatccttagccatccccaacaatttatccttatttacacctaatggttctaatattactaatttcatttttcattctcctttatttatctatttatttatatcaatttatctttaaagcaaggacacatccctattgcagtcttttgaataaatgtaagcaaaattttctgttcctactccataagcacattgtggtacatatggaccaaaccacataaaatcttccttctttattcccatccatgtatcatccattaaatacattccttctccacttaatatataagcgccatgttcctgtacatgcgtttctacaaatggatgacatccacctggctcaaaacataaaatatgcatattcatatcaaatccaagatcagttggaagtaggtcttttacaaatacatttgccatatcatcataaattctatactcaatatcatttacatttcctattacaactctagcttctaagtctccatatttaatgtatacttgcttatataaaagtatttttgcagtatctgtcccaatatttttaaagctcattcccataccttctggcgaaaaagcatagccaccatcatctagcacatgtttttcattacctatagtaatctctatgctaccatttacaacataaatgaagctttcaattttttcttcctttgcaaaaggtgaagttgtccctcctcctacttgcgcatctatgatatattgtacaaaacttgcacccattttaggtgacgcaacaatactcactttacaatctttaatattaggtattacattattaactaaaccttcctttggtattacagcccataaacctggctttactactgctcttgttgataataaatctttaggatatcccatttctatctctccttaatttctatttatatattaactattgcatctagtgctactaaagtagccttagctaaatgctcatagctagtaaattcttctctgcaatgacttcttccagctttgcttggcacaaatatcatagctgtgtctaccgcttctgccataggtagactatcatgtccagctccactatttatatgttcatataagaactttctttttatacagctctcttggattttttcttttaatccttcgctcatatctactggatttacacataatgtatttgtaattgaatattttgaattatacttactcgtagtattttcaatctgttctattattttttcatatatagaattaactgattcctcttttgtacttcttatatctatactaaatgatacattttgcgcaattgtattaatctcatttgggaaaacattcatactccctactgttgcaactgcatttttatatattcttgcaatatctccaatatttgatataacttttgctgcaacttctattgcatctattctcatatccattggagtggtacctgcatgatcagctcttccttgtatgtttaccatatatcttcgcattccaacaattgtatcgactattccaatatcagttccatgcttatcaagaactggaccttgctcaatatggatctctaaaaaagctttgatatcatttaaattcctctttgcttcatatatcacttcaggatttaagccatattctttcattgcatcatatatgcttatattatctgcatctttaaattcttctaaatctgagactttaagctgaccaagcatagctttacttgaaaaaaatcctgatttaaatcttgcaccttcctcatcgttggtgccaattatttcaattgaatatttagaagaaaaatctttttctttaattagtcttgccacctctagcccacaaacaattccagcaatgccatcaaattctcctccatattttacgctgtcataatgtgaacctataataatagttttcttttcttttccttctaatcgtccaatgatagctccagattcatctattcttgtatctaaacctatcttcttcatttcatcttctaagtacttcactgccattttggcttcctttgtaaagggaaatcgcgtgactccattgccatacgtagatgtgaattcccttaaagtctttaaatgtttctctatatttaatgcaatttcgtttatcataattatcactttcctttaagattctatagcgcttgttattccatctttcttccatttaaatagaatattttctaaaatagtaagaacacaaaagaatagggtatacaaaataccaattaatattgctgctaaaaacatatctgccatcttaaaccagttttttgcatctacaattatatatcctagccctgaagatgctcccatcatttctgctactactagtgaagaaaatcctaggccaagacacgctttcattcctgtaaaaatattcggcatagctgaatttaatattacttttgaaaatacttgaaaccttgatgcacctaaacttacagccgatctaataagaagtgggtctgtattttttattccatcaataacatatggtaacattgctataaatgttgtatatgcaattaatgttattttagagctttccccaattccaaaccaaattaaaaacataggtaagaatgcaagaactggtattggtccaaacatattaactataggcattactaaattatcaatccatttaaaacttgcaattaaagctcctccaacaacagctataatcgttccaattaaaaagccaccaagcattctatataagcttatcccaatatgtttgaacaacattcctttttggaaataatcatatcctgtctgcataattaaagttggagatggtaagaatactggattaaaccatccttgataaacattaattctactagccatctcccatattatgaaaaatacaactaatgaaagtatcttgtaccatttattcttcttttcctttatcgcttgttcagtttttctagacatacgtggcatattaacttctacttctattttgtcatttatatcttttaatattgtttcagatttcatttcatatacctccatttttatccctccatttctattctgttattacagcttcatctagattacctgtaagccctttttcaaacgcttctacataattcataaattcagcacttttggtattcctaggccttggtatatctattttttctatcatctctatctttccttcttttaatagaacaaccctatctgctaaataaactgcttctggtacgctatgagtaataaaaatgatagttttatttgttgccttccatatttttattaattcttttctcattgtatctcttgtcatagcatctaatgctcccaatggttcatccataagcagcacctctggatcattggctagcgcccttgctataccaactctctgagccataccacctgataaacttgatggatatttgttttcatacccttgaagccctattagatcaatatatttactaactagtttctttgaatctttcttcttttttatctttagtccaaactctatattctctgctaccgtataccatggaaaaagtgcatgttgttgaaatacaacacctctttccgctgaaggcccctccacttcttttccattaacaacaatatttccacaatccgattttaaatatcctgctattaaattaagtaatgtagatttaccacagccgctctttcctaagacacaaataaactctccatcctctatatctagcgaaaaatcatttaatacatattttagctttccttcacattcatcaaatgctttaaatactctaaacaatgacacacccataaaatttcctcccttatgcaaaaaggcgcaaaacaataatttgttttgcgcctttgcaaatctaatttatttttaataaatttaattttaatccgtatataaaacttgtccttcaagttatttctagtttaatatatcaaattaatatccacaatggtaatgtgcacattatttatctatttcattgtgcagattccacattatttttgacacaattgctaaaatatgataatatttttttcaagcaatggtgctaataaggtgccattgctttttttattctctaataaattatataactagacaatctgcaggcattcttccccttgtaggaataaataataaaaagtatatatctactttccagatttttctcacatatgcttcgaaaatctgatgtgaaaaatcttgatatcgatagtcacctgatattttgtttttttaattaaggaggtaattttatgactttagaatggttaataaatagtacagaattaaataattttaaatgtgttgctagtggtgataaacttaaccgccccctatcaagtgtaaatatattagataatcctgatgtaatccgttggataaaaaaggacgagctagtacttacaacaggttatatatttaaggatagtcctgaatcacaagttaacataattagagaattaaaagagactggatgttgcgcattaggcataaaaatcaaacgtttttttgagacgattcctgaaataatgataaaggaggcagaaaaagttggacttccactagtagaagtcccattttattattcattttcagaaataagtaaattaatatacaataaaatatactcaagtgaacttaataatgatttgcttcaatatagtattatcaataaactttcttctgcattttttgaaaatcaaggtcttgatgttatgattaacgagttatgccattttataaataggcctattataattacagattgtgattataatgccttttccgctgcattcactttagattacaaacatctaataaatgaaatagatttgcccaaggtgtctcctactgagatagcttcgcatattagccacactgaaatcagcgatattgcttatagaaatcttaagataaatgatgaagtatttcgtttttttgttttagcattaccaaactttacaggtatggtatgcgttttaattgaccagattaatatctcgtcatatgataaattattgttagaaaaagctaaaaatataatctctttagaaataacacgttctaataaagcaaaaattttctcgaactcatatcataattttttctttgacttcttaatatctgaaaacactaaaagtgaaaaagagattttagaaatatgtaatttttatgacttcgattatacaaaaaaacgagtatgtgtttcctttgttttagagaattgtgaaaatgatcatcatagaaacaagataatatcaactttgcaacaagcaatctctaataaatttggtgaccaccaaggcttatttctatgtgcaaataataatatattaagcttattcttattttataaatcagagcaaagtaatattttggcagtaaataatacctataatattatctcggatttttataataaattaggtgatagtatcagttgcactgtaaacatcggcataagtaggtgtcattctggaattaactctatacgtaccacttttaaagacaccttaaattgtataaatttaaaaaagcgtcaaaatggcactaatcctatttgctgctataccgataaaatagaatttcatcttctttctactttaccagaatcttatttactaaaattatgtgaagatactataagcccactaattgaattcgataagaataataatgcaaatcttgtagatacattaaaaatatattatcaaagtaaatttaattccacagatacagcaaagaaattatttttgcatagaaatactttaattcatagactagataaaataaaggaattgcttaatgatgactttattgataatgataaaatgttttctatatatcttggaatttgcgcttacgaaattcttaaggattaacttttgtgcaaattgtcgcacttttatatgctatttgtgcaatttgcccattatcatacttaaaaatactgttataatattactatagtaaaatttactacaaaatttacttattatgaaaaattaataatcacgtgatttttacgaaggcgtaaatataaaaaacaatttatatttatgcctttttttatttgaattaaacaataaggttactttatattttaacttaaattaagggggaatttattatgaaaaaaattacgcttaaaaatttactagctatgttaactacttgtatggtgcttactacatcactttatggctgtggtaattcagtagctacaacacaaacttctagttcatcaaatgataaaaaattatttgaaatagaggcctatggagtagttgatcctcaaatatctgctcaacaaatcatagctgataaaaaaggtttttttgaagaagaagggttgaaggtaacaaataaattattgcaatctggcggtgacatttcacctttaatttctgggggcagtgctaaagtctcttttgaaagtacctatacagacattgctcttgcagcaaataatgttgatgttaaaatgctagcaaccatggccaatataggtgatactcaatgtgtagttgctggtaaaaatgtaactatcaatagtgctaaagatattgaaggaaaaaagataggtatcgcttctggtgctggagtacttatagctatacgtaatatgtgcaaagatttaggtgttgatgtaaataagattcaatttgtaatcttatcgccttctgatcaaatttctgcactagaacgtggcgatatagatatgatggcttgttgggaaccatgggtttcaaatgcagtaaatgcaggcggaaaattattattcagcggattaaattcttatttacctgaaaaaactggtcctgttaattggctaaatttccacactactgtacaagttactggagattttctaaaaaataatccaaaacaagtagaatctttacttaaagcactatctaaagcaactgattatataaataaaaatcctgaagaatgcgcaaaaataattgcttctgagattaatcttgatgaaaaacaagtattaaacattatgaaaaagaatgtgtatactatgaaatttgataaatcatttatagattcttcaaatgagatggcagactttatgcatgaaatgggaaatattaattctgtaccaaaatttgaatcctatggtgattctacacctttgaaaaacgcttttccagagctcgtatcagttagttaatttttattatatagctatactacttgcgctattagattatctaatcttaatattgttacaaaaattttacgataagggatgttaattatgtatgatttattaattaaaaatgcaaacattgtaactgagaataatatcactttaggatgcgtagctgtttctaacggaaaaatcaaagatattttttataataatgaaacagcagacgctgatcaagtattagatttgaatggtaaatatctctttcctggttttatcgactgccatgtgcatttcgatgaacctggctatacattaagagaagattttaatcatggcacagctgcagcagccattggtggaatatcaacagttatagatatgcctctaaataataaaccgcctgtatctaataaagctatttttaaggataagtataacttaataaaagaaaaagcttttattgattatggtttttggggtgctcttgttaattacaatatggcagatctcgatgaattaaacgagtcaggtgctttggcttttaaaagttttatttgcgatgctggcaaagattatacttctttagacttacgagaagttgaaaaagctttattaatattaaaaaactttaacggtctagctggttttcattgtgaagactatgatatgattcaaaaattacaaaaagaaaagttggctgaaggtaaaatttctgcaaaggactatttagattccaggcctctagaagctgaattaatcgcaactaaaaatgtaatagaccttgctgaaaagactaacagtagaatccatatatgccatgtttctcatccccttgttgctgaggaaataagaaaagcaaaagcaaaaggtattaaggctactggggagacatgcactcattatctaatgtttactggagatgatttaatacataaagggatgttatttaaatgttctcctccattaagaactaaagatgcctgcaacggtttatgggaatatatttgtgatggaactttagattgtatttcttccgatcattcacccggtaccattgaagaaaaaactgaaaatcatcttggtgctttcggtacatggggtggtttaagcggtgtacaaaccactgttcaaattttctttgatcaactagtaaatcatcatggattaagccctactataatggccagagtcttaagtaaacgtccagctgaaatctttggtatatacggaacaaaaggtgatatttcaattggctttgatgcagattttactgttatcgatcaaaataaaatatggaagatttctgaagataatttaaaatacttaaataaaatttcagcttttgttggtttagagggcaaaggtgctcctgttttaacaatagttcgtggaaaagtaatcgctaaagatgacaacatagttataagttcaggttatggaaatttggttaaaagaaactcgactcacattcgttcgctgagtactcacagagtaagcgatcatcatcaaatcgtagattcgagatgcctgcttaactgattcacacaaaatcatagattgcactgtgtgaaagttctgctaaccaaatgtaaaatttggagcatcacttttggttctctacttagacctaacaaatccaatatttagttttacaaaggtgtaaacataaaaattctatgtttataccttttcttttatattcaaaattcatttaggagtgattaatatgaaaaaaagtaaattattaaaaaagttgttttgtatattaactctaactactatggtatcaacaagtttgtttggttgtggtactttttcaacttcaagtacttcatcatcatctaaagatactgctagttctaatagctcttctgataaattatttgaagttgatgcatacggcgaactagatcctcaagtatctgctcaacaaatcattgcagacaagcttgggtattttaaagaagaagggttaaaagtaaataataaattaatgactggtcctgatcaaaatgcgcctcttgttgccagcggtactgcttcaatatgctttggatctatttataacaatattgcagttgctgcaaatggggttaaggtaaaggtacttgccccacttgccaatgctgctggtactcaaagtgttgttgcccgccctggtttaaatcttaattctgctaaagatttggaaggcaagaaaataggtatgacttctggagctggagtacttattgcaataagaaatatgtgtaatgaactaggagtagatattaacaaaattaactttgttaatctacaggcatcagaacaattatctgctttagaaaaaggcgatattgatgctatggctgtatgggaaccatgggttggtaaagcacgggctattggaggcaaattactatttagcggcacaacttcaaatttacctgagaaacaaggaaatgttcattggattgacttctatatgacagtccaagccaccgaaagcttttataatgaacatccaaaggaattaaaaagtttcttgtcagctttaaataaggcaactaagtatataaatgaaaatcctgaagatgcagccaaaattattgctactgaaattaatattgatcctaaagactgtctaagaattatgaaaaacaacgtttattcaatgaaatttgatgaccagtttgtttctggaacaggtactatggctaactttatgttagatatgaaaaatataaacagtgtacctgatttttctaagtatacagatactaaaattctatcttcggtagatccttcattagtaactgtaaaataactaaaaattaagtgtagataaaatgttttaaaaaataattttatctacacttgcagtcttgtaaggtacattcaaaaaatatatatgattgggtggtaaatatgtttgatatacttattaaaaatactaatttaataacttgtgaaaaagtagtacctggaagccttgcaataaaagatggtaaaattgcagacatcttatttaacgattgtgaagtaaattcaaaaataactattgacggcaccggtaaatatctttttcctggtctaatagatgcccatgcacatttaaatgaaccgggctttacaactcatgaagatttttatcatgggacaagcgccgcagcaattggaggtattactactgttattgatatgccaatgcaaaatgagcctgcattatataacaaggatattttttactccaaagaagcctgtgtatcctcaaaagcatatgttgattacagcttttatggtgcccttgtcacttataatttaaataatcttgaagaattaaattcttgtggtgttgtagctttcaaaagcttttttgcccctgtaagtccagattacacgcctttaaatactgggcaaatcagacatgcattatctattataaaaaatttcgatggtttagctagctttcattgtgaggattacaatattattacctacgaacaaaataaagctattaacgaaggtagattaggccgtagagattttctcaattcgcgtcctgtaattgcagaactaattgccgtaaagaatattattgaactcgcaaaagaacaaaatagtcgtgttcatatatgtcatgttagtcatcctgctgtggcagaagaaataaaaaaagccaagattgatggtataagaattacagctgaaacctgtcctcattatttaatttttgatgagaatgatctgctcgataaaggagctatttttaaatgcgccccaccacttcgagctcctgaagataaagaaaagttattagattacgtttgtgatggaactatagatatgatagtaagtgaccactccccttgtgctcctgaagaaaaatcagaagatatgggcatctttagagcttggggcggcatcagtggaattcaaactggtttgcaaactatgtatgattatcttgttgttaagaaaggcttttctccttcactaatatctaaagtaatgtctaataatcctgcaaaacactttggaataagtaataaaaagggttcattaaatatagatgcagatgctgatatagtacttctagatccaaataaacattggaaaattacaaacgataacctggaatatttaaataaccaatctgcttttgttgggttagaaggaactggactccctattttaactatacttcgtggaaacattatttctgaaaatggctgtataacagaaagttcctcctacgggcatttagtaaaacgagactataataaataactctaagaatattgtaaatctttataattacgacctatatgtgaatatcaatctaaaagacatatactcttaatttggaatgaaaataattagaaacataatgatcttatatattaagcctttataatctgaaataagccccatgaaaatctaaattttagattttcatggggcttatagatatccaatttaagaattaaacttattagattaccatatttacaaaattgctagaattttaagctcatgtctttactagaaatcatattatttcaaatccaccacaaaagctattaagcttttctattcttctgtaaagtgctcctttatatatttaactgaattttcacctgccattctacctgagtttaaggcaaatcctaatgaatttcctggaagaacgaatgcatagtctggattatataaagagtttgcatctgttcctgctgcaaataatcctggtactatattagattctgcatccattgcttgtgtcttatagttaattttaattccacctgcactaccatatgcacttggcgcaaattttaatgcataatattttggacctattaatggttttaaatattttggatttttattgaatatgttatctcttgatttacaagcttcattataatcgcttattgtttttacaagaccgtctttatcaattcctgctttttctgctaattcttcaatagaatctgctatgaataaaatatcatttccgtttttaataaattcgttcatttcttgtttaaaatcatccatactaatatttgaagttacaacatttattagctctaaaccgtttttctcataatatttcataatactatcatctataattgaaaatacagttttacttttttgcttacagatagcattaactgaaaatacaggattttcaactacggcttcatcatagaatctttcaccatctagatttacaaaaacatttggttgtctaaatggaagttctattggagcatatccgcctgtattaggtgcaaagaaaactaattctaagtccattgtgtcttttgctgcaccagcttcccatgccattttaattccatcacctgtaagtcctggaattctatatgaaaataagtcttttccccattcaaatcctgtatactttttaataaattcaggattatcaccaaatcctcctgttgcaataataactgctgaaccatatgcttcaatttcaccatctttatcttttgcaactactcctattacttctccattatctttaattaaactttggattggtgattctaaacaaattttaactcctaattcttctgccctgtctgtcattgctttgatcattgtagcagctgctctaagaccaggtgctcctgtctttggttgaacaatatgccaagtcgcttctgaacccgggaaatattttgatggtagtgcaaattttacccccatatcttctagccattcaattgtacttgctgatttataaatataatcttttacaagtcttgcgtctgcgcgccagtgagtataatccatgaatttttgaaaagctgcttctcttgtgcagtcaataagtctttccttttgcattttagtctctacgcctaaaggacccattgccatattagcacatccaccagtagtatttgctttttcaaatactataacttcagctccttgttctgctgctgcaattgctgctgcaagccctgctgctcctccacctacgataattacatctgattccatttcacgcatatttgttacctcctaaatttaattaatgattaaaatatatattaatttttgattatgagctattttcttcgtcttcttccaagtccaaggcctttcttttcacctaaagcaccttcatcaaagcttccaacttctattggttctgatggcaatttaggttttactgagccatatctctttactgcttttacgctgcatatctcttcacattttttgcatttatcacaaaaatccatatcaattatatgaattaaattatttccacctttgattgcttttcgaggacaatccatacaatcgccacacccattacaaacctttggatctataaaataattggcataagctatacaatttagtgtattgcagatttttctatcaatatgcttttcaaattcatctctaaatttattaatagctgtatataatggattagaagcacttcttccaaaatcacacaaagtcccaattttgattgtttcgcttaactggatggctaaattaatgtcactctcttttccttttccttcagttgcatccttaatgattttgtataattggtaaatcccttccctgcaatatacacattttccgcaggtctctttgctattatctagcatcttttgagttacccaattcacaacacaagtatctacgttataaacttctatttttgatacttctaacattgtcccatttcctattaggtttgaatataagaatggagtatctaattcttcttctgtgaaaacagcacctgtatttccacctacctgcacgaactttattgctttttcagattgagttccgccaccatattcacttataatttcccttaaagatgttccaaatggaatttcatagattccagaatttttaacatctccagctattgaaataatctttttagggatataattttcttcttctaatgaattcttaagtgcatacattgtttccgcattatgtactaatgtcacttcattaaatacatctttttcaaaatctttcttattcccaactagcactacttctatttcatatgattctaattgcattttaaaattactataagattcgctaagataaattttaactttctctatgcctaattccttttggcatattttaattccatcaataaccttacttatgtgctgttctaataaatatctcatattttcactttggctattatcttcaataaaaagacacgctaattctttccattccctgctttgccatctatctatgagattagtattttttattccatgtcctgatatttttatattttctgctagcattttttcaccacctttacttcaccttatattcagtccagaattttgcctttgtaagttttggacgcaaatcacattgaagacatctagaagcctcgcattgtgcagtttttgtgtcaaatcccacagtcattaaattaaaattatttattcttttatcaaccggaacacatttataattactacattcccttttagcaaaatcttcttccattcctatcattggatctaaagactgttcagatgataggacttcatctataactccatctccacctaaatatttatcaatacttgatacagcttttcttgctcctgctattgcctgaattacagatgctgttcctgtcactgcatctccaacagcaaagattccatcttcattagttttataacaatcgtcaatatttactaggcctcttccgttaagctcaatttctttaaatgctccaaggtctgctctttggcctgttgcaaaaattatcatttcacctttgattaaatgttcagagttttctttgatatttaatattaatttcttattttcatcaaagtggaaatcttcaacttcctgacatactatcccagaagcatttccattattatcttcaattttcacaaaagttctgctattgtaaatttgaattccttcttcaattgcttcttcaatttcttcatcactagcagtcatgtttccttctccttctaaacagacaactgctacactttcagctcctaatctctttgctgatcttgcacaatcaaatgccacatttccgccacccaaaacaacaactgatttcttcatttcaatgtctatatctatcaaatctcttcttaaaaaatcaatatttacatatacatctttcaaatcagacccagggattggaatccttacacctttatctgttcctatagcaattacaaccgcatcataattctcttttaattcttttagagattctaccttgctgttagtaatgatattaactcctgcttcacgaattacatctatttcagattctacaacttctttaggaagtctataatctggaatacctgctgacagcattccccctgctactgggagtttttcatatacatctactgcatgtccaagtttcgcaagatagtaagctgttgtaagccctgctggtcctgatccaataattgcagctttcttatcagttttatcctttttaaatgatttatctttccatttataagaatcagtttcagctgcaaatctttttaattcacgtattgaaacagctccatttatatcttttcttctacatgcagattcacaaaaacgcatacatacaagtcctaatgattttggaaatggtgctttttcacgaattactgctgctgcttcatcaaaattcccatcttttatgtaacgaacatatttaggcacattaattcctgctggacattcatgcttacatggaactaatacatcatctctattcccatctttgaatacaccttttttatcttgaagagctcctgttggacatacttcaacacaagccccacaaaaacggcagtttgcatctgataatgataatccatttttaactccaacataaattctatcttcttcatttttatcataatctaaaattccaacacctctgatatcatggcaagctcttacacatctgccacatgctacacatcggtttaaatctctaataattaatgggttttctgtttcaacaggaactgcattaagagttcttcttaatcgtgaagtactgacacctaaatattgaattaatgattgcaattcgcattttaaatactttggacatgtagtacaatcgtctacatggttagcaagcataagttccattgacaatcttctcatctcatcaagtttttctgattttgttttaacaatcattccttcttcaatttttgtgttacatgctgtctgtatatcattttttcccgatatttcaactacacataatttgcatcctccaacatcatgaagatctggatgatggcaaagatgtggaatataaatatcagcatcttcagctacttgcataattgttttattttcatcagcgcataattctatattatctattatgacttttatactactcatgttaacctccaattttcttgactcttgtacaaaagttactttatactattaatataaacgttgccataatggtaaagtcaatagtggagtgtgaaaaaaatgacaaatctatatacaatcggagaagtatctcgctatatgaatatatcaactaagatattgcgtcattatgaccatttaaatttgctaaaaccttgctatatttcaccagacactaagtatagatattttagttatgatcaactttttataatcgatgtgattcgatatttaaataaaactctgttaatcccattagaagatatcaaaaatatacttgatgaaaataaagattatgataaactattaacatttttagagtctcacaaagaacagctggataaaaagatagctgctatcgaatattcaaagcagcttacagatagtatgatatctgatataaaagaattaaaaaaatccccaaaaaaaattgaaacatatgaacaatatctaatgagcagaaatttttattatcttgagctcaatacttctatttatgacattgataagcatgtaactagacatatatctaatattactaatatagatattacagaatataacactatgtgtttattattctccttatcagaatatacggagactaaaaatttaaatgtcaaaggtttcggtgtattctctgataaaaaaattcctcagctaaaatttaaaaatttgcgtgaaggccgttatattaatcaaagctttatttattcagaagaaaatactatgtccgcaataaacaatataactaaatatgctgatataagaaatatgaaaattgatgatacagcttttttagtctcaaagatggtagatttatctgtttcctcaaagtatgactattttatggagcttcaaataatgcatcatatgtaaatattctaaccaagacctgagcttatacatatgggtcgccgaaatagggattatactgttattccagtttctaatgaaacatttcacaaaagcataactcttatttctagttgagatatattttataatataagtccaacttataatgatttatctataatttctgtaaatttgctcattactctaaagatatccttttgtttctattgtgttaaagttgatattaacaaccttatttataatataaatccatattttcctaaatattaattataattagtataacataaatgaaagaaaagttttaacgccaaaacgcgtaaataaaataacccacaaaaatccaaattatagatcttcatgagtttcattttgacagctctacaccgtttgtaatattaactttaaaaatagattcaatttcaattataaataagcaccacaataaaattaaaaatcatttaatcctaatgtttttaatcctttaatataatttttgctagatgattcaagctttaatccacggattctaataatagtataataatactaacttataaaaaaacagcaaagattcttgttcaaatgcaattactatatctagaatataacatcaaaatgatttattcataaatcaagtcatacaatttttattaaaatcatctttccgatcatactaataatttgccttctaaataagaatacttcaaatattctggactactataatataccgatgagttaaagtctgatatttcatcactaataaatgattcaaataccgaatatagcacatctatcacattattttcttctgacagaacatcgattattaatctctgatattctttacctatagcttgaaaacttgggacagtatatttgcacaaacctactgaatcaaaatcaccttctttaatatcaaactcttctattatctcatctgacacttcctcaaatgataagcaatgattaacttctgcaagttctaactgtctttctagttctttctttcctatcatttttactatagttgatcttctatttttagttttccttcctatatactctataagcgagcaaacgtaaaataaattatctttttcaacatcattcatttataatttcactcctctcaaacttaagacaatccaatgccttcaatgaatgaaaactaatttgatgagtaggatatttaaattttgctaactcccaaaaaatacttctagtaatttcaccagctaaaaaatcatttacgtaattccaaacagtatcatcagccattgggccttctactatatcgtaatcatgaatatttccttttctgcaagctgcaataaaatctagccattcatctgtcatcttttcaaattttaatatattcaaattcttattttctctgtaagtataatagttaactgtagcatgctctctatttcttttagaccattttttagcctgttcaaaattatttgtacaataaaatccccatgaaaaatctttagtatatttactttttcttacttctggaaattctactacttctcccgatgcatgatacaacataaaatattcacctagcttcctctaatttcttactgctattatatcattttcaaagcttctcttctatcaatttaaccatttcataagcatttattctatttcattctttttcatgacataaaaaagcttcctatgatatttttattttttcatagaaattcattatttccattagattacaagcttttaacaatttcattgataataatttttttcatccatatctcctatgcatatataatctatataggtattggtaaaggtgtattctatatatatttaatttttttattttaaacgtgggattacatgtatctcttacgtctaaatatatgaaaataaaattcatggaggatttttatatgcgaaaaataggtacaacaacttctgctatctgttttatacttttaggcatttggattatgattaattctagcaatccagatttaggaagaaaactcataaaattttggccaataattattatcttaataggtatagaaattttgtattacactttagtcaaaaaagaaaatgaaagaatacgaataagtggtctcgtttttcttataataatagttttctttttcacaaatatatctatagacatttttaataatataaaacaaaataattcttcctttaatttagatacaaatttctttgataatgtctttacaaataaaaacttacaatctattgataaaaaaatcactttagatcctattggtagtaacctaaattttgaaacattaaatggtaaactgaatatagaaaaagcaactgacaataaaataactatagatactgaattatatgtaaagcaagataatgcttcaaatgattatgaattgaatccaataactgattcaaatggttacacactaaaaattgtagatgatggtatagactcaattaaagccactatctatttacctgaaggatatgatgtttctataaagggggctaaccttaatgtagatagtaatagtgatataagacttgatgctttaaatataaatgcatctaatggaaaatttgatttacaaggtgacattcctaattcgtctctaaagttagaaaatggtaaaatagatttaaacaataatttatgtaaaaacattgatgtttctatgaataatggttcaatctctttagactcaaaagacaaaaacttatcaatcaatacagatataaaccatggtacatgcaaaataaatgatgaaaaaagagtcaactctggaatttctaaaaatatcggtactggtgagggcatagttaaagctaaattaaataatggaaccattaaaataaatagtggagagtgaagaaatggaggagcaagaattcgttgaaaaaatgaagaccaaagatgaaaatgcttttatttacatggtagacgtttataaaaaaagaattctctccttatgctattcctatacctctgattattatgaggcagaagatttatctcaagaggtttttataagcgtatttaataatattgataaatttagagaagagagttccttttccacttatttatacaaaattacaacttcaaaatgtatagattatacaagaaaaagaagcattaagaattttttaactggcctctttatcttttctaaggaatctactcaggatatagacgagcaaaattttataaagcaaagcattcaatctctgccactaaatttgaaaaccccacttgtactatattattatatcggattaactcaaaaagaaattgcagatatattaaacttgcctttaaaaacaattgaagggagaatttatagagctaaaaacaaattaaaaaatattattgaaacggaggttccattttatgcagaacaaaagagatgatcttgatactataatcattaattcctttaaaaatatagatgcacctgatgactacaataaaaaactaatgcaaaaacttcataaaaagcagcttcctggttctaaaagaaataatctaatcccttcctacgctttaattgctgcgggtttatttattatatttcttagtattactagtcttcaggtacacattacaaactttgaatcacgtttttttgacaaagctgtagttactgaaattaaccaacattctattattaattttataaaacaattaggagagtgaaaatatgaacaatagaaatagttttcttacttttgtaactgcctgcattcctggcgttggatatatgtatcatggactaatcaaaaaaggagttcaggttttattcttatatatgcttattggacctattttatcttttataggacttggtttcttatctcatttaattaaaatttgcatatggttttatactttcttcgatacatttgctgtttcaaataaaataaaacgcggagaatatgtacctgattctgaatttatctttaagaattacgttaacacagaaaattcctatagcgtaactcctacatggaacgaaagaattaacagacaaggttgggtaatcttaggttcttttttaattattcttggaatcttatctatcttaaatcaagtttttatagatagcgatatttacaaatatatcagatcttatgcctcgcaatattttattcccataatatttattgtcataggtgttttgattttatttaagaaaagagactaaaaattgaatacccttaccctgaaacccacgatatttctaatcgtgggtttcagggtaaaggaggatcttaactagctattattaatctttttatagataaaagcttcatattgatttcattaactaccatattattcctcaactattatacccacctaattttttcaatctaatttttcttactgatattatatcattttcaaaacttttcttttattaattttctacttaatctctattatcttttacacaacactcaaacactttatcaataccaactgtttttcatagttttctctcttatacattttattgaataatatgtatttcctcattcaactatttcaagcataattctcttgctaaggagaattacgcttttaaataaattaaatctcacattccaaaattatagttttaccagcaattacttctacattttctactggtttaattgattttactttatcaggattagttattaaaatcatagttgttagtgaacaaccctttgatttaacaaattctctatttactttaattataggagttccagatctaactttagttccggtttcaactaattgcttaaatccttcaccatttaatgaaacagtttctaatcctatatgaattaacacttcaatcccattctctaatctcatagcaaaagcatgctttgtactaaatattaagcttatttcaccatggacaggagcaactataatatcatcttctagtattattgctagtccatctccagccattttctgagcaaaaacagggtctggaacttccgataatgatattgttttaccattggatggagaaacaaattttagtatatttttattatctactttcttcgttttaaaaaactcaaacataaagacatatcctttctttaaatatatatttaaatcttaatctaatacgtaagttccaattaataagattaattagacaaaaaatttgctaatttataattgttaaacgtacagatttaatttagtgtcagttaattagaacttatataattaatcctcttcaaattccaaatttcaaatttattgatttttatattatttttaatttcaatttcaaaattattacttagtggaaaatacattaatgtagtagtttctaatccgtcttgataatatatttctataactgaattatctataaacatatgcagctttaatgatgaatccacttttaatttgaatttccttattcccttgccaccaagcttcatattattcctatctactatgcaaacttcatcttttttgctataaaatattgaaatatattcatctttaaatttgaattttatctctgaattttctgtagtcattaaatttaaatctaaagtacactcaatacttcttgaatcaatactaatactataattattaaagacttcgtcttttatatcaacaatctttgtttctcttaaattctttaaaagtttatgtggcctttgatatagcacattatctctatattctagcattcttggcatagttaatccaaacatccatccattctctgaactcacatattccttatctttatcaggcattcctatccagcctatcataatatttttaccatcatgattaaatacttgtggtgcatagaaatcaaatcccatatcaatttctttgaattcagtatgattatttagggaaacttcatctaagttcaactcaccaataacatatccggattgatatatattttgatatctaaactcttcttccttcaatccttgtggtgaaaacataaatgtaaatttatcttcacttactctaaaaacattagggcactcccacatatatccaaaatcattcatatctgtttttaattcaccggccaattgccaattaattatatctttagacttatatattagtgcttttccttttaaattttcagtttgaactccaagcaccatatagtaagtttcattttcaacaaacaccattggatctctaaaatgagctgtatagccttctggttgtttatcaattaatactccttttttttcaaatgaaccatctttattataatcaaccatacactgatatgattttctttgattattttcatccttaacattccctgtatagaatagttttaaagtatccccttttatatatgcaccgccggaatagcatccatttttatcaaaccattcttcaggttttaatattatttgtggttttgtaaaattaacaaaatcttttgtcttaaccaatccccaatgtttagttttatgttcgcagccaaatggattccattgataaaatatataatattctccattgtaaaaacttaatccattcggatcattgattaatccaaaaggcatctctacatgaaatttatttctccatatattcgtatcttcatcattataataattttctaaattattatttatatcttcatatatttttttactctccatttttaaccccttttattgctctcttttcacctattttaatttttaataggttgttgaataatcgttttaaaattaattattcaacaacccatttgagacataacttatattataatttacacattacgtattaatttttatcagatattgtaacttctttgggaactgcaaatatgcttgcaagtataaatgctaatgctactgtgcttaatgatattattgtatagaataataattgtcttccctcatatatatacattaaatatgagggtacaactgccaacccataagaatttgacttaacattaaatattgataaaaatgctgcacctaaaccagaagtaaataatgttacatatagaggtctaaatttgtatctaattaatataccaaatagcactggctcacttataccaaatagttgtgaaagcattgcccctatacttgtagctttaactttttggtcttttgatcttgccataaaagctagacaacatccaacattagcaaatccatacattgcacataatgtaataagtggattaaaacctgtattagcaagaaatgatgtttctatcataataaatgtatgatgtaatcctgttaaaacacataatggatatataacaccaattaagaatcctccaataccaaaaggtaagtgaattaatccttctataagccctaccagtcctagctctattgtatgcataactggtccaattcaaggaaaactacaagcatcataattagcattacaaaaaatggagtaaatataaaatctaaaacattaggcattactttccttaactttttttcaagagttgcaccaaaaaaacctgtagcaattgcagtaagaacgcttccctgacaccctacaattggaataattccaaaagcttttaaagcttttactccacttgctggatctgcaactgcataagcattaggtaatattggtgatactagcattaatcctaaaataattccgattacaggagtacctttaaaaactctaaatgttgaccaacaaatcacagctggtaaaaatgcaaaggctgtatctgtaagcactgataccaaggctttaacataatcaggaatccctgctgaagatacgccaaacatggcaagcacagcatcattaaataccactcccttaagtcctaaaaacaaacctgttgcagctataattggaattattggtacaaagatgtcacccaatattctcattaatttttttattcctttttcattatctttaaccatttcatcctgttcgtttttagaaacagtttttagtcccatcttttcaatttctgcataaaccttattaactatccctgttcctaaaataatttggtactgtcctccagtgtagaaaacaccttttacttcatcaatattttcaacctttttatcatcaatgttatcacgattgtttactattaatctcaatcttgttgcgcaatgagttatagatataatattttcttgtccaactgtatttataatttcttttgcaatatttaaataattattatccattttattacacctctcctttattttttatagttatgagcaatgcttgattaggctttaacataattccatcttctctaacgtctgcatctttaagattattaaatatgacttctttatcttttatatctaaagattcaaaaacattatcttggctaaaattgaagtagcaatatattatttcactattattctgcctgctataagcgataatttcatcattttttgtgtctataggcttaatatctccataaattaggcactccgaataaatgctattttgcctaaaatctatcatatttttataaaactcaaatatactatctttatttccaacctgggattcagcattaatttctctatagttattagtcattccaagccacggcttaacagttgaaaaaccaccatattcaccagcgctccatggaaatggagttcttgaattatcacggcttctaagatttataatccttaatgcctcttcctctgaaaatccttcttcaattgatctataatattgatctatgcttgatatatcattaaactcgtttattgaatttctttcaaaattagtcattccaagctcttgaccttggtatataaatggagttcctcttaataaaaagtacatagctccaagcattttaactgcatccttattattttccagttctaataaatatttactagttgaccttggctgatcatgattttcaatgaaatttgcaccccatccaaatttttgaatgttcatttgactggtcataattttttctctcaaatcctttacagtccagggtaatcttttgaaccattcactacctgaagcaatgtcaaggtctgcgtatttaaaatcaaatatcattgaaaaatatccatcttcaccaataaagtcatcaagttcttcatataatactccaggggcctcggctactgttacacagttatgtttgtcaaaagttttactcttaagatcatgtaaaaacacttctatacctggttgatttcgagatgttttagtgcatttaactaaaccatctaccccatcgctttcaagattcttaaatgctaaatctttcttaataaacgtaattgcatcaattctaaatcctgctatccctttttctaaccagtaatttaccatttcatataatttatttcgcaattcttcattttcccaatttaaatctggctgtttcttactaaaagcatgaaaataatattcatctcttccctttactttttcccaaacgctgcctccaaatactgatctccaattattaggtacttcttttccttctttaaaaatataataatcatgatatttgctgctaggatcttcaattgcttttttaaaccactcgtgttcatcagatgtatgatttataactaggtctagtattattttaattccatatcccttagctttttctataagttcatctaaatcttccatagttccaaattcaggtgctaaatcaaaataatctgaaatgtcatatccgttgtcatccataggagatttatatactggacatatccagagcatagtaatacctaattcatttaaatattctaacttttgagtaatgccttttatgtcaccaattccatcactattactatcataaaaactctttggataaatctgataaacgatttctttttgccaccattgctttttcataaatttactccttatctcatataacatttcttttttttagttctaaataaattccattattaaaaggctcttcacaaattgaatctacatatttaaatatttcattgtttccattcctcatcccaatagcagtacctactttttttaacatatctatatcatttctaccatctccaaaagccatagttttctcaattggtatacttagatacttacaaagcgctttaattgcatcacctttattacaatctctttgaattatttcataatagttacgtgtatcaaatttaaaacattgagctaattgaattttttcttttgaaagaataccgattatttcttcaaatatttcttcatctgaccataagcaaattttattaactttatgaatattactattaagtttgtccacattgtatttataaattattttttcattttctcttatatattctttttcttcacttgttaaaaacttgaacttttcttcattcaagctctctaatatattgactgcttcttcattcataaaaacggtatcatttgtttcaagagtaaaagcagtttgtttatttacactttttaaatattgccaaacttctcctattttatttgttggaaaaaacttttctcttataattttatcttcaaactcaatgtaagctcctccacttgctataatcccattcatttttaattccaatacatcatcatatatggcaccaatatttcttcctgtacacaaacatacataacatccattttctttacacatttttattgcagtttttgcagtctcaggtattccataagattcatctcttaaggtaccatcaatatcaaaaaatattatctgatgcacttttttgtcctccccccttactgtagtctaataatatcaaacacaaaaaaggcaatcaatacgattgcctcttttaaaaaatatgtactcactttgagcatattttcactttctgaaaatacgtccaccttacaatttactcagatattcttgatatttaagaaataaaagctcaattaaaataaagtatggtgtagaaatttcatggataatattttcttccacttgtagttctattgaattgatatatagattttcatcgcatagagatgctaatgtattatttttcattcttgttatagataatgtttctatcccacttaatcttagtttctcagctaatttaataacttcttctgattctcctgaaagagaaataattataacaaaatcatctgcttttgctaaatttataatggagttagccacgtcatgcccatgtatatcataaattatcttttgggtcggcaaaaatattctcttaaattcgctggcaactcttgcttgagcatatccacttccatatataataattcttttagcactatgtattttattaaatatgttgctgcaatcacgttcttttataacttcaatcattttatgataactatctgtaacatttaatagaaaatttgtttcttcgctcttaatattttctgcctcaagacgtagccttgcttttaattcactgaatcctggtaatgaaattttctgtgcaaatcgaaatagtgttgtagttgatacattacatttacgtgcaaactcctctatagaaaatttatagcagctatttttattattcataataaatttgcaaataagtttatcattttcatttaatttatcataatatctattcatcaactcatcaattttcatatttcatccctcttgcatattctaaataatttacaaacaatatatctaaaagtacataaaaagctgctgtcatttcgtaatttaaatttttatacccatgtagcattttggtttctacgtaaagattatatttacacattctcgcaatggtattattatcaaaacgcgtaatagataatgtatttatattggctttctctattgattttaatatatcaattcctaccaatgtttcgccagaaagtgaaataattatgaataagtcttttattgcaaatttgctttgcataaactgaacttcacctaagtcaaataattcaattacgcattttcccattgagagaaacatatgcttaaatgcatctgcttctgctttttgtgcatttccagtcccatagatatagattgtttctgcattgtaaattaaagagcatatatccgcatatttatactgtctcatttcatcgattattttatgatagcttctacatgcgtctccaatattaatgtttaaattttcattcccagtgcatttctgagatttaagtaagtatttaagttctgcaaaggactttaaatctagtttatgacaaaatctaagcaatgttgttcttgaaacatggcattttttagctaattcctcacttgtaagttcactaacttcagatttatttttagaaatatacttgaaaatttgatgatcattttccgttagtttatcataattttcatttactaattcatctattttcatgattcacctctacttacatatcatttcaatataaaatccttcaattttatttattatatattataccctaaacataagtgctttttaatattctatttataattataaaattaagcaacccacgaaaatccaaattatagattttcgtgggtttcatggtggaggtgagggatattaacctccttgtccacaaaattcaaaataactatctccttagtcaaattaatttacctttaaatttcctaaatattattgcataaattcctttgctcttttatctgatgcctagccactataaaatttctatagaatctccttctctaatcactccgccttgtattattcttgtaaagattccttctgttggcataatgcatgtgccaacttgattttttatagcacaacctttatggcattcttttcctatctgtgtcacttcttgaactgtttctcctatttttagtcttgtcccaactggcaattcatgaagaacaatgccttcagttgttatattttctgcaaattttccagcatctaagtcgcttatccccatcttaatcattttatctatgctttcttgcgctaataagcttacctgtctatgccattttccagcatgggcatcatcttttaagccatgctcttctatgaaaatcccttcttttataggggtttttataaccccttttttttcactaatatttattgataatactttagctatcattttatttaaatctcccttatatattctccactttttccaccggttttctttattaatctaacattttctattaccatatccttatcaacagccttgcacatatcatatatagtaagtgctgcagttgttacagctgttaatgcttccatttcaacgcctgttttcccaactgttgaaactgttgcttcaatctctatttcttcttcacctatattaaaatttatatcagatcctgttataaaaatattatggcacatagggattaaatccgaggtcttttttacgcccattattccgccaatttgagcaactgataaaacatcaccttttttaataaggccatcttttatcaaatctacagtttcctttttcattttaattgatcctcttgcaatagcaactctctttgtctcatccttttcactcacatttaccatatgagctcttcctttttcattaaaatgagtaaattccataaaatcaacctccaattgctgtcatttctctattaatataatttccgttctctaattcatgttctttgggtttgcttttaatagtatcagtaattaccgtcttaatatctttaccttctctaagcaatttctttaaatccacttcagagtttgaatgaagacatgactttagttttccatctgctgttaatcttattctattgcaatttccgcaaaacttacatgatataggattaataagcccgactttcccctttgcatttggaagtttataatatcttgctggagaagaaatatctgctgattctatttctattaattctggcatcttttctaaaactgtattattagaaatatatttattagaggaccaatgctttagagtacctattggcataagttctataaatcttatttctatatcctcatattttgttaaatttataaagtcttctatttcattttcattaaagtcctttattaaaactacatttaacttaattggagtaagcccactctttttagctgcttcaataccttgaagtacatctttgatcttccctaccttagttatctgtgaatatttttcttcatttaaagtatctaagcttatattaagtctattaagacctgcgttttttaaatctttagcataatcctttaatagaattccattggtagtcatagctaaatccctaactccgcctattttacctataccatcaactagcttcaaaatatttcttcttactaaaggctctcccccagttatcctaattttatctacacctaattcaacaaatctttcagtaatggcttctatttcttctaaagttagaatctctttatgccacatcttatctattcctttttcaggcatacaatatttgcatcttaaattacacaaatctgtgactgatattctcaagtaatttatctttctgccatacgaatcaaacatacttttcctccagcttatggaacctcaaaaaataatccagtcagattcttgtctattttctttcagttccattatttcttactatccagcacaatcaaataaataacaagtccgcttgcaaggatatttgagactcgttatttattttcatgtgctcacttcttatttttattatatagataaacaagcatcctcttaggctcaacagataaacatatatttgttgaatctagaatcaatgtatttgatttctgttagttattacacaattctagagtcaaagttgtttatctatatatacttctaaatcttcttttgaattaagatttataaacatatcaaaagaataatcatattttttcagaacattttcttcaataaaaataggctctataatatcaattaatcccgctatagatcttctattaagtgttataagtttttcaattttaggcaatatatctactgaataaaaagcattaaaaggctcaaccttaccttctcttttagcaacacaagcatttgctttactatttgtaagcactttcttaatatacttaatataatttaagtttacattaggcatatcacaagctataaaatatgcatatttgctcctactttctttaagcccaccatagattccagatagaggaccaatttcttttatttcatcgctaattattcttattccgttttctgctgttttatactcttctggcttatttgttacaataattatatcttcaaattctttacttagttcatgaattaacttctccataattctcacttcattaattctcaaaaactgcttatcaaaacccattcgtgaactttttccacctgcaagtattactgctgttttaaaaacatctacattcatacacttataatatatttactaaattagctgcagcattttttctcttttctgaaatgtctttatctataattttagattcaactaatcttaatgcttctgtaggacatacctctacgcaagcaggaccattttccctacctatacataaatcacatttgtttgcaactaatctttctttatgttctaactttccgtctttatcacacattaagcccttttgaataactttctctccagctttatgttcaactattatatcaatggcaccaaaaggacaaactattgcgcaagatttacagcctatgcaagtatctttatttattaacactactccgtctttatttataattgaaccatttggacatgcattagcacacggagcattttcacaatgcctacattgaattggagcacttacatctgcagttttaataacttttaaacgaggattaaaattaaccttatccttactttgtacaagtatgttttcttcagaatgtgcaacaacacatgcagcctcacaagttctacatcctatacacctttttggatttgctataacaaaattattcatttatatttcctccttctttcttgaaacaaactttgtatgtagtagatgatgagatttttcaccaagaggttctattaaaaactcttcatataatttttttataaaaggattttcatgagattttcttatttcaagttcagaatcatgtttatagatacctttttttctacttaccaatgcatttcttctatctatatccaagataaacttaggttgtccaccgccacttacacaaccttctgggcaagtcataacttcaataaaatcaaaatcacatttcccttcttttatatcctcaagtatttgaactacatttttcagacctgagaccactgctacctttagtgttatctttggcaatttcacttctgcaactctaatgccttcactgcctcgtacaaaattaagttctaaattaggaatagatttctttgtaagcatctcatagccgcttctaagtgcagcttccattacaccaccagttactccaaaaatattaccagctccagtataactaccaagtggtaaatcgaactcttcatcatttagatttttaaaatctatttcattatctcttataagctgagcaaattcccttgtagtaataactatatctacatccttaaaaccactatcctgcatttcttctctatcacattcaaattgcttgcaagtacatggcattatagctacattatatattttcttagggtcaactttgtctattttagcaccataagttttaaaaattgttccagccatttgttgtggtgatttacagcttgaaagatgatttaaaagctctggatagctttgttccataaatttcacccaggcaggacagcaagaagtaaacattggtaattttccaccttctgttaccctttttataagttcactgccttcttccattatagttaaatctgctccaaagttagtatcgtaaaccctgttaaaacctaatcttcgtaatgctgctgccattttaccagccgttaaactaccaggcttaagcccaaattcttcacctaaagaaactcttacagctggtgcacattgaactatagtaaataattcttcattatgtaaagcctctttcaccttagctgcatttcctttgttaaaagctgcaaacactggctcctttacactttcaagtaatcttctatctcttcttttctcttctattgcatgactgttttctctattttcaaatgcataagaattacatacctgtatacattgtccacaagaaacacaaacatcataatcaatctcttgaggttgtcccgctttaccttgtattgcatttacagggcatacttcaacacattgctgacacccagtacataactctttatcaatatttacaaaaccaatatccataaactaaattcctttcttttataatatatatcaaaaactttatatttccttaaatatatatctacactagaaataagtgacatgttgtgtgtaatgtttcattgaaatttaaaatcacccatttaaattccaaactaatttttcgacttatacctaaaaatatatctcgcctagaaattgaatacatgtttgtgaagttggcattagaaaatgaactgccaatgtcacttaatggctggttgttccattttggtttgtcctaagcttgtcttaggagcaaactgaaatggatgcaacctgacatttagtgacattcagtgaaattttcttagtccaacggaataaacatgtattcaatttcggttagttatatatttaagttgctcaccgctcttatgtttcttattcttttttcttctatgacatcgaataatttaagagcatctttaggacaggcttttacacaagctggttcaccttgttccttacataaatcacatttatatgcaacctttgtttctttctcttctagcacttcttcaaataattccttttgcaaattttgcataactgcttttccagccttatatttagttcccatttcaatagctccaaacgggcaagctactgcacatgctttgcaacctatacaaatttcttcatcaattattattgcattgtcttcatttttaattgcatttataggacagacctttgcgcaaggtgcattttcacaatgtctacattgaaccggaactgtaaagtccttctctttaataacatgtattctagaaattattggtgtttgtatatttccaacagtgactgattcattatgagccttaaagcaagctatttcacaagccttacacccaacgcacttattagcatctcccacaataaaagaattgtaattttccatattaatttcactcctttgtacgctcaaggcactcccaagaaaataatagaccacccaaacgccgtatgacataaaatagcaaacatattgatctaatattcctggggtttgtacctaatacttatagctatccaaatttaaacatagacttatgtagtatcttcccaaaatcataaatatacccacaacttaaatttcacttatattttgaaatatacacataccagaaatgagaggtactcttttgtgtagtgttacattagagaacaagttgctggcatttcttctgtagaagttgttccattttcgcttgtcctgaagcttgtctttaggagcatgcagaaatggtgcaacttctactgttagaaatcctcaacttattctcagtaaccgaaacaactgagtacctgtcatttcggtgaattatttcataattctatatccattagcatatatattcattttattccctcttacaaatccaactaaggtaatatttaatctttttgcaagagctacagaaagacttgtaggcgctgatttagatataattattggtatctctagctttgccgcctttagtatcatttcaagagagactcttccgctaagtataaccgctttatccttaaggaatattcctttcataagtgattctccaatgaccttgtccaaggcattatgtctagctacatcttcatacactacaagcatttcattgctatcacataatgcaacgcagtgaactcctcctgtgttcttaaaaacatccgaataatctaaatttgttctcataaattcgaatatcttttcagtgtgcattttagcatcactttcaacaggtttgcagtttaaggaatctaagaaattatcaattccatcaattgattgatcctttatactttctaaatcaattttcttagagaaaaagctttcgcgagcagcatctttatttttagtctcaacctctgcaattcctttttcttcatttaaattaaaagatattatatcttcactagtatttattaaaccttctgttcttaaaaatccaactgacaatgcttttaagttttctgggctacataaaagtgtagctagtttttttccattaagaaaaattgttagtgggtattctctaactaaaagttcatctacatctgctttacaaatgccgtcttctattttaaaaactttacattctaatgttttttccattatttatttctcctttgcgcactttaaaaataactttgtcctcaataaattcagctatcttattcacatcattgatatccaattgttctatatctagatttagattttcatcagtagctactgctaaaaatttcgttctatctaaactcccattttcacatagaagctttgaatcaacttcttttctatgaacttctattttagggtatccattatttttatatccctctatgattaccaaatccatacctacaaatagttctagtatttcttcaagatctttttcttcctttagcttttctatcatagctattttttcttttgatgaaataaccattttgtctgctccagcttttacaaacctataactgtcttttccctctttatcaatttcaaatttgtgagcatcatgttttaggactcctatgttatagtttttttcttttaatataggtattaatgcttctattaatgttgtcttccctgttccagatttagttgcaactatagatattactttaagttcacttgatttatttaaagatgaattttccacttaaaacttctcctgcctttttatatccaattcccgctggcattattattattccatttgccttgctcatagtaattaactgattagaactttgagatccaactttatatgcatataactttccgttctcagcttttatctttacatatatgtatttacttctgccttctttttctttaaagtcttcagctaatataactgggaaagtattatcactccccatgtttttaccaagcattttttcacaagctggctttacgaattcttcaaaggtagttattgcagataatggattgcctggtaagctaaaaaacagttttttatcaatgactgcaaagcttattggcttccccggctttatagctacggattgaaattttatatcagcatttatttcattcaatacttgttctacaaaatcaaaatcaccaacagaagcaccacctgaagttataactatatctgctttttctaatgcatctttaattctgctttttaaagtatcttttttatcttcaacaattcctaggcataaagcttctaatcctaaattcttaattaatgcttttagtgaatattcattgctatttcttatttgtccaaacttaggagtttcatttatatctacaagttcatctcctgttgtaagtattgctactactggatctctatgaaccttaattttgctataacctaaagaagctaaaactccaatttcagttggcctaatgagtgttccttttcttaaggcaatatctcctactttaatttcttcaccaagttttattacattgcatccatttttaactttctcagaaatataaagagtatcttcacgaacttctactttctcaatttgtattactgcatttgaacctttaggaactggtgctcctgtcattatcttcattgcttgcccgtttcttaattctttatcactagactccccagcttttataaaatcaactatctcaagctctattgaaactccatcttcatacaaatcagtatccgcactttttatggcatatccatccattgctgatttatcaaatggtggaagattgtctctagaatatatatcttctgctaataccttatttaaacaagataaaatatccttctcttcacattctaaggccttagattcttccaaaattattcttaaagcttcttctacactaatcattgctgtttcctcctataatgttcacctgatggcccccatttagtaaacatatctcatcatatgaagtaaaatatacaagcatacttatctattttttgcttgtgccttatcattttcttttaaattcctaatatatattgcaaaaataattcttcagcataattctaaaaatattaaaagaattttagctgtaattgtgaaatttgcattgtgaattgcaacatatatactatttttcagatgttattctcattttctttcttatgttttcatattcagttactatatattcctcagctgatttttgatcttcgattctttcaaccttaattgcacaatacttaaattcaggagtttttgaaataggatcaaggctatcattagttaattcattacatgcaccaatccaccattgatatgtcataaaagtagaaccctttttaactctttcagtaataagtgctcttgatagtacacttcctcttctagatgttattcttacaagttcttgatcttttatatttaactcctctgcatcttcaatactcatttgtataaatcctggttcatctgcaagcttttgaagggcacgacaatttcctgtcattgttcttactgaataatgtccaacttcccttactgttgataaacttaaaggatattcttcatctgttaattcaactggtggtctccattcacaagcaaataatcttcctttaccgctaggagtcgtgaatttatttccttcatataaataagaagttcctttgtgatcttctgtaggacaaggccatctaacaattccttgttcttcaatctttttataacttgctcctgcaaacttaggacatagacttctcatttcatcccatatttcttctgtatttttataattcattgggtaacccatagctgttgctactgcacttattatttcccaatcagtttttacatcccctaaaggctctactgcttttcttattctttggaatcctctatctgctgaactataaactccatcatgttccccccaagaagttgaaggtaaaataacatctgcatgaagagctgttttattcataaatatatcttgaaccactataaattcaattttatctaaagcttctctaagctctgctgcatttggatcactttgaactggatcttctccaaatatatagtaggcttttattttatcttccttaagaactaactcaggcacttgagttaagaaatatccatttttatctgaaagttcaactccccaagccttttcaaatttttcttgtactttcttatctgttacaagttgatatcctggataattattagggattgtccccatatcacaagttccttgtacattattttgtccacgaactggtccgattccaacactcggtcttgcaaagtttcctgttaaaagagcaatagatgcaagtccccttactacatcaacagcttgtgaaaattgacaaacacccataccgtataatattgtggcatttttagcttttgcataagttctcattgcttttcttatatagtcagcttttacacctgttattttttcagcatattctggagtatatttttctacttctgctttatacttttcaaaatcctcagtgtatttttctacataatcatgatcatataaattttcatttattaacacatttccaaatgcattaactagagccatattagttccaccctttagttgaagccataaatcagataatcttacaacatctgtttttctaggatctgtcacaattacttttgcacccttttctttagctttaactattcttcttgctactataggatgagtttctgctggattatatccaaatataaataaaacgtctgaatcttcaatttctggaatagaatttgacattgcaccatcacctagtgaataagtaagtcctgcaacagatggcccatggcatactctagcacaatgatctatattgttagttccaataactgctctcataaatttttgcattacatagtttggttcatttcctggacctctagctgagcctgtccccataattgcatcagggccatatttagcttttatcttcataaggttttccgctgtaaatttaatagcttcatcccatgaaacttcctctaattccccattttttcttatcatgggttttttaattctagaagttaatatttgaggatcatttaagaaatcccagccataatatccttttaaacataattttccttcattattatctccatttgcaggttccgctcttacaatttttccatccttaactacaagatataaattgcacccacttccacaataaggacacaccgttaacactttcttttccatattctaatacactcctttttaggcataatcaaaaaataataaatcatcatatgccttaattattcaatcactaaatcaaatattatctaaaaaaacaaaaaaccagtacaagggctgtttatttcaacggtccttagtactggtttatttaaaagctaaaacataaaatcagctctatcaaaaaataacaagtaagtatgctaatatattttcttcatagtgcctaatatttttcttttcaatccaaccttaaattattaacttttctaagcttaatctattaattttattgttataactactgttctattatcattttctatattacaaattttccagctataagtaaagtctttttttaatatatctttcacttcctggaggaaatttttttcaagatgaggcttcattatcttccaataatctgctaccatattgacagcaccttcattaaccaaaatttcactaagatttgaaagtatcccttttatgtctacaattattgtatcaggagaatcaatcttcactttgacatactctggtcctctacctctgtagtattttacaattttaactgtaacttttttaatttgttcttgcaattcaagatttatagcactcattttctatttaaatctcctattttatcaacaaaatccagttctataaattttaccttgttgcaatattttagtcaattcagaatattaatgaaatcttttatttaaagcttaatttcaacatatttctaattaattatcacttatcttaagtctttcattttttcttcaacgagcttataattggtattattaatttaatctataattaaactatagtataattatttaaatccaaatgtttattaatataaattttccctcaggaggtaaatataaaatgataagtacagctatactaactataagtgataaaggctacaacaatcaacgagaagatctaactggtccagctataaaagatattctaccaagtgataagttttctgtagattattataaaataatccctgatgaagttgaaatgataaaagaagaactaatatatctttgcgattccttaggtattaatatgatcttaacaaatggtggaacaggtttttcaaagagagatgttactccagaagccacaacaagtgttatcgaaaaattagtgcctggtatccctgaagcaatgagaagtgcttcactaaaaataactcctaaagctatgctttcaagagctgttagcggaattaggaaaagtaccttaatagtaaatttacctggaagtccaaaaggcgctgtagaaaatctagaagttatactgccagcccttcctcatggaattgatattctaacaggtgaagcttctgaatgcagtagataatattgaatttagatttatgcactaatataccaaaagtagaaacattgttatttcgcaggactatgaaaatttctctgaaagtactacattgtacagcggtgcaatagcaaaactatgttataaaatagaacacccacgaagatcccaattttagatttccgtgggcttcatggttgtggtgaaacgtgacctttgaaattcactatcaatttattctatatctaaccttaaatcttacttataaatgtatctagtagcaacttatatcccatatcttcacttaaagttgcaacattgtatatttaacaatattgggtttctttcactattttcctttcttcaattatatttttattctgctttgccatattaactacaacacctttcctaacaataatttatataactctttgtttgaatgaattatcattgcataatctgaggataataaaaaaagatatgaatagtatttagtactggcattactcttgatttcatctctatattccaatataatgccgtgcttttttaaatctcagttttaattgagattacatcttcttatttatcaattaatatcacatctccactcaaatcttcatctgtatttctaaattcacctccgtaattctcattaatcactataataacctcttcaatcctgtgtaacactactttcggatatttaatttttagttcttctaactgttctaacttgtatgactttttcatgattaaatccccattcaaaatagaaaaaggaatacttaacgtgcccaattgctttaaatattccttctttttattacgtaattataatatattattttattatatactaatattaatttcagttgtgcatgctacttctgcttgtgcttcagtagcttttataaacatccaatctggaacgttaaagcctgaacttttagccctatttaatctttcaacaaatgtaatattatcctcattatttattaatccatgtcttccaagccatcctattacaagattaccttccccatcaccatattttgaagtatcataccaccattcagccttgctattatagtatcctaaatttgaaattatagaatctccttttctccattcgtcttctgagtcacaattttgtatgatatttattacatagttaatcttcgcaatatactcataattctttttattaatgcataataattcctcaattgagcttattatctttcttccatcatattcatttcttctaatcatatatgctagtgatatattagcagtttctatattgtattcataagcttgaaagaatagatctgatgctaatttgaaatctttatttttgtatgcaataatagcaaaatcatatagccttctctcatttgtattattaccaataatatccttaattatctcttctcctctctttatatctttattaaatcctcttccattttttattcttactccatattcaaaatcggctaatctattttcttgtctagctctattataatattttttagcacgtgttacatgtttctttaatccatctccatcaattaacctattagctattgcatgacatgctcttttactaccattttttatagcttgttttaataacgcctctccttttttagtatttttctctatataaattccatcaaacaaaaggtcactatattgaattaatgcatcctcattattttcttttacttgattctctaacaacattaatccatattcacagtttttctctattccatcaccctttattaacattaaagcatattcattctttgcttcattccatccattttgtaccaaagccttcagtatttcttctccttttaaggcgttcctattataatacattccatatattaaatctttgctatattctaaagtagcatctgtctttccattttgaattaactcttcaaataatttctctgctttagctatatcttgttttaagtttaagcctgtctttaactctgatgcatacataaatttcgcataattgcaatttttattactagccctttctagcaaactgctagctttttctatatctttacatacatattttcctttaattaaatactcagctaaacttgccatcgaccatacatcatcatcttcatcaatatttttctctagaagtttaattgcctctgttgtagaatatccagtaatcgaaccttccaacaccttttctgctagcattctttttgcatatgtctcattttcttcgcattttttttccaataattctttagcttttactatatttttagtaatactttttcccttaataagttcatttacataaaaaattacggcatcagaaattgatctttctattaaatctagtattattttttcgctttgtctaacatctttttttattccatctccattaaataatcgtttagcatattcaaataatgcgagttcattatcaaactttgcagcattttttagtaacttaattccttcgttacagttcttttctacatatattccatcaattaacatatgcccaagaatcctagaggccataaaatctcctttacttatggccaatcttaataatctttctccctctattttatcttgttctattattaagccttgtatttttgctactcctaaaattcttatagcatctatatctctttcaccaatttcttcaaaccaactaattgcctcttttttagatcggatagtactatcgccactaataattgaattgcctagtataattttagatttaatatcgccattttctacatcttctattaataagctttcgcctctaactatatcttgttttatgcctaatccttctaataatcgtaatcctaatttcctctttgctcttctaactccactttttgagagttcaacaagtattttttccccttcatccaaatttttatcaattatttgaccttcaatcaatttatctgcccaaaataactttgcattctcacttccttgctcaattgcttttttaactaatttaattcccctatgtttttcaatgtcatttttacttgtattagtaagtcgtataccatattgctctatggcatataaatcccctactgatataagctcttcaaacatttctctagctaatacttcattacgttctaccgatataccatcaaaatatctattcgctaattgtactttagcagatgtacttcctttctgtattgcttcatttagtagtttaatccccctctcagtatctacttttatatcttccccatctattagtttgattccaagaatctccattgcctcaatatttcctctttttaaactttctttcagtaactctattcccttttctatatctttatcaataatatatccctctataagtaaattagaatacataattattgcatcttcatatttttcttctaccaaactattcaaaaaactcataccttcattaatatttgtttttattcctataccatatatataaactttagctaacaataattttgcttgattattcccatcattagcaatatcctttaacaactttagccccttttctatatccttatcaaatccatcagcagttattatcctacttgcatattccaattttgcatataaattatctaattctacagctttaagtaataattcttgtccatattttatatttttttcaattcctgctccatctaaaagtctacttcccaatctaataatggcatcttgatttccattattaatcataccctcaaataattcaatgctccgatcttcatttctagatatgccttggccacttattaatctctctgccatatataattgtgctaaattatctcctagattaactgcttcttctaataattttattcctttttcactatctttcttaacctttattccatccaaaagaagatttgccatgaaaatctttccttccaaatttccttcttcaatcgcttctagcaacaactgttctcccttatcataatcactattcttaatgttaaaataatatattcctaaaaaactctttgccttacaattattcatctcaatagctttttgtaaaaatctaattcctattttctcaaactcttcacttctatatattatttttttcgctatctttaataatatattatctctgcctctagagaaactctctttaataaaaatatctatatatgaatccagatcgcttttagtaataattttactgttttttatatggcttaagaaatctataaacaattctgtatttatattatctagaaccccaaaccagttgaaaatatctcttgtaaaaagtctgatatcagttttaccaaaatacttattaagtatatagttagcaaaattattttcattaagttttattttagtatacgcattaatacttacctgcattttaattttattaatcatttttcgaacttgtggtaatctataattgaaatttttaaagtttaaaaacgattctatctcttccatatctagaacatttatagaattaaacattgaaagcaataataatatctcttctaatccattattattttcttctatccatatctccgcctgattttcaaactcagttatattatttataaattcctttttaatatactcttctttttcgttatcatttaaactatttaaaatctttatttcatttattattaattctaatctccccccactaatttctaacacttttttatttaattcttcattattaatctgggttattagatttacttcttctagagtaatttctggcatgtatatacaatctgaattattaactaataaactatcttctttaacagaatcaattactaatactattgatatataatcttttatttctaataaaatcttaaaaaattcttctatatctttaattgtatcatctatagaatcaataactagcaaaatatttttattctcttttaataatctctgaaatacttcaactataatacgcctatatttctctatagagtctttttcatctcttactttctctaatatatttagattaatcttattgattaaccttatattgcattcttcaattataacctccatcatatcatataaatttgtagatacacttaaggaatatgctattatttgatagcatggacttttattaattaaactctctttaacattagcaattaaagtcgattttcctaaatctcgttttcctttaacaataatatgactaccattataattttctattttatctattactttatttaccaacgtttcattataaaacttatgttcttttaatttattatatattgagtcaatattcttagtcagctcttgtgatttaatatttgcataatttcctatatgtatattagaaacttcttgttcgattctatctaaagattcatatattaaataaaatattgctgctgtaaactgcaacttaattctatattcatttgtatttctttctagatattcctcctttaactgttgtaaaatggatataataatactctcttgtgaattagtttttgctttttctattatactatttaaaattaaatctaatgtgtcatttacatgaaatctatttgtatttaaagtttcatctaattttttaatccatatttctattacattatatatatcatatatcatattagttaggtttccattatcaaattcacagaaaattctttttaacttttctataaaactactatttacatttaatctgtaaattatcttatctgctaaagtaataaaaatatctttatttattttatctccaaatattatttctagaaagtgcatatatttttctttattatctataaatatagaatcttgtgctagattttctatttctaaattcattgattctatattaaatttttgtctatattgaatcatatttaaatactttttattctcttcgaataaatcagttaataataaatcactatccttttcttccttaactaaattatttttttttttaccattcaaataaaaagtttttccactgggcatttctgctaaagtattttccacaaatccttttcttaattcattatatgctctaatttctattcttattgaagcttgagaattatcataatctattacatgatacccatctaaatatttataattttcattttttctattttctccgctctgagacgggctaacagatataaattgacttgaattagcatccgttttccacgcacttcctttatgtacatgtcccataaagataaaatcatacgagtttctaatgcttgtagatgttgattctacttcaaaatctcttaaattttttgtatcatgatgtatcaacgcaatcttaatatcacactcttctttttcaagcttttgtaatgacaaatcaatttgtctttcacctaaaacaattcttccagcatcctcatcactgttataacatctccatgcactattcaaacaactgattcccactttaatgccattaatttctattatatacgtggattgataattcgtaatttctacttcgttatattcttttatatatttttctgtatacgctttttcgaactctttatatggaattatcctttttaaaccttgaatatcattcttatcttcaatctgtttattaatagcttctatagaatctaatgcagcaaaaatcccaagttcctcctttttagtatccaattttctattaatatcatgatttcctggtacgaatataaatctacttttttgtaaatctattgctttagatatacgttcgatgaaaattttctcaaacttagaaaacgcatcctttatgttattaaaactttttccacctttatctattagatcaccagtaataaatactatatcaatttttgtatctttattatatttttctaaatcttctataagagcttttataattttatccgagtctatatcgatattatgtgaatcattttcttttaaatgaatatcagataaatgtattattctcatttttatccctcacctttttagtatatattttgaatttaagtttatgcattaggataaattctatatgccaatgctcgcatgtttaaattgcatggttattattacaacatatatactattgtactttttatgctaattaattacaatatatcctttataattctataattctatataatcctattatctcaatctacttttataattctttcacttataatgccttttatattacttattttaaagttattagtataatacatatttattagtgctttataaatacttaaaaacaattgattgaaaataaacaaagtagcttatatcatatttaacgatataaactattccatttttatatattaaatttagcttttaattcacttatctattaatttatttgaattatttctagtaattacattagcaatattccaatttcagatacagaatcgtgttacaaaccttaaaaatttctatcagtatcaatgaagtgaattatgacatgtgaatattatactaaaaactaaataacaattaataaatctacgtcatttaatgtataactttacttatgccttcttaatatgatagctctttctatcataaatataattctaatttctcaaaatttatttaatatatgagattttctgtctagtttatactgattgtgcttgacatatatgattaaacccttcttgtacaaatccatttgttatagcagttactacattattaatttagccttcaacttcatctatttgtttagtaatagtaacggaaaatattcacctaaacttttaaaagttaaactagatttttataccgaatttattcctatgaaaataaaaatttctataacaatattttaatttgaaagtattgtttataaaagtttctttttctaatatttcataaatgttaatttaattgcaaaataaataatccatgacattattcatggatcttatgttggagacgaaacataagcacccagtatctattatttaatttcattatcggattttatccgcgcacttatctatccaaggttttagtatcttttcgaattagatatttttctatctttctcataagtctacttcttatcaaataaaaataggcaaagtaaattacaatatagatatacattaatatctggtatctgtacttatcagcataaagtgcagttagaacacccatataaagaatgatagctgaatataaatttaattttcctaaattacttaaatacttattagcatttgtaatttcatatatcttttttgttttcgataattttttattaattatagcttctggttttttaaatatgtaaaatactccattaagagcatatattaaaaagattattgaacatatggctaaagtaaaaatataaaaattcataactacctccttcccatatatattgtaattaattttctatattctatgtttaattgagcatctgatttgctagagtttaagttcaaatttattatttaagtgtatatacagataaacaaccatacgcgtaaagcttaaccagtaatcaccaaattgtagggggaagagagtagctcattaatcttccctctgtagtttggcgttttcttttttctcgcttacagctccttcccaaacttactagtatctcatatattatttccaagttttcctttttaggaatgaaattaaggcatatttctttaagtttacttcctatagttgaatatatcataagcatacttatttctctattttcttctgttttatacttaaaatacaattcagaataaactgtatttattagcaaagttattatcaatctaccataaagcaaacaatttaagtaatcaattcctgctgatttgacatggtcaatctttccgtagcttttccagcatttaaataagagttctatttgccatcttaacctataaatatcaagaagcatgtccacatcagcttgttctttttcaatgtttgttatcataataacccagctcattagttccttgtcaattttctttggggctcttccttgagcttttgctttttctctagcccttcggattcgcaaattcacaatttcttctggtaatctttttcctattactctaaattcttctctattattttgtttcattccaacatataaataagtatctataacaccgctcgatttctttaagaaatcaatcatttcaactttttcaaaattcccttttttataattttctttataaagtgcagtattatatttaattttactaagaaaaaaagcagatttcttttcaagcattttaaaacactttttatcgaaatatcctaaatcaactaatagaagttcattagtgttaattttgtccgccaaagttttcatatatgaattatcatttgttgtgccatcctcaaattcaaatgtttcaatctgcttacttttgaaactatatactgtttgtattttcatttcagatgccgacttatcttctgaaaaacctttataagaatctcttaacgagtcatttagcttgattaagctactatcgcagatttttatatcattaaaggctttaaatatttcaatgtgattgtgtttaatgctcttaattattttatcctcaataatatttgtaagaatagtttttaaaaagtttgaacctgccttgagcttattttctatagcttgcctagacactttcaaattagggtttatatcttcacaaaaatttgctatatttcttaatgacggattttcaagactataaactccaaaagtaaatgctttaaaaaatgtaaatccatccaatttactatttctttgtgtaaatccagtagtcacggcggtttttgttattaatctttttgaaaaaagattaataattttcttaattttatccatactacttaatgaatttaaattaattttcattaaaagtcattcctttcttttttgtgtttattgttaggaatgactttttttattatttttataactgttaatatatgatttaactgttaaaatactcattagctttacgcgtatggataaacaacttaagaattttatttatactttgcaataaataacattagataattgcgaaactcattgataaaaatgaataatgattgatttgaagttgcaaaaacattattaatggatttaatggttcctgctatacaaatataatagttgacttcttaaaaaagggcgcacgaaataaagcgaaggtgaattccaatttttataaataaattttatgcaattaatggctttaagcttcggatatatttatgtttatgaattttatctgccacgataagtgttattagttgagttattccggctagaagtaaatcagcatgaagtgtttgctcattttgagtcttacgctccgcgacgcagtaactatatttgaaatgatttatttttttttcaacagctactctgattttataagtattactccattcttgggttcctcgtgttattccaggatatgcgcgcagattcttttcaggataaatataaaacattcgtccacataaggaatttgtacatggattttcacattgagttacacgtttgctctttttggtttctttgttatataaccatttcattttagggcatacaaacttcattgttggaattctagaacgaagatgacttttactaccttcacgtttcattggaatagaaggatcattcggacagcatggaatgccgtcttcgtttaaagggcaatcagcattttctagtgtaagcctagtttttaaaggaatatatgctttgtcaaattttaattcgagaagaagatcacgataaatttgaatactgtcaaaagcagcatctcctaaaaaggtttttggacttattaatggatgcttgttaaaaaaatctttgagaacagggataagagccttagaatctgcaagagatttatcttcatcaggtgaatcagattttttctcaacaataatatcagggtgagcattgagaaaatctttattatagaacgaaatatctcttacgataccgaggccattagtaatgattccgaatttaaaagcatagcaaaaatgcccattaatatacatttgttggatggcagggttggctgaagcgtgtgatggcatagagccataggcagctttataaggatcataagagtcatctaaattgcatgctttcttaaaatttttaagctgttttataatgcgattagcatatttaggattattttcagtgacaaatgcttcaaggcctgaagtatcaaaaatagtcatggaagcaagagccgtatcaatctgttggcatatcggttcagtaatatcaacaagattatcgaacatggatcgtaagtccaaaagaaagtcctgcttgaaacgagtaaacttagatgaatcaggaacttttaaaaagccgcagaagtctcttagttcttgagaatatttaaggaaaataattaaaagagaatctgtaggaatagaaaaaatgcgttgtaaaattaaagcactgatcatagcataaagctgatattttcgcggccttcctgtggaagcgtaaaaatggttaatgaaagatgcaggaactaactcatcaaggtcgatagtgttttcgagtaaagaaagaaattggaatttatcattttcaaatttttctttgcaatcagaataaacatctgccaaagaaagctgtttatatgttatcatatatatgactcctttctgaggtatatggtagttttgtttttaggcaattcaattttaccataaatcagtgaggagttattttattttgctaaaaaaatatcccgcatttctgcgggttgcggcgtttcgcaaacgcctaaataaataacatactagaaaggagaaacatttttatgcaacagacattgacaatgagctggtaaaagctcttaattgtagtttgttcaactaatgcttatcacaatgaaattgggatcaagctttagtggggaaacctgcaatttagcactttcagcgaaattttcatagtcctgtgaaataacaatgtttctcctttcgatggagtattgaataagtccaagttatatattgtttatctatataaaattgctaaataaaaaaatatcgcaaattcaatgaataccgcgatattttaatatctatattatttattattgttgcttaaaattatgcaaatctttcaataaattcatttaatctttttaaattagcatttatactttcaatagtagcacttatttcttcaatggctacttttcttcactttctgatgctgattcattcacagctccaattatagtatttattgacttattaatattaattacaatatcatttattgttctagttgattcttcactttggcttgcaagctttctgattcaagttgatacagcattaaatcctttgccatgttcaccatctcttgcagattcaatagctgcacttaatataaaattcttaacttgtccataataaaaatttttatctaactgtctaccttaaagagaacatatcattaatccctagtcgattcttttatgtacttcttctcttgaatcttcaatagctgaatttattatatctgtcattttaagcaagatgctagaatccccgctccaagcaatcctgcatcatcacctattttagccaatttaatatttacattaatattgttaaatacccttagcttaacttcattaattaatttttctaagtaattagaattgtttaatataactgatccgccaagtactacaacttctggatctactatagttattatattagcaattgctttagataaatttacagaccactcatttaaaacctccctgcaatttacttctccatccttagctctgtcaaaaacatctttggcagtgagttcctgtcctaacttcttactagcaattctagaaatacttactccactgcactgtccttctaatcctccagcgtttaagcccgcatgactatattcatcttcatttattatcatgttacatacttccccagctatgttattaaagccattaattatctcatttttataaacaaatccgccacctactcctgttgatagagtaatataatatacactttcagcatttttagctgatcctatcttagcttcacaatatccagccacatttgcatcattatttacagttgtaggtaatttaaaacgctcttcaaagtatttttttatttcaactccttcccatccttttaaattaggcggattaattattactccatttcttatatctaaaggacctggacatgccacgccaatagcctgaatgttatatgtattccacttttccctaatgctttttattaaattatctacattatacttcgcacctttttcaacaatattatctattttaaatttatcaattaaattatattcattatctaaaatagcggctcttaagttggtacctcctatatcaattcccaaataataattcatcttgacctcctaaaatattaacaaaactatttgattaaataaaatcttctatgatattttttaattgcgcgcttacttaaaattgttatttcttattcgttccaaactttttataagcttattttattaaaagccgggataaatcctcggctttttactattttttctttaaatcatttatttctttctgcatatataacatctctttagctaaagataaaattatttctgctgccattaattgatcttcagcatgcataagtattaatgaaaactcttgcttatttccttttgcttcttcttgtataagttgtgcatgtgacttatgtccttctctcataaacacggatgcatcttcaagtaatttttctgcctcttctacatttccgcctcttcctttaattaaagcctggattcccatactctttgccgttccaacattactaataatattgaaagctattaactccattccttccattttaaaccaccttatttcattaaatctatagcgaaagttaaaactttgtcagcattcattctgccataatcaaccatactaataacttctactgatatcttattttctactgtctcttttacactgtctttcataaatccaatttgaggtcctagtaaaattacatcagcactttgccaacacttagataaatctgtcgaaggtatagcttctattgttacttctatacccttttcttttgccactctaatcatcttttgtacaagcattgatgttgacattcctgcattacatactaataatatttttttcataacaaaacatctcccttttatttttatattctttctatttattcttcaatctgttttttctctgcaacctttaaaaaaggaatatatagtaagactgtaagtgcaatcataattatttgaaatactgaagctctccaatctccaccggttgctagaaatcctgataaaattggtggagtcgtccaaggtgtttgaattactactggtgacatccatcctgcctcagtcactaagtatgcaacagttaagcaaattggtgaagctaatacaaatggaatcattagtgttaaatcaaatactattggtaaaccaaatataactggctcattaatattaaatatacctggtgctgtggaaagtttagcaatatctctataatcctttctctttgagaataagaatatagaaattaataacgcaatagtattacctgatccacccattactccaaatgtgtccttaaatgacatgctaattatgtgagggataggttgaccttgagcaaaagcagtcatattttcattcatagctgtgtataatactggatccataattggcgcaattacccctcctggatgtatccctattgcaaataataaattagacaacagcattaatattataaatcctggtaaactagtaactagagctaccaatggtcgttgtattgtttttaagatcagtgaatttatatctgtcccaaaaagttgttttattgcaaatgacactacagcaaaaattagaatagtaatcattataggtattaaactattaaaagactttgtaacggctggaggtactgcttctccacctatattaatcttaagtttttcatttttagataaccacataaataattcagttgataatagtgacgttataatacctacgaacatcccacctgaattagtggaactataagaaataactcctgcaactttaactgcctctttaactcctacaggtgtagttgaaatcacaaatggtaataaaacaacaaatattgaaatagctagaagcgctggtgctattggattttcaaatttcctatttattgctagatgatatgcacatgcacccgctagcaatactgctaagaaatttaaagtaccattattaatagatgttccaacatcttgccaagtagttaatgttgctggattaattattttagacataaatcctgttggttcaataacaacatagttaatgaaaatcattaagcctgcaataataatgaatggaattagtgatgcaaatgcatctctaagtgatctcaagtgtatttctccacctaacttttgcgatgctttccctagtttttcaaaaaatttgttcatcaatattcccccttttttattcttcaaaaccattatttgtagctaacagtttataaaactctccacttttctttactgttctcttttgagtttttaaatctaaactaactaaaccatacctatttttatatgcattcatccatgaccaacaatcaatgaatgtccatagatgatatccttttatattacatccctcttcaattgctttatgaacatattttaaatgtcccttaataaaattaattctgtattcatcattaatttgcccattttcaagaaaacgttcttcatcagtgacacccataccattttcggatataaaagcttctatatttccataattttctttaacatcattacaaagatctagtattcctttctcgtatatttcccatcctctataattattaaactttcttcctggcattatatatggatcaaaaaaccattctggcataaatggagaattaggattaacagcattttctctcgcctttgctcttcttggttcataataatttattcctaaaatttgagctgtattttctttaattatttttagctcatcatctgtatatataggaatttgattatattttttaagagtatcaactaacttcttaggaaattcgccttttacacaaggatctaagaagcttctattataaaataagtcacaatattctgctgcctccacatcatacttatttgaacttcttggataagtaggactaagatttaatattactccaattttagattttagattgtgttttttaaatctttcaatggcttttgcatgtgcaagaattgtattaaaagctacttgtgcacccctcttaaaatctattatgtttggatagtgaaaatcttgtaagtaccctccaagtactggtcctaaaggttcattaaatgtaaaccaatgctcagctctgtctccaaataattcaaaacacttatctgcatagttcacatatgcctcaacgacctctttactttcccatcctcccttttcctgcattactaacggcatatcaaagtgatataagttaataaaaggctttacatcattagctataaatgaattaattacattattataaaattcaactgctttttcattaacttctccatctccatttggaaataatcgagcccacgaaatagacattctaaatgaattatgtccaagttccttcattaatttgatatcatcttcatacctatagaagaaatctgaagtaatatctggtccaacttcatcatagaatctgtttttttctaattgaaaccaatgatcccaaatagtttttcctttatcagtattacctttgccttctgattgctctgctgatgaggcactcccccaccagaatccttctggaaattcataaaattttttcataagtaactcccatcttaatatatattatgtttctcgtctcgagcagaaaacattttcaattatgattatatatgtcctttcaaaaataatcaataccttttttcaaaagatatataccttttataaaaagatatataaataccagtatatttttatttatatctgatatataatatatgtgtggaaacaattgagaaaggaagattatatatgccgcctaaatacaaagtagtatatgaagatataaagaataagataaataattatatttataaaaccaatgaaaaaattccagatggagattctttagctgaatgctataattgcagtaaacttacaatagctaaagcattagatttattagttcaagaaggtatgctaataagacgacagggctctggtacttacgttaaagaaaatctgtccaacaggactactatagaattagataatatttcaggttattctaaaaaatttagtacagagcatctaaaatcaactgtgatagatttttctattatcacaccacctaaagaaattgcagaaaaacttaacatcaccgatgaatatatatataaaattttacgattacgatctgtggataatgacccacaaatactagaagaaacttatatgcctatttatgttatacctggactaaaagaacaccatttagaaggctctatttatgattacataacaaatgaacttggatttaaaattcaaagcgcccacatctctataaaaggtgatgaggctaactctaacgataaactttatttaaatttgacagagtctgactttattatagagcttgagaaaatatgttatttagaaaatggtaagattttcgaatattcgaaaacgcaccatagatatgacgttttcaaattcaatactgttttagtaaataatatttaaattaattccttcttctgtgtagcttattgtattatcatctaattaaaattcatgatttatggactaccagtgacaataaaaacccacgaccaactgtaagcagctatttaagccacatacaattggtcgtgggtttcatgttggaggtgatacaccaccttttaaatccaccataaattttatttttcgactgcttccttattctatattataattaaaatgatattacttattctatactaattaatgaatgaatggagatgaattctagttgaattacgtatataacatattagttcaattcgtagatagagtcgcactactgcttatgtgtttatttgttataacaagatttggaggctttagagaaatatttagtagggacaattatagcaaaagagactatttaattgcttgtatagtattttctctatttgccataatagctaattatacaggacttaatgttgaaggctctctcgtaaatgttcggacaataactatagtatctggaggtataatatttggaccagtagttggaattgtagccggagtactatctggtgtacatagatatttaatagatgtagggggtataacttcaatcccatgtcttataagcagtataacagcaggaataatatctggatatattaacagaaagattcaacgaaactatagatggatatctggaataatagcaggggtgttttctgaaaccattacaatgattcttatacttttattaagcagacctttttctttaggcattgatatagtatctaaaatagcattaccaatgatactaggtcaaattagtgtaggctttattgttcaattaattcaaagtatagaggacgataaagagaaaatagctgctagacaagcaaaactggcacttgatatagctaataagactctcccttactttagaaatataaatagtgattctctaaataagatatgcactgtcataagagatgatattgatgctgacgcagtatcaataactgatacaaaaaatatattagcttatatcggagttggaaaagaatattacaacattggacacgaaataataactgaagtaactaaagaggcaataaatagcgataaaataattataagaaataatggactgcaagataaaagcttaatgttaaagtctgcaattataatacctcttaaagtgaagaacgaagttataggagccttaaaaatatattataaaacctctcatagaataacttattctctacaagctcttgctgttggactttctcaaattatatcaacattaatggaagtatcaaaggttgaacaaatgaaaacaatggctaataaagcagagcttaaagctcttcagaggcagataaacccacactttttatttaatgccctaaacgctataacttcctttattagaatagatccaaataaagcaagagaacttataataaacctagctagttatttgagatataatttagagataaatagtgaatttatagatattaagaaagaattaaaacaagttaaagattatatagaaattgagaaggcgagatttggaaataaattaaatatagtctatgatgtagataatgtagatctcgatataccaagtcttacaatacagcctctagtagaaaatgctataattcatggtattttaaaagataagggagcgggcacagtaaaaataattgtaaaggatagaggtgaaaaagtaaaaatctctataatagatagtggtgttggcataagtgaagaggcaattaaaaatatatataaagatgcagtgcctgaaaataaaataggactttacaatgtacatttaagaattaaacttatttatggggaaggacttattatagaaagattagaaaagggaactaaaatagaattttacataaagagaaggtgatcatatgaaagctataatagttgaagatgagtttttagcacgagaagagcttaaatattttattacaaattatagcaatatagaaataatagatgaatttgaggacggaatagatgtacttaaatttatccaaaataacgaagttgatgttatattcatggatataaatatcccctcattggatggtgtgttacttgctaaaagtataagcaagttttctaaaaaaccatatatagtttttataacagcctacaaggaacatgcggcagaagctttcgaaatagaagcttttgactatatactaaagccttattcagaatccagaattgtatctatgctaaaaaaattggaggaccttaataaatataaagaaaacaacttaaataaagttaacatacaaaataagataaatttatggaaaaacgaaaaaataattgtagtaaatatagatgatatatattactgcgttgctgaagaaagaataacccatgtttttacgaagaaagacgagtattcagtaagcttaggtatagctgaattttatgacagcctgccaaaagatattttctttagatgccatagatcttatattgttaatataaataaaataagagaaataataccttggtttaataatacttataatttaaaacttcaagatatagattatcaaatacctgtaagcagaagtaacataaaagagtttaaacagcttatgaatatataaatgtattctatgtaattttctatgcatttcgttcaataaagaataattttatattacaccgatttataatgatggtaatgaaacagacaacataaaaagttaaatttcaatagtgttgtaaataccttctaaaatctacttgttaatatattaattaaggagcgatgaacgatatgaatgaaaaacatgaaaaccgttggttaatagttttaggtacagtaattgcccaattgggactcggaacaatttatacttggagtttatttaatcagcctctagtagacaaatttggatggcagttaaataaagtaactattactttctctataactagttttgctttagcattcgctacattagctggaggtaaacttcaagaaaaactaggaattagaaaacttatatcaatttcaggtttaatcttagggattggtctaatattaacatctaaagtaacttcactaacaatgttatatgttacagctggcataatagttggagccgcagatggtattgcatatcttacatcactttcaaattgtattaagtggtttccagaaaaaaaaggacttatctcaggaatatcagttggagcctatggaactggaagtttaatatttaaatatattaatggaagtttaatatatagtaatggtgtttcagaagcatttttatattggggaattatagctatgatattggttgttattggtgcccagttattaaaagatgctccaatagtaagttctattattaataacactaataataattcaaatgaaaaagatttttcagtaaaagaaatgcttaagactaaagatgcgtactttttatttttaatattcttcacatcttgcatgagcggtctttatttaataggaattgttaaagatatcggtgttcaattagctggacttacacctgctgtggcagcaaatgcagtagctatggttgcaatctttaatacagctggaagaattatattaggagctttatcagataaacttggcagattaaacgtactaatttttacccttactgttacaactgcttcagtatttgttttaagctttgtacatttagattttataattttctttatatgtgttgcttcaattgcattttgcttcggcggaaatattacagtatttcctactatcgtaggtgatttcttcggttctaaaaatcaaactaaaaactatggaattatatatcaaggatttggttttggagctctttcgggttcgttcattgcaacattagcaggaggctttatacctacctttataattgttggaggtttatgcatagtatcgataattttaacttatatgatgaacccaacaaaatttaatacttattttgaacgaactcatagattagtagaagaaatttcataaacattgcccaattaacacatatattgcatcttctcaaccatgaataaatttgctaacaattatttcttaaaaattaaatatattagcgatatcttgtaggtatttttattttctttctaatttactgctttctatcaattaaaatattctatgttacttatagcgcgattcactattaataattctaaatatacaaaataaaagacccacgaaaatccaaatttgatatgctccctttatagtaaacagttaaaataataaaactgtttctataaagggagtattttaatgtcaagaaaaacgaaatgttctctggaagagaaattgaaagtaattaaagaatacctatcaggagaaaaagcagttatacagatatgcgatgagatgggaattcatagtgccacattttatgactggttgaaaatatataatgatgttggtgaagcaaatttaatagtttctacaaaaaacaaatattattgcgattcgcttaaacttaatgcagttaaagattatctagctggaaaaggctctttaagaaatatatgctgcacatatgaaatttcatctcctcgtgttctcagcgattggattaagaagtataatggtcataaaacaattaaatctcataataagcaagggaatagaattatgactaatggaagaaagactacttatgaagaaagaattgagattgttgcattctgcatttcgaataatgatgattatcaagctactgctgataaatttaatgtttcttatcaacaagtttatacctgggtaagaaaatacaaagctaatggatatgaagagctaatagatcgtcgcggtaagcgtaaagatactgatgagattactgagtctgataaattatccgcacaattaaaacttattgaagcagaaaatagacgtttaaagatggagattgatttcttaaaaaaattgaaagaagtagaaagaaggcgataagcactaaaagactccaagaatataaatatatttctataaaagaattacatgaaaaaaatggctatccaatagctgatctatgcagtttagctgggattgcacgatcatcttactacaaatggattaaccgttcagagactgaattagataaggaaaattcaataatactaaaagagattgttaagctttatgaagatgtaaatggtatctatggataccgtcggataacaatgaatataaatagactcctggataaacagtataatcataaacgaatttatagattaatgaaatctattaacatgagatcagttataagaaaaaagagaaagcattatattcaaagtactccacaaattacagcagaaaacaaattaaatagagaattttatgcaaagaaaccaaatgaaaaatggttaacagatgttactgaatttaaactacttaatggtaaaaaggcttgccttagcgcaatatttgatttagcagtaagtgctaatccgactgcaaagccactgtttcatagtgacagaggatttcagtatactaataaggactttcaaagctaaacttgataaaatcaaagcaactcaaagcatgtcacgtgtcagcagatgtatcgacaacggaccaatggaaggtttttggggaactctaaaatgtgagatgtactatttgcaaaaattttatacatatgaagaattgagacaagcaattgatgaatacatagttttctataatacaaaaagactacagaaaaacttaaaaggtctgactccaattgaatatcgaaatcagaccttggtttcataattttttgttttttcatctgtctacttgacagggggcagttcaattttagattttcgtgggattcataatgtaggcgaggcatggcccttaaaatccaaaaaagaattatttattaacgcgaactcaatccatgtttacatataatgatttaatcgatattattctcattaattttatacagaagggctctccgtgaaatctgaaggagctttgcagcctgtgtgcggtttccacctgttcgttctatagcttcggatatatgacgcttttcaacttctagcaatacttctcgcaaaggtttgaaagaatcatctcccagaataatggtaccatccgcttctacatcttctacttttatgctaagtggaagattttccggcaaaataacacgggtgttgctcataataatagcgtgttctactgcattttctaattccctgatatttcctggccaagaatagttacgaaaaatatccaaaacctctggagcgaaaaacataccattccgtcctacttctacagaaaaacgttttaaaaagtaatcagctagtaaaacaatatcttctcccctttcgcaaagtggaggtaaacatattgaaacaacattaagtcgataatatagatccttccgaaaagacttttcagatatctctttattcagatcacggtttgttgctgcaataatacgtacatttgtatgaaatgtttttgtaccaccaacacgttcaaactctttttcttgcaacaccctaagaagttttacctgaagatttagactcatctccgcaatctcatctaaaaaaagtgtccctccttcagccagttcaaatttccctggtttttgaaaaaatgcacttgtaaatgctcccttctcatgtccaaatatctcactctctaataaaccttctggaatcgaaccacaattcacttgaatgaatggcttttctctcctgtcactcgcatagtgaatagccttagcaaccattcctttacctgtcccactttcgcctgttagcaataccgtagcttttgaattcgctactcgtccaattattttatatacttcttggattttagagctttccccaacaattttacctggggtcattgctgtcattcccatttcttgtacttcctgcgtaaggtatacaacttctttagtcaattgttgcatgcgaatagctctacttacaataattttaacttcatcaaggttaaaaggctttaatatatagtcataagcaccgtgtttcatagcattaactgcagtttccgaacttccaaatgcagtcataagaataattggcaagctaggcttaattttatgaatttcataaaatgcctgcaacccatccacttctggcatacggatatcaaggatagcgacatcatagtgattttcctgcgccatacaaagtgcctcttttccatttttaacagtatctacttcatatccagccttatttaatgctgtttgaagtaccattctcaagcttagctcatcatcagctactaaaacacgaacactttctgtcatattgtaatcagcctttctttttataaacataattattaatctactttagttatacaacattttacagtatatatcaatattcaaccaaattccatatttaaatcaaatatttaaaatatggaatttagttgaatataataataaacttttcacaaaaaacttttcatttttaaaagaaaagtatctataatttaaatttacttatagcttcatgcaagtcttcagatagttttagtaagttctggcttgatccagcaatttcatacattgatgcagattgttcttccgttgttgcagttactgtttgtgttttctctgcagtgtcacccccaattttttctatcttatggattgaagtaacaatcttattactgtttgatgatatttgtcctaccgtctcagatacacttcttacttgggctgctacacactcaactgcctgtgatatttgactaaatgccttacctgttgaatttacaacatcagttccattttttacttcttgagttccttctttcattacaattataacatcgtcagtttctctttgaatatcgccaataagttttgctatccgcattgatgctatactagactcctcagaaagttttcgtacttcttctgccactacggcaaatccttttcctgcttctcctgcgcatgctgcttctattgctgcatttagtgccaaaagatttgtttgtttagctatagtagatattgtatctactatctgtcctatttcctttgagctttcacctaatatttcaactacatttgctgagctgttaacagctttttcaatcttagccatctggacaattacttcactaacagctttacttcctaattgtgcagcatttgcagtttctcctactgtttctatcatgctatctgtgttctctgccatattctttatttttttatccatctctttaatttcagaagaagtttcatttacaacttccatttgtttattagcaccttctgatatattcataatagttgttgctatatgatttgatgcatccgaagtttgctcagaactttcagttaacagctttgaggcagttgctacattatcagatgatattgaaacttgttcaattaatcctctcaaatttattatcatattttcaaaagttttagcgagtctgccaaattcattttttgaattaactctcacctttgcaacactaagatcaccatctgagatacataacgccatatcttctatagcctttaatggttttagaattttatttaacataaatagaaataaaattattactattactaaagtgattattaaagttaaagctgatttataaatttgttgtgtaagtggtccagtaaattcacttttagacactatcagactaactgtccaattaattcctgaaacaggcttatatgatatatattgcttattaaagccataatattcaacattagtttcacctttgaacatattttcatatatttcttttagttttggttcaattttctcatcttttaatggattatatttaagaattaaatctttattaggatctgcaattactgttccatctgttaaattaagtgaagcataaccattttgttttacttttatagaagatatgtattgtactaattcatcaagttttacattaccaccccagatagctttaatagtaccattaacctttatcggaacagcaacaactacagccatttttccatctgccttaccaagtaaaggatctgatatcactgtttttcctgtagctagtaattctttataataaggtctttcgcttatgctccctgttgtacctgtagccgaataccaatctccattagcatctgaaagccaaaatgcactatatagaggaagacgacttgtttcagaagacatataatctattatatcctgcctactcccattcacaaaaactgggcaacttgcaatactttccatctccgactttctaatatcaagccacaatccaatttctttagctgttgattgagtgatagaagtcatgcttgtcttcacttctgtttcaaccatctgtttcgtttctatataacttgtaacctccagtacggtcatagataaacaaataataattatactaacaaccgtgagtaaagtcttaatacttttcataaaatcatcccatctttttataattaatataacgtaataaattacttttcttaatgcataaatacttcagacattttttgtatttcaaatgatacttttaaaattttatattacagttgaaatccctataccaaaaagcgacattaaagagtgagattattttttgtgaactctatttattttgagctactttaccatcagtgcaatattaatagcattagcttgtcatactattaatattaacgtgctctgttatgcaacataattttatctatttttaagattacaagtcttaaattgtatttaatatatttttctatatttaaatttacactatacttccttaattccactttcataaggcaagtatattgtaaatgtacttccaataccaactatactttcggctcgaatgtatccttggtgaatttctatgattttgttactaacagcaagtcctagtcccgtacctgtatcctttgtagtaaaaaaaggatcaaaaatcctaggtaaactttcctgatcaatcccttttccattgtcttctatgataatctcaatccctttaatcaccctttgtgttgtaactgtaatttttccgttttcttgaggcatagcttgtgtcgcatttagtaataggttaactaaaacttgtttaataagctgagcatcaactgaaatagcttcaattgattgatcaaaatgtgtttctaaaacaacaatctccttttttatactcggtaaaagtaaaaaaagagaattttccacaagttcgttgatattgattgatgtcacatagtgttttgaaggtttagcaaaatacaagagatcttcaataacgccgttaagacgatcaacctctttcaatacaacgtttccaaaaatccgtgtcgaattatcctttggcaattcatccaccaaaatttgcacactccctgaaatagctgatagaggattacgtatttcatgagctacaccggcagcaagctctccaactgcggcaagacgatctaatctccttacataatcctcaaaagccttatgctctgataaatctttgaaaactaaaactacacccaatacattattattattacatagcatagatgtgctgacactaattggaataattgcaccgtccgaacgagtaaattctgcttcatatcccataatttttttaccgacacgtaaagtttctagcactatgtcaagaactttagcattcccggagaatagatctttataattaactccaatcacatctttatttaatcccataatagaccaagcagcagcgtttatctctgttatcttttcatcattatcaattgtaataattccatctaccatactctccataataatttctgtatgtgaacgtgtattcattagactttgagccattccattaatggcagaagcaatctttccaaattcaccattaatttctggcaatcgttgacttaaatcattacccaaactagatagtcctttaataataccattaacggaattagaaactctatttgctaaagtcatacttatacttagcccaacaactaaagcaatagccaacccttcgtacatcacaatttccatctcatttatttgacgctctatgctttcagtcatttcattagcccatacgtatccgattacattattatttcgaatgatcggaaccatggcatttagaatatttcctctaaccatcttaccacttgcagtcaaaggtatccccttttccattacttcccggcccaaatgttcttgacttattgattgtccaaccgtggtgtcgtattcagaacctggtccatatgtaataatacaatcgagatctttagaataatacccagctcctactccgggatttcccgaaacaattttttccgtaactcctgatagtctttgattaagtagtcgtaccttttcgtcatgcgaagcactcttagcttctatagataataaggattcaaaatcaccttccacactagcatccaaagttcttgctattccatagagcttgctttccttctctgaattcatagctttttccgcactataaattagtatatagccacttccaataagcggtactaccaccgcaagtgcaagaataattataagcttataacgcatactaagaagcctcatcaggatacccccataaatattaatattttatacatatatctcatttataattatgatatttctacattttcgtgtcaagcaagggcaaatccttgcggcataataattagattaccccactaagtaagcatttgtgttgaaatctacttagcagggtatttatggacaaggtatattcttcgaattgcaattaagaacttattaactcaactatttaaacatattttcatccataagctttaattcaggagatattattggcttaaaatccatattatctagaatatccttttctaaatttattcctggagctatttcttctaaaagtaacccctctttagttaacttaaatacggctctttctgtaacataaaggacagtttgtccaatgcttgatgcatattcaccactaaaagtaatttgctcgacagcattcacaaatttcttagccttaccttcattttctattattaatttgccttctccaatttttacttttaaaccaccagctgtaaatgtgccacaatatattaacttcttagcattttgagttatattaataaacccaccacaacctgcaatcttaggtccaaacttactaacatttatattacccgatttgtcacattgtgctaatcccaagaaagctacatcaagaccgcctccatcataaaaatcaaattgactggattggtccagtatgcaaaccggatttgttgaagctccaaaacttagtccacctgctggtacgccacctactccacctggctctacagttaaagtcatttgatctgcaataccttcttcattagcaactatagctattccttctggtatgccaatacctaaattagtaacagcatttggtactagttccttagcacatcttcttgctattaccttcctttcattaagtggtaatggttctattgaatccactggtaccttagtatctccacaatatgctggattaaagttttcactaaaagtttgcatttggttttctgttgatgcaacaactatagcatcaacatatattcctgggattttaacttttcttggatcaagtgaacctttagttacaaccttttcaacttgtagtattactatcccccctgaatttttagcagcttgagccattgctgttgcatcaagtgttaaagcctctttttccattgttgcatttccgtcttcatctgcataagtagcccttaaaagtacaacatctatcggaaacgctttatatagcaaatattccttctcttcaatattaactacttttacaatatcctcttttgtaatttcattaagtttaccaccttcaattctaggatctataaatgttttcaatccaacatgagtaattgttcccggctttccagctgcaatgtctctatacaaatgtgatataactccttgaggtaaattatatgcttctactttattttctaaagctagtttttgaagctttggtgtcaatgcccaatgtccccctattattctgtgaactaacccctcataaccaagatgatttaatcctctatctttaccatcaccttgaccagctgcaaaaactaatgttaaattgttaggaacatgcctttttaaatattgtttttctatttctaatgtaatttgttctggatgggcacatccaacaaatccacctactgcaacagtagctccattttttattaaatcaactgattgttctatagagattacctttgacttcataattaatccctcccactttatcttactttatttattcaacatccttaatttcttcagcttattttttagcatctctatctaagaaatataaaagtacttccgcacgctctttttctttactttctataaattctggtgaccaattatagaatccttgtttactcttctttcctgagttccctgattcaaccataccttgcaataacttagatggctcagtataactgcacaaatctttaaataagtatgaagaaatattattgaatatatctaaacctcctaaatctgcactacataatggtccagtaacaggaagccttcttccatgaccatactcaatggctttatctacttcctcaggctttgcccagcctttttctactatatataaagcttctctaagcaatgctaattgtaggcggtttcctataaaccccaaacattccttttccatacgaacagatttttttcctataaaatcaacccatttcataacttttactattgtatcctctgatgttttttctcctggaactacctcaactaaaggaattaattgtggtggattccaaaaatgcgcaactgctattctctctggattttttgtatatttagctatatctgttggacttaatcctgacgtattagttgctaaaattacacttggtggacaaagctcatctaattgcttaaatatttcttgtttaagctctaaatcttctgctagcgattctattataaggtcaacatttttagtagcttcttcaatacttttaactccttttattttatttaggatttctttatacccactatcttctaattttccttcagctttcaaaagatttaaactagcctttatactattaaagcctcgttctaaacttgcatctgacctaccatacataactacatttaacccagccttggcagaaaataatgctataccatgtcccatagttccggtacctaatactgctatattctttatatccatttttatcatcctttctctccatatatttaattttccatataataatgttaatataatcaaactttaaccttgcagatttcagactatagtatgatactattaactgataaaaatacgtataaaatccgcaagtatcaaataagttataagggctagatttaaacgtactttttacttttttcaattgttaaaataaagctaatccaactccaaatattaaagcacctacaattaaggttgttacacaaaatcccataatatcacgaactttaagacctgctatagctaaagctggtagtgcccagaatggttgcgccatattcatccaagcttcaccatatgcaattgccatagctgctttccccatatctgcaccaagtgcttgcgcagctggcattatgaatggtccttgtacaacccaatgtccaccaccagatggaacaaagaagttaattattcctgaacttaaaaacgcaaaaattgggaatgtatgagtatttgatatactaacaaagccacttgtaatcattccacctaatcctgacaaatccatcatgccttgtatacccgcatagaaaggaaattgtaccattataccagctgttccttttgctccatcaactatagcctgcatataagatacaggactgccatgaagaatgatacctgcaaaaaacataatcatatttacagcgtttacatccatagaaccaccattcatgaagtaataaaccatatagcaaaccccaagaataccaattagccatgcaataattctgctgttttcaactcgtactgcaaatgttttttcagttatagtatcagtactagtctcatttgctgcctctgctgctaataatgctgggtcaatctccacaacatcctcatctttaggcatcatcattcttgtcattaaaggtaatattattattaaagcaacagttataaagatattaaacggagcaaaaatagtatcacctagcggaattaatccgattgtcgcttccattggattccctttagttgctgctagaagtggaattgaaccagataagcctccatgccaagtcataaaaccaatataggcacacgcgatcaataaacgataatctgtatgtcgcacctttttggcaacttcttttgcaagtaaagcaccaacaattagaccaaatccccaattaataatattagcaaccgctgcaacaaatgtaacaagcataatagcttgagctggtgttttaggcactcctgcaatcttttgcagaatacgtttaacaggtggtgaactagccaatgcattaccagtgactaaaattaacgccatttgcataccaaatgctagaagattccaaaaactcttaccccaaaatcctatcatatcaattggagtatggccagtaaatataatacctgaaataaacataatcaatgttaaaatcattgcaaaaacaagtgggtctggaagaaatttttgaacaatagctgtaaaaaatttagataatccttttatcatttttttgcctccctatgtttaatatttaacaaacaagcttgctttgttactacaccttatttaataagcaaaacatatgccaaattcatatttctaagaattaaaaataactttttaaaaattaatgtcgttaaaaaacaaattttgccttattaagacactttgacgattttatgttaagaaaaatttttcaaaaattaaaacataaaaaagcaaaaagttcacacttatatttattcgcaaaaataagtgtgaactttttatacaatatatgtgcaaaactatgcgcactttctatttaatgtttattcttcaaaaatacttaattactactggtcaggaataaattcttgatcagtagcgcatttattttagtctttagtatcttttcgaactagatatttttctatctttctcataaacctacttcttatcaaataaaagtaagtaaagtaaattactatatatatgtacattgaaatttgatatctgtatttatcagcataaagtgaaattaaaacacctgcataaagaataatagctgaatataaatttaattttcctaaattacttaaatactcatcaacatttgtaatttcatatatcttttctgttttcgataattttttattaattatagcttctggttttttaaatatgtaaaatactccgttaagagcatatatcaaaaatattattgaacatatagttaaagtaaaaatataaaaattcatgactatctccttccacatatatattgtaattaattttctacattatatgtttacttaagcatttgacttgctagagtttcagtgcaaatttattatttcagcgtatatacagataaacaacttaggaattttatttattagatgaacatatttacaaggtttctaaaactttaagttcgcatcttcactagaaatcataaatatatttgtgtagaaaacatttgaaaatgagctgttaaaggttcttagctgtaggttgttccattttagcttgtgaagtgagagtccaaaattttattttgggttctcgaacttcctcagtgaatgtaatgagtcgagcttccctaggaaagttgaagcatgctaaagtggatacaacctgctgcttagaaccttcagcgatattttcatagcttttcggaatcaaaatatttatgatttagtaagttatcacataaatgcagttttaaatttaggtatctatatattataaaattgctaaataaaaaatatcgcaaattcatatgaataccgcgatatttcaatatctatattatttattattgttgcttaaaattatgcaaatctttcaataaattcatttaatctttttaaattagcatttatactttcgatagtagcacttatttcttcaatagctgctgcttgttcttcgctttctgatgctgattcatttacagctccaattatagtatttattgactgattcatattaataacaatatcatttattgttctagttgattctttactttggcttgcaagctttctgatttctgttgatacaacattaaatccttttccatgctcaccagctcttgcagattcaatagctgcatttaatcctagtaaatttgtttgatcagcgatactcttaataatttctatagcatctgatgttttctttgaagtttccataacatcttgagcctgctttagagtcttttgtccagttagagcaaaatttgaagcggaattagctagttcactaacacttgtagaaacttgatctaatgattctgatatttccgaaacactatttaccaatctagtagtatcatctaaatcaattccatcgctaattgttccaataatcttcccttttgaatttctaataggtattgatataacttttatttctttgccagatacatttgtatcacctttttcaagtcttccacttcttaaagaatcttttataacatctaatggttcagagccagctctaagttgcaactgaaattccttaggatcttcatattcgatatatttttcagtatctgttaatccaaatgctgtatcatctcttgatagatcgttaagatatggcaaaacaatagaaaatgcctttaaaatttcctcgtccgttaaattttcagttaaatgttctttatatcccatgataatcctcctcaaatatttatattcacctatactatcttcttaataatattaataattctacataagtagtcaaattcctttattattttgcaaatatcaatctattttcattaatataattaaacaataaactataaataatattgatttaatctcaaaaaaatctctaagttatctttataatttgaatgtaaataaattatagatttcatcttctatttagtttgttagtaaagcttataatatttttctatcaatcccaaattctgtaacatcacaccactgtgcctagcagaattttatataaacaaaaactacaatttcatttttttattatataacttaaaatactcacacaacaaaaataacgctttattaagaataagcgaataatattaaatcttgaatacctataaatttttcatcattaaatattctgtgtaatatgatccatcttttaatttaaaagagttgcttcttgtcccatactttttaaaaccaaattcttcatataagtttattgccttatagttatcacatgctacctctaattcaacttgttcaaatcctactttttttgcatattttaagatttcagttagcaaagcttttccaacaccaagattccaagcttctttgataactgctattccaaaatctgctctgtgtgaaactttaatcatatttccaatagtacatatgcttgaatttccaacaagcttatcatcaataaatgctgaaatcattgcatccttattactttcattaatgtcattgatgaatttttcttcatcttctatagtcatagtaatttcttctggatacctaagcatatagtctgtttctgatgatgcctttcttaagtaatcaattaatttttctgcatcctttacatcaggacttcttaatatgcattcttctccatttttcaattttacttttttgtcttcaaatatcataattaacaactccactcattataacataagtctgtccaaactttatataacattttgaaaccttaccatattataacacaaatttaaaacatcacattaatttacaagaaaatctccttattagattatgtatttcttatacttttaaaagttattcatagatttcactccaatctaaattcctatagaataaaataatggtgaagaagtactgcaagaaatttgtttaaaaacagattttatcacagtattttttcaccaagatatcactctattaaattttaaataaatactttcattattgaatctaaacttataaattttcttattttaaattaacttttctggaatgaactttgaagaaattctctttattagagcataatcaagtattaatagaactcctcctgctacaatcattataaaattgctaagtaatagtactcctgtcatctgaccaattaatacaagaataactggaattacaagaagcccgcttatttgttgtgcttcctggaaagtttccgactttgctgacaccataactgtaagtattaacgatagcaaattaattgcaggtgaaagccaaagtataattatcaaccattttatatctggaaagataagtccgccaaaatatataaagccacctatattaaatattattccaattgctataaatgagatcaaagtcacaatatacgatggaataaatacacctagaattttagctctaagtaattgctccattgatgttggagtataaagcaaagactctagagttttatgttccttttctcctacaaaactactagccccaatgactgctgaacacattataggtattataagaaagtatgatggaaacatgaagtttatagccacttttaccagtaattgagctggagtgtatgttgtatattcataaggtaatttccttataagaggagccatttttgtaatagtgcttgagtcacttccaataaaatttgcacctatgaatattccaagaggcactattattgtcaagataattggaacaatagtcatagggagaattactcgttttgaacttactaactcatttatgtctttatatataagtgctttttcattactcttcatattctaatcactcctgatttataaagacacatcatcagatgtaccttttatatatttgaaatacagttgttccaaagaccatttctgctgcattgcctcataaatttctccatcatctttcataatgctttgtattagagtatttacctcttggtctcctgaaataggtttgctatatatgccattgccttcatagataaatccaaacttatcagaaatattctttcctctaatttttagttgaagttttgcatttttctttgatgcaagttcatcaaaggtacctcccccaagaatgttcccattgtttataaaaccatactgagtacatatatcttcagcatattttaattgatgggtacaaagaaatattgtaacttcgttttcttctgcaagttcctttacaagctttgtaacatttaatgcgttttctggatctaaaccagacgttggttcatcaagaaataaaatttttggattatgaactaatgctatagctaatgaaactctctttctcattcctgtactaaaagatttcaccttcttatctttcacctctagcagctctaacctttttaatatagaatcagtacgttcattaagtaaattttcttcaactccgtgcatttttccaaagaacattaagttttgttttgcagtgagattctcatagcagcttgaactttcagtcataactccacataatttatgaatttcaatattattttccaaaacaggaatccctaaaatttcagcatgaccagatgttgctgaaagaattccattcagaattctaactgttgtagtttttccagaaccattaggtccaagaaagccaaatatctcgccttttggtatactcaaatttatatcattcaatgcattaatctttccatcataagacttgttgagattctctatatttattgcattcattttattcatccaactttctcttcagttttttaataagaaatttgtactcttcctcttctcttaatgatacaaatgccggattttcagtaattgcagaggcaaaatttttctttattgttgtctcatctacaggagtgctcgttccaatatagctattatcctcaagccatttatcaaccttagtaaaatattcatttcctttaaatttcaatggaaactttattttgcagacaatatttacatactgctccagagcacatatggccttttccttatctttgtgaattaaataaccttgtgctgcaacaatatgaattcctaaaacatcatttgtcaaaatctcattaagattaaaagactcaataatctgaataccttgagaataaattttttcaaacaaaactcgctccataatatttattgaaagatagttatttaaaagtcttaacatgtttattacattattaaatactagtatttgattgacctcatttgctttatctatttctccctgcatcttgtatgcattaattagcattacatcctcaccactatacggtattaatttattatccaataatcgaataacttcttcactatttcctaataacatttgtgccaatgcttccattgtatttgaactctttatttctgtaatattatccgactcttcttttattcttttacttaataatatacatttctgaaaaatttctttttttatatcctcagtttttgctaatatagagtaatttattaataactgagccattgaaagcaaaaaaggaaaacaagaatagtatttttttattaacttttcacatctatttgtgacttcatcaaatggctttatagcaaattcatgcgaaagttccttataaatctttttaatatcttcctttgtaagctgcggggaatatcctaataattcatcaaccgaaatattaaagtaagtcgcaagctcaggaagaagtaaaatatcaggataacttaatccagattcccatttagaaacagatgctttagaaactccaatatactctgctaattgctcctgcgttatacccttctccttcctcttataagcaatacattctcctatatttaactttttcatattcctcacctctaataatattttatgtgtttctacattttccgtaaatggattcctagttgatattagtagaaaaagttaacctacaagaaacttaattatagataaacaatatataagctagacttatgcaataatccaccgaaagtaaaaacattgttatttcacaggactatgaaaatttcgctgaaagtgctaaattgcaggttgttcaactaatgcttgctcccaatttcattgtgacaagcattagttgaacaacctacgattaagagcttttaacagatcattttcaatgcctgctgcataaaaatgtttctactttctagtatggtatttattgcaaattataaatcaaattcttaagttgtttatccatacgcgtaaagcttaaccagtaatcaccaaattgtagggggaagagagtagctcattaattttccctctgtagtttggcgttttcttttttctcgcttacagctccttcctaaacttactagtatctcatatattatttccaagttttcctttttaggaatgaaattaaggcatatttctttaagtttacttcctatagttgaatatatcatgagcatacttatttctctattttcttctgttttatacttaaaatacaattcagaataaactgtatttattagtaaagttattatcaatctaccataaagcaaacaatttaagtaatcaattcctgctgatttgacatggtcaatctttccgtagcttttccagcatttaaataagagttctatttgccatcttaacctataaatatcaaggagcatgtccacatcggcttgttctttttcaatgtttgttatcataataacccagctcattagttccttgtcaattttctttggggatcttccttgagcttttgctttttctctagcccttcggattcgcaaattcacaatttcttctggtaatctttctcctattactctaaattcttctctattattttgtttcattccaacatataaataagtatctataacaccgctcgatttctttaagaaatcaatcatttcaactttttcaaaattcccttttttataattttctttataaagtgcagtattatatttaattttactaagaaaaaaagcagatttcttttcaagcattttaaaacactttttatcgaaatatcctaaatcaactaatagaagttcattagtgttaattttgtccgccaaagttttcatatatgaattatcatttgttgtgccatcctcaaattcaaatgtttcaatctgcttacttttgaaactatatactgtttgtattttcatttcagatgccgacttatcttctgaaaaacctttataagaatctcttaacgagtcatttagcttgattaagctactatcgcagatttttatatcattaaaggctttaaatatttcaatgtgattgtgtttaatgctcttaattattttatcctcaataatatttgtaagaatagtttttaaaaagtttgaacctgccttgagcttattttctatagcttgcctagacactttcaaattagggtttatatcttcacaaaaatttgctatatttcttaatgatggattttcaagactataaactccaaaagtaaatgctttaaaaaatgtaaatccatccaatttactatttctttgtgtaaatccagtagtcacggcggtttttgttattaatctttttgaaaaaagattaataattttcttgattttatccatactacttaatgaatttaaattaattttcattaaaagtcattcctttcttttttgtgtttattgttaggaatgactttttttattatttttataactgttaatatatgatttaactgttaaaatactcattagctttacgcgtatggttgtttatctatactaactttaaacttcacattttagatataaaaatactcccattaaaataacagatttttattttttatctgtttaccttaaagggagcatatcatcttctttgaataatacgatttttcagcattatatttaatttcaataattcaccattttagcctttgagtccatttgcttgtcgctccatattctctattacaacatcatatatttctcctagagaagcacaatactcaagtacctgccacggagtatttgtatggaaatgaatcttaatcaattcctcatctccaactgcaagcagagaatctccctcaatgttttttgttatatattcatttatttcatcttctgaaagatcttttccttcaattaataattgcgtatcaaatttatattcaagcatattttttctcctcttcgtctttaaataaatgatcttaaaaatacaataaactttaaatcagatatttcttataatatccttaatttataatattattaatgatcttaattggacaagaacttattgccttatctcagcatactttttaattattgccaatctctttagtctaaaattcataatccaaaaaattaatacggtaatgaacgagagaactgatttaatggagcctaacttaggaacttgcgtaatacatgctccaattattaagtctcttttcgaaaattatccacttataatcctttaatttctttttcgaaattatccttatcttcttggttttcaaataagttgaaccaatcacatatctctattgcaaagtcaataaaagctgttccctgagcagttattacatttttatctctcacgactctttcagaaataaaattttctcttggaaatgggtcattttctccatatatatcaatatgtttttgtgtccattgattaataggcgtagtatacttaacattatttaaaattcccgactttgctaaaaaaaaggttcctgctccacatatacctcctactagtttcccatctaaatatattttatcgataagctctattaattccggtcttacttcaccataccatcctccagtaataattaatccatctacattataatttaagacatctttaactaatttggctggtttatataagaaaccagatcgtcctttaatcattttatcttcataggagatagtaattatttctttacatgcctctgaacttagtaaatgactgataaatgtaacttcatagtctgtcatttcatcaaaaattaaaaataatattttccccatataattcccttccctctgctcctgttcatgaactttcatgtaatcttgttagttagaagtatgtattttaaatcaaatacttcttacattaacgtagtttaccattcttgtctctcataaattttcgtgatatataatctacatattaacttatgtattgtcactttcaatttgattcttacattaccattcttatcttaacctttggcttaccagaattttaaatataaatttattacgttaatatatattacgaatcacattcctctttaaaaaaatatctcttggacggaaatgcaattatgagtcctaacaatgattctataatatttggagtattatatggattgcttgtcttcatggctataaagaacatagatactgctaaaaaaaatacattataaattatgatttctaagtatgcccattttttaagcttaaaatatccataggctattgttaataggactatcgcgcttaatactctgagcgcaccatctaaaaaattatacataggaatgggataaactccaatattctccataatgcttttcataggtgaaattgatattataattaaggctacataaagcagactcatgtctccaataaacatcactatcataggtagttttcttttcacgtgcactcactcccccgtattctataataatttacaataaacttccatcacaaataaattataacatatattgtaaatgtagttttattattcgcatatttatagataaacaatatataacttatacttatgcaataacctaccgaaagtaaaaacattgttatttcacaggactatgaaaatttcgctgaaagtactaaattgcaggttgcaccactaatgcttgctcccaatttcattgtgacaagcattagttgaacaacctacaattaagagcttttaacagctcattttcaatgcctgctgcataaaaatgtttctactttctaatatggtatttattgcaaagtataaattaaattcttaagttgtttatccatacgcgtaaagcttaaccagtaatcaccaaattgtagggggaagagagtagctcattaatcttccctctgtagtttggcgttttcttttttctcgcttacagctccttcccaaacttactagtatctcatatattatttccaagttttcctttttaggaatgaaattaaggcatatttctttaagtttacttcctatagttgaatatatcataagcatacttatttctctattttcttctgttttatacttaaaatacaattcagaataaactgtatttattagcaaagttattatcaatctaccataaagcaaacaatttaagtaatcaattcctgctgatttgacatggtcaatctttccgtagcttttccagcatttaaataagagttctatttgccatcttaacctataaatatcaagaagcatgtccacatcagcttgttctttttcaatgtttgttatcataataacccagctcattagttccttgtcaattttctttggggctcttccttgagcttttgctttttctctagcccttcggattcgcaaattcacaatttcttctggtaatctttttcctattactctaaattcttctctattattttgtttcattccaacatataaataagtatctataacaccgctcgatttctttaagaaatcaatcatttcaactttttcaaaattcccttttttataattttctttataaagtgcagtattatatttaattttactaagaaaaaaagcagatttcttttcaagcattttaaaacactttttatcgaaatatcctaaatcaactaatagaagttcattagtgttaattttgtccgccaaagttttcatatatgaattatcatttgttgtgccatcctcaaattcaaatgtttcaatctgcttacttttgaaactatatactgtttgtattttcatttcagatgccgacttatcttctgaaaaacctttataagaatctcttaacgagtcatttagcttgattaagctactatcgcagatttttatatcattaaaggctttaaatatttcaatgtgattgtgtttaatgctcttaattattttatcctcaataatatttgtaagaatagtttttaaaaagtttgaacctgccttgagcttattttctatagcttgcctagacactttcaaattagggtttatatcttcacaaaaatttgctatatttcttaatgacggattttcaagactataaactccaaaagtaaatgctttaaaaaatgtaaatccatccaatttactatttctttgtgtaaatccagtagtcacggcggtttttgttattaatctttttgaaaaaagattaataattttcttaattttatccatactacttaatgaatttaaattaattttcattaaaagtcattcctttcttttttgtgtttattgttaggaatgactttttttattatttttataactgttaatatatgatttaactgttaaaatactcattagctttacgcgtatggttgtttatctatacagggttccatattgataacaatacatatctactgtttcaatttcatgaataccagcgatattgaaattttataagtttgaatatcattgtgggaccctatatatcaaatgcaatctcaaaattatacaaaaaaatcccaacttcataatatgaatttgagatcttctatcttaactttttcaatattttaaagatttcttatgcttactgcatatcttctataagtagaaattatcaattatgtagatttatagtgaaataacactatgaaaactctatctatttatatctttcagctctactccactaacccctgctttaaaacttctcataaataaatcgaaagcacctttaattagctgtgcattctcaagttcagaatttaacttaagtacttcaattgctgcctcgatagtgcaaagttctccttctgaagcaccttttcttaaagtatattctgatttattaattggatttaatgaaattcttggaagcttctttaagtagtcactctttcttagtatcttctctgcttctttccatgtgccatctaagataataaatgctggaattttttctgaatctttgcatttaggctttctttctacaggctcatcatcatccataggaaataatatatttatttcataatcatcgctattaatatattcgattaatttttcaggagtctttactctctcccaaagaattaactcagttgattctggattcaccaatttcaataatctagcggtatttgaaggcctactaaattctctttctgttgataatatcaatatctttgcttttgtctctattttaggcacaatattacagatacaatttattattggcaacccgcatttattgcagctttcatataacttagtaatttgcttaactttaaattcagactccattcttcctccattattaattagttagtatgtcatatcttcttgctattactaactgattataacatatgcattcaatatattcttgactgcttttcaaaacactgacaatatgaattaccaattaatttctggatttatgtcagtatttcattaataaaagatcggacttttaagatgcttgtttgaattattgattatatttattaaaatttacgcatttaatatataattataaggaatattatcaataatatttattttatattacagtctttattcgaaatttcactcaaatactaaacaaactctacttataaacaatatataacaataattccaaaataatacgataatttatctgtaacggctatataaaaaaaatatcatatagtcttgtcatttgataacgttttgtcttccttatatttacttttttggtttaaaagattgattctgtaaattttagtgataacatatatttaataacatataaaaatttaattttcatataaaatttttaatgtttattaatttttaaatcataaggaggattagtcatgatcaaagacacactagtatctgtaacaaaagatttaaaattaaaaacaaatgttgaaaacattaatttaaagaactacaaggataattcttcatgtttcggagtattcgaaaatgttgaaaatgctataagcagcgctgtacacgcacaaaagatattatcccttcattatacaaaagagcaaagagaaaaaatcataactgagataagaaaggccgcattacaaaataaagaggtcttggctacaatgattctagaagaaacacatatgggaagatgtgaggataaaatattaaaacatgaattggtagctaaatatactcctggcacagaagatttaactactactgcctggtcaggagataacggactcacagtcgtagaaatgtctccatatggcgttataggtgcaataactccttctacgaatccaactgaaactgtaatatgtaatagcataggcatgatagctgctggaaatgctgtaatatttaacgggcatccaggcgctaaaaaatgtgttgcttttgctgtcgaaatgataaataaagcaattatttcatgtggcggtcctgaaaatctagtaacaactataaaaaatccaactatggagtctctagatgcaattattaagcatccttcaataaaacttctttgcggaactggaggtccaggaatggtaaaaaccctcttaaattctggtaagaaagctataggtgctggtgctggaaatccaccagttattgtagatgatactgctgatatagaaaaggctggtaggagcatcattgaaggctgttcttttgataataatttaccttgtattgcagaaaaagaagtatttgtttttgagaatgttgcagatgatttaatatctaacatgctaaaaaataatgctgtaattataaatgaagatcaagtatcaaaattaatagatttagtattacaaaaaaataatgaaactcaagaatactttataaacaaaaaatgggtaggaaaagatgcaaaattattcttagatgaaatagatgttgagtctccttcaaatgttaaatgcataatctgcgaagtaaatgcaaatcatccatttgtcatgacagaactcatgatgccaatattaccaattgtaagagttaaagatatagatgaagctattaaatatgcaaagatagcagaacaaaatagaaaacatagtgcctatatttattctaaaaatatagacaacctaaatagatttgaaagagaaattgatactactatttttgtaaagaatgctaaatcttttgctggtgttggttatgaagctgaaggatttacaactttcactattgctggatctactggtgaaggcataacctctgcaagaaattttacaagacaaagaagatgtgtacttgccggctaacttcttgctaaatttatacatttattcacataactttaatatgcaatgttcccacaaaatattaaaaactatttagaagggagatattaaaatgaataaattagtaaaattaacagatttaaagcgcattttcaaagatggtatgacaattatggttgggggttttttagattgtggaactcctgaaaatattatagatatgctagttgatttaaatataaaaaatctgactattataagcaatgatacagcttttcctaataaaggaataggaaaacttattgtaaatggtcaagtttctaaagtaattgcttcacatattggaactaatcctgaagctgggaaaaaaatgagctctggtgaacttaaagttgagctttccccacaaggaacactgattgaaagaattcgtgcagctggatctggactcggaggtgtattaactccaacaggacttggaactatcgttgaagaaggtaagaaaaaagttactatcgatggcaaagagtatttattagagcttcctttatcagccgatgtttcattaataaaaggtagcgttgtagatgagtttggaaataccttctatagagctgctactaaaaatttcaatccatatatggcgatggctgcaaaaacagttatagttgaagcagaaaatttagttaaatgtgaagatttaaaaagagatgctataatgactcctggcgttttagtagattatatcgttaaggaggcggcttaattgattgtagataaaattttagcaaaagagataattgccaaaagagttgcaaaagaactaaaaaaaggccaactcgtaaaccttggaataggacttccaactttagtagctaattatgtgccaaaagaaatgaacattacttttgaatcagaaaatggcatggttggtatggcacaaacggcctcatcaggtgaaaatgatccagatataataaatgctggtggggaatatgtaacattattacctcaaggtgcattttttgatagttcaacgtctttcgcactaataagaggaggacatgttgatgttgctgttcttggtgctctagaagttgatgaagaaggtaatttagctaactggattgttccaaataaaattgtcccaggtatgggaggcgccatggatttggcaataggcgcaaaaaaaataatagtggcaatgcaacatacaggaaaaggtaaacctaaaatcgtaaaaaaatgtactctcccacttactgctaaggctcaggtagatttaattgttacagaactttgtgtaattgatgtaacaaatgatggtttacttttaagagaaattcataaagatacaactattgatgaaataaaatttttaacagatgcagatttaattattcccgacaacttaaaaattatggatatctaaatcattctattttaaatatataactttaaaaatcttatgtattaaaaactaagaaaagaggttgattattttatgttagaaagtgaagtatctaaacaaattacaactccacttgctgctccagcgtttcctagaggaccatatagatttcacaatagagaatatctaaacattatttatcgaactgatttagattctcttcgaaaaatagtaccagagccacttgaattagatggagcatatgttagatttgagatgatggctatgcctgatacaaccggactaggctcatacactgagtgtggtcaagccattccagtaaaatataatggggttaaaggtgactacttgcatatgatgtacctagataatgaacctgctattgctgttggaagagaaagtagcgcttatccaaaaaagcttggctatccaaagctatttgttgattcagatactttagttgggacacttaaatatggtacattaccagtagctactgcaacaatgggatataagcacgagcctctagatcttaaagaagcctatgctcaaattgcaagacccaattttatgctaaaaatcattcaaggttacgatggtaagccaagaatttgtgaactaatatgtgcagaaaatactgatataactattcacggtgcttggactggaagtgcacgtctacaattatttagccatgcactagctcctcttgctgatttacctgtattagagattgtatcagcatctcatatcctcacagatttaactcttggaacacctaaggttgtacatgattatctttcagtaaaataaaagcaatatagaataaccactacaaaagtagtggttattctatattttaaaccaaactgtaaaacttaggttttagaatacctaataatatttcactaacatcattagattagttaaaatacaaagtttgtagtaaaagtattttttagaatacatacgattttgacagcataagcaactgccaccatcgacttatgaagatatttttttagcactgaacacgtaataaaaaagtaggaattttaattaaaatccctacttttgttatatataaatttaatcgttaggttttattcgcattgttcctctttaatttatctcttataacattttattataattgttcatataattaattcaatatactattatatattttcaagcattaataattattcagcatctgtcattacatatgcttccatactttgacttcttattaaatcatagctaatccatccatagccattgattccccagtctttaccccatgaatttattatttttacagcttttttactatcatcataaccaactacgcaaactgcatgaccacctctattttctccatcaatctggtcataaattggattatcagaatttaaattatcaaaatctggatatactgatattccaataactactggatttccagctgctatttgtgcctttattgcattatagtcaccatctggaagttgactccaactttttgctttatatttggctgcattagccttttgttcatctgtaggtgtaacctcccaactatattcactaccatcataaggcatatcagataatgtagtacaaccttgttcttctaataatttaaatgcatcagaaaaaagagctccccctccatctgctgaatcatcttgatgtatctgattatatatatatgctggactaaatacatgatcatttgtacctagtccccacttccattcaaggccttcttgataagtcttatccgcgtatcctgttgcccatgcaacacagctccctaagtctccttgattagatactttaggaaatttacttgataaatcaacttttgcaggtagttgtattttactatctgaattttctaccattttaatacctggtatactttcatgtagctcttttaatcctgtcggatgtagtgtttttgcataggaattttgagttggaattaaagctcccataactataagtgaacatgctaaaactttgatactaattttttttaatttcattttattactcccccattttcattatagaatttaaatctccccccaacgattttattttatatattcttaatagttatctttataatcgcttcatttttttatcttagtccttatattaaatttattaagattcaatcagcaatttgtgaatacaaaaaaagacaatggtatcgtgatttttttcagactccattgcccttgatattctatttataaaaaatactatcaattataataaaatatttttattgattaacgcttaaataaccattaagttatctacaaatactatcttcacataatacacaacgtaagtaaatacccttttctctaaatgcataaaatatatcattaaaggcatattaaaacgtttatttctttttatttctatgatgatattttttaagatacctatctccactcatttaactattaaggaaatttataattatttttatatcgtatattgcaataaatttacatttgaaattctgttaatttatgttcttaattaatattttcgaaatttaaaaggccgccaacaaaattaaaacttgtatcctaatctcataaatcattaaaataaaatataaataaaaacggcagtatctgcaaaagtactgtcgtttttcttatatcttatttacctaggcattaataataaaaaattagagcaatttaaaattaacctatctccccttcttgaagcaacttagtgtataaatatccaaaagatacattaacatacacatttacaaaaatcattccaaaagacataaatacatcaaaatattcgggatgccaatattttatagctactgatggagatattactaataagctccatcctataaaacttatatataaccaaaatatttctgaaatgtgtccatctgtcattttaatacttctatcaattgcttcttgaatgcttatattaggattttcagcccatatatagtatgtcatagaatattttgcagctgctattataccagggattattaataatagtgaccataatagtgtaagaatatttactgctaacgtcattcctaatgctttaaagaacttctttgtgccagtaaatatatctgaaaaattaactttctcgcctctaactatgtttaatattatactaaaatatccaaatgtaaataatgcaccaaatataatttctaatatcaaattccatataacactagaatcttgaaataagcctcctataatacctgcaccactgtacactagcgtacttaatattccaatcttccaattacctttcaaactatatcttgcactttttcttatttctttgctctcaatatccatatatctccctctaaacttctctcaaattaataataaactagatctgttatcgatctccataaaatatttttctactaacttgctattgattgagttcaaatttaattatttctagtgctactaatactagtacatattctgaaattttgtctaaaatatcatattcctaatttcacgcaatgtgatatataaatttcaatctaattatacttttgtaaatacaagactgtaagtttttagaatcatatcctttttaaaatgtaatttccaatcttaaaaccatagttactgtagaaaggtaaagcttcatcatttgcatataccacattaatttcaatatctgttatggagttagattcaaaccaacttaaagcatttttcataagcttgtctcctagcttaagctttcgatattttttctcaacaaatatagattctatttctcccaaattattttcaattgagattaaacaatatcctacataatttcccgtttcattgtctagaagcatatcaaacttaacaacaccgtttttagcctttttgcaaatagattctatccttttgtcaaaagtaaatctgtcatatttctccttaaagtgcacagatttattatagtgaatagaattaagttcttcccataatggtttcattaactcaatttcctttattcccttttcaacaatagaaatattcataacccctcccactactcaattaatatttaatacaaactaacttgctatataaacaaattataacagtattgtaaatagtggtaaatccattctctagttaattaatgataatttaagattatttttcttcattatgtagaagtcttattaaattatctttatgtttatatatcattaaaacacatgctattaaactacttactattattgaaacaggatctttcataattatacacattaaaggtattgttacccctattgcaattgaccttatagaaactatactcgtaaataaacgcaatataaagtgaactgcaactccaaccaatgttggaattggtacaattacaaagaacgcaccaatagttgtattaacgcccttcccgccattaaatcctaggaatggagtaaaatcgtgtcccaaaattaccgctatagcaataatcgaaagataagtatctattgatatttgtagttcaaaaatctttgtcaaacaaattcctaaagctacaggaattataccttttgaaatatccactatttgcgtaataatagatattttacgtcctgctactctattaacattggtagatcctatattcccgctacctttggtccttatatcaattccgtgcaactttttgataattaagtatcctgtcggaattgaaccacataaaaaagatactataattgataaaataataatcatatattctccctaactttgttctatttttttaatacgtaataatgatgcttcataaaattacgaattacttttaacaactaaatacaatgctaattaattatagttattaacttatatctaaactaatctcttataattctgattttaccttctcctgaaattactattatcatttattgacataattatcctcccctgatacaatataggttatcaaattgcgcaattgtaaaaaatatttctaggaggtgtgtttatgaatttcggaaagattttgaatgaaactttagaattcagtgctcaattagatattttacataagcatattactaaaaatgatcttcaagttcaaaaaagtgattcctttgataagcaatgctttttgttagaacgctatattggggaaaattgctttcaatctactcataaaaaaatgaataccgtcaacattctatcaggaatttttgcctttccagttcttcttataattttagtagcttatatatatggtaagtggattgatagaaaatttaacatatttgaattctttctaaataatcctatattatatataatacctgctattttaattgttattactttagtacttgctatttatcattctatattgcgtaagaatctttactataacatttatcctgaattgaaaagaaagctcatgatagaagaaataacattttaacaaaataaattatatttttatgaaatttatttattagcatatatttataaaattcacgccaatattctttatgattattggcgtaatataatgttccatctcctcaagtaaaaatagaaaatatttagtttctatttgaattttattgcaattaattctaacataaatagtaaatatcacattacccatttactagtttgaataatgtgatatttaaaattcttattcatttattaagagttatattaatctataaagcaaactttactcaacaaactccttaaaaccctcagaatactttgttggttggaattctattacatcataattagcaactccatttttatgaaatggatcttcactaataatctcatttacctcttctttattttttgcgctgcataaaattattccaccatctctaggattttttctccctgaacagataaagttgttactagcatagtatttatttaagaatgtaatgtgatcttccaaatgcttttcaacctcttctagtggtttaacataagttaaatttactataaacattttctttcccccaagtctaaattacaatttgttttataaattataacatacttgtaaatatcgcactatcaacttttcaaattacattatttaaacttctatctgcacatttgttttattattacaaaaaaatacaataaactctacaaattagaaattgccttgctcaactgacaagttaattatgtcttcttctgtaatcttccgtaatactctgcaaggattacctactgcaattacccctgctggaatatctttatttactacacttcctgccccaataacgctaccttttcctatagtaactccaccgcatacagttgaattagcaccaatccatacgtcatcttctattgtgataggttttgaggttccaatcccttctgccctttgtgttggaaatacagcatgtcccgagcaagccaaacaaactccaggagctataaatgcatttgcaccaatgtaaactggcgatgtatccaatattacacaattatagttaatcacagcaagcccatgggtatgtatattaaaaccataatcgcaacgaaatgacggctcaataaatgttagcggatggcaagttccaagcaattcttttaaaatattacttctcttttctttttctgatggtccagtctgattatattcccagcataattctttcgcttttagttgtaattctgatggcatatctgtgtgctttgagcaataccctcttttttgtttcataatttctttaaaatccattatcttaattcctttcaaattatgattattcttttatttaattgtagcatattctataaattccgaactgttcagttttaaaatcagataaaaagtggtagatagtaaatgcatatagcttactttccctccaagcctaaattgcaatttatctaacaaatcaccaattaatcaacaaataaattccattcttataaattcgccgtacccaataggggtatcttttttatatatttcctttactataaatcctgctcttttatagcatttaattgcccgctcgttaaaagatcgcacctctaaagcaactattttgcttggatacaaattagcactagaatattctccatcatatttccaattacaaatttcttttgcatgtaattctgtaaattcttccaatctcatttcatatcccccctgcccatttgtcatatctacacaatgcgaatcaaaataacttctaaattatgctgataattaatattatagtttccatatacatttactttaacctactgatcatttcatggattgagtcatcgactttagtacataagccgttagtattcgaaccgataaaatatccattttcacattcataataattaataatatactgtagagctgggaaatccttaggtgttaacaacatagaatacgttgttactttatcgcttgttactcccatgttggaatttccatctgaagaagcaattttataagcgtaagagactatctcttcattttcaatagttgtatttattactttttgtagaccatcttctatagtatagttatattttattaactgaaatttgtttaaaaaattgaaatacctataatcaagatttgtataaacattttttgaaagatagaaactcacatcacaattagcatagtcataatatatccaatcctttacatcaagtccactaatggagtagaccttactaccattaatatttcctatatgtgtagaatactcacttttaagcctgctattactatcaaaataattttgatttacttgaaaattacttatcgctgaatattgctgattattaaattcagcaattttcttatctttattttcatttctataaacgataaaaaaaatagaaatagataagataaaagttaatattgttaagaaaataaacttaatcctcatattttcacccccccttttaaacaggtactgtcaaagttttttatctaactaaggcagcaaccctttaatttttcttattttttatataaataacttgccacccccaaaaagttaagatattttatacttgcaaaacaaaaacactgaactaaaaaaggaggcaagctattaccatgattaataagtttcttcttgaaactgtaatttatcttattgaaattataaagtatctcatgactttgctggttggcaaaaacttgcttaaaagcatttcggacgaacctgttaagaaagaataccgaaagcttcaagtagatgatcaaccaatctttgatgttcccgaaaaacttaactataagcttctaatagctgaatatgagtttaagcacggcaaagaatttgctcctgtgaaacctcgcaaaaacaaagcgttagctcctaaggatgttatctgtcctaagtgtggtgctccacatacctatctttacgataataacggaggccgaggacaatatctttgcaaagtctgtgataccacattcaatcctaaaaattactatcagaaatccatagtgttaagatgtcctcactgcagtaaaacacttgaaagaatcaaggcgcgtaaggatttctacgtttataagtgtaagaatgataattgctctttttaccaaaataatcttaaatcaatgacaaaatctgaaaaacaagattttaagaagaatcctggtaagttcaaagttagatacatatttagagatttcacttttgactttaagccactttctaaagaaagtccggtaaaatcaaaggtttctcttccaaacattatgatttcttcttacaccttaggacttattctaacttactacgttaactatggtttatcttccagaaagacagctgcattgcttaaagatattcatgatattaaaatatctcatcaagcaattttaaactatgttaatgccgtttcaattgtagttaagccatttatagataactacgattataaactttctgactctttctgcggcgatgaaacctacataaaagttaacggtaagtggaactatattttcttcttttttgatgctgttaaaaagattattctatcttacagagtatcaccacatagagataccgaaacggctgtaaaagccatcgatgatgttctaagtaagttaaaagaaatacctgaagatcttaatcttataactgatggtaaccctatatatcttcttgcacagcacttctttgcaagccatagtataaaattcgatgttactcaagttataggcttaaccaataaagatgaaatttcaaaagaatataggccattgaagcaaattattgaacgtcttaaccgaacctttaaaggcaattatagagctactactggcttcggaagtcctaacgggtcggttgcatttgtaactatgtttgttgcatactttaactttttaagaccacattctgcccttgaaggcaaaactcctgtaatccttgaagagttagagtcaatgtccaacatgcctactagatggtgcaaattcattgaattatctcaagactttgtcctcaataactgtacaataactgcctaatgatctaaagcagttggtgaaacgcacccttgacacgcccacaaagataaatggtaaaatatctcaataggcgggtctattagtcatgttcaaaattatcattcacccgtccttaactgcctaagaccatttatctttaggtgtgtcaagggcaactagcaaacataatttaacattaaatggtagttggattgatttttcatatattttttacactacctttaaacaagcagtaaataattttaatttaacaatactttcctatattgaatcaattataatattattggtaatatcgtattattcagttttaaaaaaacatattttgtatcaattgctgcatccactctacacatcaaatacaaaaaatgccccattctttcattcaactaatgcgacatctaaatctaatgaatattttgtttttattaacctagtaatactataaagtaatatttctttgaatcacttcttctacttctgccttaacttcttcatttattgtaagttcaagacttgaattacttttaaaaaaagttttaactttaaattcaattatatttggtgttgtccaattataacacttgaccttaggccacttataaaaatcccctgatatatatattccattttctcttattcctgaactctttaatgcttttattatattagagattgaaaattctatccaaaatatattactaaaaacactctcaataatattattattttcatatctaacataaagttttgcatctttccacgataacatacaccaaactattaataatccccccaaagaatagctaatcctattcctttatttacttttacaatatttctaccgtgagtatatgatgtatataaatcttttaataacatccatgttccaattataaatagtaatatgctaagaattgaaaatccataaaacttactcaagtgatacaccccatcgcttaaaattaaacattattaatctattataacatatattgtaaatattgcattattataaatttcttatcaaaacatatggtataattttgtaaaagtgtatttaggagaagagctatgtcaaatattaaagtaatttttatagttcttttgaatgtatttattatttcactagatttactagcagattacaataagagcagatattttatcttcatatttccatttcttggagcactcaattataaatatgtattttaaaattccaaattaactaatcattagagatcctttgctcaattctctattatatgttttgttatattggctattctttacagttcttatttcatgtaattttagtatttcatagaaaaaaatcgcaaatttaattatttgaacagctccctttcaagtaacagattttatctttttatctgtctaccttaaatggagcatatcaatttttaaataatacgattttttaatcttctatttatttttagttatttacaacttatgaaagatacgacagaactggatttaaaactattctgcattaaacttacaagcttataatctgatgtgatttaaatcatgctcttttacgtgattattttttcttaacaggaatccaaatttcgctgtagtaattttcatcttgattaccattaggataatcagctatatcagtgtacatttcaatattataacctgctgcaatttcataatccttgcaattaggcagccattctgagaagatttttctgttcatatcttgcaatgattttggcatcgcgcccttgcaagcaaaaacagcccatgtgtgtttaggaataatctttgtgacaaaaccattaggtatttccatggatggattataattatctgcaatcaaatattcaaactcatctgatcccatgctctcatctattgatattccatacattccacacacaaatttcccatttccagcttcataatgttctgtccaaaacggtggaatttctgcaaatgcattctcatacttaaacacctttgatacgcccatgacagtaaacgaatctttttcaacaattttgtaatccataatataaccgccttccaataaaaacttgattttcagcggagcaaatgacttaatcatcactccatcttttctaacagcagtaggtgtaacaccatgaaatcgagtaaaagcttttgtgaaactatctggtgatgcatatccatattttaatgcaatatcaataattttttcatcagtagaaacgaggtcactgccagcaagagtaagcctgcgttgtctgatatactctccaaccgtaaacccacaaagcattgcaaagcctttctggaaatagaatggagacataaatgttttttctgcaatattttttattgtgatatcttcagtaatattcccctcaatatagctgatagcttcacctattccttcaatccatttcataattatccccctgtctgtacatatatcttatctcttttcaaacggttattcccgactttttatgttatgttttgtccttatagaaatattgtcctttaaccctttttgcttagatatataataattgccttcatttacgctctttatataaattattttctaaaaacattcccttattcacgaatatcatttgataaattttacagatatattttgggttcctttataattctatttttcattgttaacacttttgaaactagtaattttggtttataaataatttttcttgcctttttagggcatcttttaacacaacaaaagcaacgtaaacattgtttttcatctatttctaaagttcttttgtcaattgcactcacaggacatagttttacacatatattacaatgactgcatttgctcatatctgcaaaaggagtctttgtaaataatctggcaccatttttaggtactatttttgccattagtggtaactttccttgaggaattttaaatgaaacatcctttaaactatttatattttccatttttttaattatattttttccaaattcttcagccttatttagatcatcattgttaggacgattttgcgcaataggtagttcttctgttgaaaatgaatgttctcctataaacgaacctgctgctaccaccttaaaacccgactttctagctatagaatcgagttgatttaagactataccatggccaatatttccataaacactaactaacacaactgggctcccattcccttttaagttggctaaaaaaggatatactatttcaggaattttttcctcataaacaggaactccaattaatactatttctccatcaattaaagaaatgttattatcgcttcttgctttaggtaatgttaaatcaactattctatcattaactattcccattccttttacgattgaattgataatctttttagttgtacctgttggtgaaaaatatattgttgttactgaactaattaacatagttattcaaccccatatttacttaatataattattacacaataatttgctacctcgttccatttgtctgccagtcaatctcctgtttttatcataaacatcccacagttccataataattctcattttctaacaatgcgaactaaacttttgcaagttttaatacttgcttaggattttcaagaatataatttgcattaattcctattgatgatttagccccccataatgctaatgcaaaatctataccagcaccaaatgcacaatccatatcatatttggtatcaccaatatatattgtctttgatttatttgcacctgaaagctcaataaattttaaaattggctctggattaggtttatgctcttctgtatcatctgcgcaaactactaatttaaaatgattattcaattcaaatggtgcaaaatcatttagaaattcttctttggtttttgaagtaactataccagtcagaattccaatttcatttagtttaatcaatgcatccttaataccatcaaaaacttttacattatgaaaatactcttttaagtatttattccattttacattacagtctaaaatattagttattccaagtttatttaatgttacttctcctggaatacctaaagctaatcttaattcatcaaaactcaaattttcatttagttcttcaaatactaatttttgaagtgatgaaagaactgcgatttcggtgtctaaaagcgtaccatcaatatcaaatataatacaattatacataccagattactcaattttaaagaaccccttttaacttgctacataaaaaaggaaaattgcgtattagtttcatacaccataatgaattacatacttgttttgagaaatcgcctttcgcagtaatatcattaaattaatcagttcttttgatgacttagaattcttataagttgatacaatgttataaaaagactctaatgattctggtggaataagagtaactccccaccttgcaagtgcgaaactgggtctgctataacagtgaaagtaagttttaattaaagtcaattcattccaccaatcgctcaatatatcgtcatcaatagcaatacaattatatttttgaggttcgtaacacgagtaatctttatctttttcaaattcatctataataccgaattcggcaacacaaggcatattatcactaaccttcccgatataaaatagttcattatttcgtctttatttactattctgaatcacttataatataattgttaaatatactacaattcagcttttgaacaaacctctttttaatcattaacttcccctcaatcatcaccaaaagtagccattcctgataacggaaatattaatataactttagttcctttattaacctcagaggcaattgaaatttttagtcccagctttaagcagagcttttcacataaatacaaacccatgcccgtacttttgctaaatcttcttccattctcaccagtgaagcctttttcaaaaactctatctatatctttctctattatccctactccattatcttctataaataacattactgaatttgcttttttcattgatgatatattaatttgaggatctctattgcttgaatattttattgaatttactattatctgattaatgataaattcagcccatttcccatcgctatatacattttcttcaatgtcatttatattgattcttattttcttatgaatgaaatctctatagtttctttttactacattttttactatatcacctagactaatttgttttattatataatctttataagcattattacttctagaatagtaaagcacctgttcaacaaacctttcaattttgtctatctgaaagtctattttattagttacttcattttgattattctcaataataagctttgaagaagctattggcgttttaatttcatgaacccaggcttctaaatattctctataatcttcctgcatatctttataatattttacatgctcatacatatctctacttaattgtttaagtagagagttaaacttttctccttgtacagattctgcttcctttagcatatctggaattaaatatttcttgtccaatttttctaataaactgtcaatctccccaaaatactttttatgctttatatattctaaagccatgtaagatcctaacgggaaaaaccatatacaaaaaacaaatataactataattaagttaacatttataacaaacattattattgacaatataataaacataagactattacatagtattacaatagctttatctttaagaaactcacttatagtcatggcataatataccccattcctcttcttgtttctattggattttctattcctatttcttcaagcttctttcttaatctatttatattaacatttaaagtgctatcgtctacaaaaaaatctgctttccaaaggtactccataagagaatctctttttactatatttcctttattatttatcaaaaatgatagtattttaacttcatttttagttaactctagagagttatctttataaataatcgttgcatttgaaagattcaaattaaaatctctgtagcttaatatactactagtctttatgtttccataagtcctttttaaaatattagttattcttgcaagtagtatttctgtattataaggttttgtaataaagtcatctgcccctaaattcatgctcatcagttcatctacttcactatctctacttgtaactattataattggaacctctgaagtcttgcgtatttccctacatatataataaccatcatacataggcaaattaatatctagcaatataagttcagctttctcactttcaatataatttattatgttatccatatctaaaggagccttcacttcatatccatatctctctaaaaaactttgcaattcctcccttataacttcatcatcttcaataataataattctcctcatcatacttcccctcgtattactttacactacttataatttattacagccaaaatagaacatttagaaattatttgttataattaatatcttaatcaaaacgtaacaaagtagatatcataagtgttcatttgctgaattatagcaaatataatctttatagtcaaattcttgaaaaaagtaagatgataatctatcactatcttcattgttgcacttctcgcttttttatatgtgcataattttctgtgctatcaattatataagtaggtcttcctttactttcgtcaaaaattcttccaatatattgtcctattataccaatacagcctaaagttattccaaacattattaaattcattgatataataatactaaagtctattgtttttgattggttaaacatattttttactatagtaacaaatattgaaattacgcctgtaaaaaaagataagctccctaaatatccagcgatagcaagtggtttatatgaaaaagaggctattccatcaaaagcaagcttaaacattttttgcaaagaatatttactctctccagcaaatctatcttttctttcaaattccacgcaaatttgcttatagccaacccagctaacaaggcctcttacatatctatttttttcagaaatagatatcatagaattgcacaccttccgatctataagtttaaaatccccagtatctaaaggaatatcaatagtagttatactttttaatatcctataaaaaatctttgctgtaaatcttttaaagaaagtctctccatctctttttattctctttccatgaataacttcataaccttctttccattttttaatcattctgaaaataacttcaggagggtcttgaaggtctgcatcaattacaactacagcatcaccttgtgataagtccatacctgccgttattgctgcttgctgaccaaagtttcgtgaaaagttaataagttttatttttttatcactttcacacatttcttcaactttttctcttgtcttgtccttacttccatcattgacaaatataatttcataatcttctttgaccgaatccataactttttttaatcttctataactttcatctataacaagctcctcattatataaaggtactataatagaataaactattctgttactcatttttctctcccctattatttatagtatttttaaaaattcttaagtactttatttcatttaaacttatcctatcaccaatagtttttataagtttaaattgatgtagtttataaatattatttaacagtttcacattgcttaccccatcaacagctaatataataaataaccaacaaacaatataaccatacctgctttggttttcagtaattaaataagctgctatatatccgcaaaatattaaataaaacaaatccaatcttaattttaaattaatgttttccttatccttcaatcctagaaatatcaaaattaacataataatataaaatagctgaaaaggcattgaaccaaaaattcctattttgaatattatttgattttcaggtatatctttttgagtccataatgatcctgcataatctcctatgcaccactgggccgcaagttttactacatagaaaatgaataatctaacaggtgaattagtagttagccttaaataaattatttttttgcatttctcttcaagttcatcatagttatttaaatatttttctaccatttgtgcatcttcaacattccacatgcccaggttatttatattggttcctttaagcacatttgttattttaggctcactgcctctccataattggttttctgtaatattcatattttgaagaatattactaaccaaaactataatcattatgtaaggtatagtaataaaaagtatatttaataattttcttagtattttatccttgaagtaaatgataatatataaaatataagcaattaaaatcactgtagcaatcattctgcatatattaccaatcgctaaaaaggcactgctgaaaccaaggaatttaagtttatatttatcacttttcatgcttttaaaaaataaatatacgcttgataaataaaaaggcatagccaagttttcactacaaaacactgaagtataagtaacaaatggtggaaatatactacctattaataatgatagtaatgctttccttttatcgttgaacaattcataacttataaagtatattagtactaacactagtaaccctaaaaataagtttataaccttcattactaataaattatgctgaggagataaatattcaattagtgacatatatagaactgttatcgttagatgtggaaatcttgctatatatgcatttcctttaaagtagctgctatccccctgagcaaaagctttagcagcttcatacataactttaaaatcagaaacaggtgtattatcagcatttaataaccataggcttctaattgttgctgccattaagagtaataaacatattttttgtttattattaaaattagaatttattattttatatcctaaaaatagcgaaatcattatagcaaaagtaaatactatggtacctgcattaaagtctaaaatagtaacaaacagcataccaacacttgctataataacaattgataatgcaatttttaatattgtattcataaatttagtaaatactacatttaatttattcatttttaactcctttaactacaaatgttaaagagctaatctataagtaataattacatgtattgcaataataaactacctaaaaaactccaagtgtaagtgaaatcttaggtatgtatctcataggattaattacaacagttatagcataattttaataaaaaaacacactaaggttatgttataataatatttgtagcgattattatatacttgtagttttagcttttttgttacagattctgttggcgcagaaccttaattggattataaataatctaactttggcaattatctttaacacttgtagcggtaatcatttcaaattttcttatttgttctttggcgagagtaaataagaaacttttttatttacaaaacaatcttcttttactgtatttcttttatgattattaaatcataaaataccataattccattcttagttaactctgagaatttttctttataaataacagctgcatttgtatagctaaatactattcttcactatgttcttataccctgtatatgttgtatagaaataccctgcatatactaccacaaatattaatgccgtcattaatgctgaaaatctaatatctacttgattgaaattacttatctccttgttaattacaataatgccgactattgaatggactaatgcaagaattactggaagactgaagtatataaaggtttgaagaaatattgttttatttatcatcttcttatttgcaccaattctccttaaagctttatacctttctatgctgtcactggcttctgataattgctgaagtgctaatacagccatacttgatattaaaaataccatacctaaatacaagccaagaaataattcagaagttgaagctcccttttccctagaataaatgccatcctttgaataggcatccatatgggggacatccatactttcgtacttcccaccaatcaaagaattattataaatctcttggtatctttcattgttttcttctctattttcatcagtatacattacatcaagtactgatttataaacattactatctggcaaaaactcatcatttattactataacgcaataattttctgccattgtagaagtttcaagattttcttgtagagccttgtgatttttcgctagatactcttttctttctatattgactttattgctatgctttaatttttcattaattggatcagctaatttgttatgatttgataagattaaaacctcacaactatttaaattaacttctttttcaccttttagttttaatattttattgtaatcagatatttttacaaagcttgctgtatagcctttaaaagcctcatcttcatctttaaataaatccttaagttctactgatgctgagtattcatcataagttatatatttttcattttcactcaatttgaaatcaattttataaaacacttcatctaaagaaatattttcaccctgaggatatatgactacactagcatcaaaaggtgttatttttttaaggccttcctcataatttttcttaagacctattcctgtagataatacaagtattgtagtaaacagcattaaacatattattgacatggatagaaaatgtgtattaaacttgctatttacctgctttataacgaatatattcaatcccttgaaatataccttcttatttctatttaaaaaatataatataactccagataaactaaagaagaataatactgtgctcatagcaccaatgactaatgaaggtgtaaacattggattccatgtatctatccctatctttaatagaaatttatatacagccgcaagagatactatacttaatacaaatgctgtcaaatatatatatggatttctaaatttcattttttcattctttctatatgccgcaagtaattctattattttgtacttagaaacaaggaatacattaaaaatcactacaagtaaaaacattattccaaaatataatatagtctttcctatagcatttatagaaactgtaaatctatattcattcatagaagcatcgagaagctttaagataaaagtagataagacctgtgaagctgctattcctaatacaaggcctgcaactaaagagatagtaccaaccataaaagtttctgttactaaaatcttagatatttttctctttcccattcctaaagtcatatatatacctaattcttttttacgcttctttattagaaaattattagcatacaagattaaacttcctagtattactgatacaaacattgaaaaataagacataatatctgttagtttctctatgtagtttgcatttgaagactttatatcaaaaagtgccttttgtgaatctatagaattaaaactataaaatatgcatactgctaatattaatgttaaaaagtatatagtataatccttataactcttttttatattgccaaaggccagcttaaaatacatcattatcatcacctccaagaagagatataacttctatgattttattaaaaaattcctttcttgtgtctttacctcttatgagctcattgaaaattctgccatccttaataaagagtattctatgagcataacttgctgtaaaagaatcgtgagtaaccataagtattgtagttttcaaattatcatttaagttttcgaacctttcaagtagcagcctagctgacttggagtctagtgcccctgttggttcatcggcaagaactaaagatggattagttacaattgctcttgctgaagcaactctttgcttttgccctccagacatctcataaggatatttattaagcacttgtcctatttctaaatgctctgccacctcttgtatttctttatctatattataggtgtcctctccctttattgttaaggctaaagcaatattctcataagctgtaagtgtatctaataagttaaaatcttgaaatataaatcccaactcattttgcctaaacttatctaattcttttgattttagcctggtaatgtcactaccatttatcaatatctttcctgcagtaacactatcaatagttgatatacaattaagcagtgtagttttaccacttcctgaaggtcccattattccaacaaactctccctcatctaccttaaagcttatattatctattgcctttgttaaattccccttattgccataatatttctcgattctttctacattcaatatatttttcatctataattctcccttttttcttaaacctttgcttcgtatccaatctttcacttagaactcatcaaataaaaattttatacgtcctttggaataaacatgtatttaatttcagttttaataggtatatatcaaacctttgcttgggatatatatctataatcaatatatttaacttggctctatgttaactattctatatgattataactacttcatcaatttaactacatttcattaatattacatttttgttatgttgatataattggataattaaaacttgaaaaataaaatgccccctttatagaaacagttttattattttaactatctcctataaagtgagcatatgatttccatatgttttacgctgaagtaataccttaaaagcccaaaagtttttattttaatttctataagatattataaacttttaagaaatgaaattatctctgcactaacctcttctggtttttcttgttgagcccagtgtccgcagtcttcaagaaatatagtttcacggatgtttggaacaatactcttcatttcagaaattatttgatccattcctggaatgcttaagccaacatcacgagtccctactataaataatgcaggaattgttacttttaatccattgaaacagcttaataattctctatttttatctaaattacggtaataatttaatccgccactaaagcctgttttggcaaatgcttctacataaacctctaaatctttttctttaagccaagatgtcattttaggcattggtaatgatgaaagtaatccgttttctcttgataccatactaaatggatttggagttccatcattacctttacgtggtcctgcatctccagaagctgaatacagcaagttatgaactgtagatcgtgcatctttctcgaattctttttctgccacacctggtgtttgaaaatataaagtataaaataactcctcactagtttgtgggaaaacagtggttggtggaattggtggttgaggcatcattggaactgttaaagctataacgcccttgaatttatctggccttaataatgctgcattccatgcaattgttgctccccaatcatttcctactattactgctgtttcttcatttaatgcatccaacaatccaactatatctccaactaaatgaagcagagtgtattgatcaatattttctggtttttctgtatctccatatcctcttaaatctggtgccactacatggtaacctgcttcagccaaaacgggtatctgatttctccatgagtaccatatttcagggaatccatgaagtaataatacaagaggcccttttccttgttcagctatatgcatttttataccatttgtttcaataattctatgttttaattcactcattttactttctcctcgtatacataattgtaaatagcagcttaatcgtcaaattattaaacacgtgttgttgtagcgatttatgcatgctattattataatgtactaaaattagctattcaaccaacagaaaccgtgaaatgtcggttattaataaaaaatattaataacaaaaatttattaaaaaatatttatattgcaataataaaccaaatataatctatacttatgcgtatagctcaccgaaatgaataatataatttatgattgtgttatctatgcaataaaccaagtgttcaattaaaattataatttaggagcttacttaaattatccatactatataaattctaaataatataattcattcgttataaggttgtctgatttgaattgtcaaatagtttaaggcaaacttctatgaattaatatttttatagaatatatatttagaaaggagcagatatgatacaaaaatctcaaataaatgataaacgcataactaaatctcgtaaactcatccaagatgcatttctttcattagctaataaaagcccctttgaaaatataaccgtgaaggatatttcagaaagcgctaatgtaaaccgcgcaaccttttatgctcattttaaagataaatatgatttattagattcttttatatcagataaattcatgacaattgtatccagcaggattagccctgatgcaaagttaaatgaaaaaactttgcgtgatttaatttttattatgtgtgattatcataagactgtgggcactagctatataagattatataaatctgccaacatgttaattgatatgagagttcagcttaaattacaagatatagtacaaaatatgctcaacaatactagaacttgttcaaagaatgaagaagaaaaattagaattgattactgttatgatgagcagcggtatatattgcgctacaaaacgttggcatagtaaaggtaacttgaaagatgcttctgcagtttcttcattagctgatgagattctttctttcatgacttcttggctaacatcagcattagattagattaaatttaactaatctaaatttatttaactcacatatgaattcctcctaagagtctatttaatattcttacgaacactcattaaaattcttctctgctaaatatagccatagattttctctcttaaatcacataaaaacatatgttttatttacatccacagcctttaaacccgcattattcaagcatattctgaagaatattagaatatatattcttcagaatatatatggtttagaatatttattcttcacaatatttattgtaaagaatattatagatatcgaactttaaaactagacttatgtggtaacttaccgaaatcataaatattttgttccgaaaagctatgagaatatcactgaagattataagcaaagattaattattcaaataataaatagctatttattgtctgcatagattttcttatgctgtgaatctaaatattcaataatctcagttttatttataggtgatgagtgccctgaaaaacaaatgtcaaactctaaatcctttaatacatttataaaacgctctaatttagatggattatattcacaattattataatagtccatgccataagcatctcctataaatactactttttcctctggtacataaactattactgaatcttgggaatgaggtgaaataacattttttaaaataactgttaatccacctaaatctatttctaagtcatttttaaagactatatcagcaggtacaacttttataccttgaagtccttcgtattctttacgaatattagtatctgcaaattcaatatcttctccagttaagagacgatttttcattgcatcatctgtccattgccacttagacataacctttaattgttcattagttatttcacatgctatagtttttcctgtaattgcatgcatcccataagtatggtcccaatgccaatgagtgattgcaacataatcaggcaatcttaaattcaatttttctatatgactattaaattcctttacatgattttttgaatttcctgcatccaccattaaagaatatttatctcctttaatatatccaagcactggtctgtcagtttctccgtcattaataagataataaaccttttctgtaacctttgtaaattccataaaaagtcccgcctttctttatataaaattaaaactccccatatagacaaacaatatcatctatggagagttcatttatttaaagatcttttattatagttaaatttaatttaatataaaacatatactttagcttaatcaagataagtacttctaatatatgtatatctaaagttattctattttttataaaagagcttagtagaagatattgttcttaaaatgctcacttagttaaagctctatagtagaacttcaaagcatctcaaactatttaattttaatagcttagttaagaacaactaaaatcatctctttaagtctcctttttataaatcattcaattataatggtatcacgctgaatttttactgtcaatgctttgattgttaaactattactgataagataacattatctaaccgtcttaatttaacttcatcatcaatcatccatttacatttaattctttcgtttattatcattcgtattttcacaattatttataacaatgttattactccatttgttccgtctactcttattctttgtccatccttcaatatacttgttacattatcaatagccacaacagcaggtataccgtactctctagctacaattgccgcatgggatgttgggcttcctatttcagtgacagccgcagctgcaactttaaaaagaggtgtccaaattggagatgtatatggcgatacgagtatatctccctttttcaattttttaaattcagaagaatttcttactatgcatactgaaccttcatatactccacgacttgcagcacttcctttaattgaattagaatcttcgcccttatcttgtttaattttttcctttgactcaaatactggaattgaccctgtagctactaaccaatgcacacctttttcatgggcctcataaaccttatcaaaagctttctttcttttatttagtctttcttctatatttaacttgccttctgccactgaattaagttcctcgagaaaaatgaaaaatacatcttctgaatcattaatgtaatctttcttaactaaaaggcttcctagttttaaagccgttctatgcaaacaacctgctattttttctaagtaaaatacactttcctctcttattattaccatacttcttattttctctagaactttagtaaactttttataatcatcacattttaaccctttctttactaagtcttttgcaattttataggcttcttcttgtttcttaaaactttcttccgaatctaatatggatgtatcgcataataatgcatcaataatttcatttatcatttcaggtttttcactccatgtagaaggtgatatcatacgtcccgcacctatagaaggcctatctccatattctttcaagaacttatcaattgcatccttgaaagcttggctaccctttccgtttatggctgctgtttgtgctatctttatcatttctttgttctgaagtgcagtcctaaaaggcaaagctctaagaagattttctttaacctcttcaaattcttcctttcctacagctttttttataagtttattgaacttatactcagtaatcccaccaggcataccaattaaagaaaatcttttataaacaaaattttcatattccttcatcccctgtttaataagttttataagcttctctgcatcatttgtattctttttcgcagtatccatcctcttaatccactcattagcttctcttgaaaaatcctgccatagaacatctgtatcttcaaataaactattaattgctgatttaggccccttccaaattatagctggagatattgatggtgcctgatagcttaaggccacgcatccactttctctttctataggtatattcttctccttaggcatcttaaagcctgtttcggagaaagaagtatatataccctgataaaaatgagtaaaacatgcaaaatccaagggagtatgtggatatggactatgttccattacactttgaagactaaaatcaacctttttgccttgataaattattttatcctcaggtccaagtatattaaaatcctccccctcaacttccattgttgtaattggtcttgcttggagtaaatatatcttgccttcagaaagagcccattctgtatcttgaggactaccataatgtttttcaacaagctctgctagttttgtaagctgcttaagttcagttgacccaaggcaataggattttctctttgaatcaggtaccttttctgtaacaactccacttttagttaatttaatattaatttctttagagccaagactcttttcttttatatctccctttttgcttagaacaaatgaatccggagttattaaaccactaacaactgcttcaccaagtccatatcctgcacttattaatatttcatctctctttccatttacaggatttgcagtaaacattactccagctgcctctgaatctatcattgcctgaactacaacagcaagatccaccttaaggtgctcaaaattcatacttattctataatttattgcctgtgatgaccaaagacttgcccagcatttttttacatgtttaatgacattttcttttccgtaaataccaagataagtttcatgctgccctgcaaatgaagctgttggtaaatcttcagccgttgcacttgatcgtactgaaactgacatcttttcacttgctcccatttttttatacaaaccgtcaaaagctatgtttagttccttctgaatttcaataggcattggtgcttcttcaatccacgatgagatatctttacttgcctctgatatttcactaatatcttttcccttaatcttttcaagcctttttgttattctctctttaagactagagctttcaagatgagcatcatatgcacttgttgtaaccacaaatccaggtggtacaggaagtccagcatttattaatattccaagattagctccttttcctcctgcttcaagtaatgagcctttatttaattcttttaacatttttatataatttgacataattatttctcctctcttaatgaatttaatcctactgcttataatgtcttaatttaaaatatctgatatcatatttagaaatatatgtagatatctacttactttgttagatgagagtgaacttaggactctttaaagtgtttgcataacttaatttataaacaattaattttttcaaagttagttaacacatttaataagtaataaaacaaagcttcataggaactaagaaattacgtagacttctacatacttatctaaataaaaagcagcaatttgctttttattattaatcagactctccatataaatttttataagctctaataagcagatccaaaaaaacttttttatcctcttgtgacataccttttaataactgttcttcagtttcttcaaaaaccttttccatctctgttaatatattttttccttttgcagtaacttggatttgaaaagtacgcccatctgatatcccagcactacgtatgatgcaaccttttctatctaatccatttaaaagattcgttatagatgagccttttaaattcataacactctctaaacccttgcgagttatctcgtttccgtgccttatttctctttcaataagctccaacaataaagcttgaggtgaagtcagatcatattcctttaatttttcgtcatttgtatatctcatcttttgagcaatgctctttataaataaatcatatggatattcccattctctattcttcattatttatcatcctcactttaaattaggtagacctctacttaataatatatacaatatatctgattgtcaataaatttaaatttcagtagcattttctcatagatttaacctattctttattttatttgtttaaggttgcaaaaaatgaaataggcaacttttaataatagaaagaaatctacttactataaacttacttctctcacagcatcaatcattctttcaaacacctcttgatattgattatatgatcaagtaataatacatttttttacttttaagtattaaattaatttattgaccgcattggtcaatagagttataatcctcttaaataataaaaagaataatttttttactacttaaattacaataataatatttcattaaagtaatgagcatgacttaatagaacaaatattcatataaaattctttattaatcttacatagatcagaaagaaggtaatactatggtatcaaaatttttaaatttagattcagaaaaacaaaatcgtattttaaatgcagcgataaatgaatttgctgagaaaggttatgagaatgcctctacaaatgagattgttaaaaaggctggtatatctaaagggttattatttcactattttgaaaataagaagcaattatttttatttttatatgactattgcatagatgttagtatgactgagttttataaaaaaattgatttgaacgaaagagattttttcattaggttacgtcaaattcatttgattaaggcagaattattgaataaatatcctaaaattcttaaattcattgaagctgtaaatatggaaaaatcaagtgatatagaaaatgatttaaatgcaataaataaggaagaattagaaagcgcttcaaaaagagtatttgatggtatagatttatctaaatttagagatggcatagatatagaaaaagcaataaacgttgttatatggtcctttcaaggatttaatgccaaagttcttgaagaagcaaaattatcatcttcaaaacaaattaattatgataaggcttttattgaagcagaagcttatacagaaatgcttaaaagttgtttttataaataagtattaagttttaaaaggaggtattaaaatgttagatatggtcaaaagctttaaagaattaacccctgaactccaatcacttgcaggcggaaaaggatgtatgttatcaaaaatgtttcaagcaggatatcctgttcctgacggatttgtgattttaccatccgcttttaaggagaataaccttaatgaggatgcttggaacaaaatcaaacactatttgaaagaatttagaaaagataatgaaagtgttttatttgcagtaagatcatctgctttaagtgaagattctgctcaagcttcttttgcaggagaatttgaaacagttttaaatgttaagacagatgaagaaattcaaagagcaatatatgaagtttttagctcaagagaatcagaaagagtaaaagcatacagttcagttcaagggatggatcaatctcatcagatagcggtagtgattcaaattatgatacagtctgaaatttcaggagtattatttactgctgatccaattacaggcagtcacgagagcatgactggtaattttgtatttggattgggagaacagcttgtatcaggagaagcaaatgcatatccatttaatattatgagacctaaaagaaaatatgaaggaccatctgaatttaagaaatatgcctcagagttatataaatatgcatctaaacttgaagaagaatatggcactcatcaagatattgaatgggcagtatcaaatggaaaattatatatattacaagcaagacctattacaacattaataactggtaatcctgatacatatgaatggaacgatactttggatggcgatttcctatggactaatactaatgttggagaagcaatgtctgatgttttcactcccctaagctggtctataataagagctttggatgaagaacaaatgactattcctggatattatttattttcaggtaacatttgtggaagagcatatacaaacatcagttatgcattgtctttataccctgccttcggcaaagatattaagagtctaataaaaacaatgagtgaagtctttggtcaaatgcctgaagaaatagaaattcctatttatccattttcaaaactaggcttgataaaagggatggcgccaaaattaaaacatcgtttaaaaaatattattaaagcttctaaggaaattccagagcatttgaatgaatctccaaatttgtgtagaaagatgactgaaactattaaagaagtacagacaaaagaagaattaattgatctatggaaaactgaaattttaccttttaattttaaggctttgtggattgcacttgctggtggaagaaaaatggtcatagctaataaattaaaggatgagttaataaaagttgcaggaattgaagatacaaatacacttatgtctaattttagaggagattcatcactcgagagccttggacctattattggtatatcaaagattataactggagaaatgaatcgtgaagaatatagaatgaaatacggacatcgtggaccacatgagtttgaattatccatacctcatcctggagaagatgaagcttggcttgaaaagcagatagaagaatttaagaattcaaacacagatgtggaaaagcttcttaataaacaacatgatcaatatgaagaagctctcaaaagattaaaagaaaattttcctaaagaagctaatcattttgaaaagaaaattgtaaaagtagcagaagcagctcgtcttagagagtctgttcgttcggaatggactagggcttttagagttaatcgtgcttttgcgctaaaggctggtgaacttacaggcatgggaaataatatattttttctttacatcaatgaagttttagatttgctttcaggaaatgacttagcattaaatcatattgcagttagaaaggaaaattatgaaaaatataaatcacttccaccattaccatcaattattcgcggaagatttgatccctttaaatgggtaaaaaattctaatagaagagttgattactatgacgaatctatgcctattactacacaagattctgaaactcttaaaggttttgcaggagcatcaggaaaaattcaaggagttgtacgtattttaacaaatcctgaagaaggagaaaaacttaaaaaaggcgaaatattagttgcttcaactactaatgttggatggacacctctttttcctaaggcttcagctataattactgacattggagccccattatctcatgctgctatagtagccagagagcttggtattccagctgttgtaggatgtggcaatgctactacaaagcttaaaacaggagataaagttatagttgacggtggtcatggagtggtacacattttaagtagttgattaaatataaaatgctatattacatggcataaaataaagcagtagttttactactactgctttattctataacgtgttaaaattgcaaagttgcattgccacaccatctgtcataattttgaattcaaatctttcataaaaagctgcattttttctctcctctggcataatctcaatatataaataatccttgtactttttcttaatcctttcaatcatagttccagcaattttctgtccttgataattaggattaactaaaacatagtgaatatatgcaaccatttcgctgtcatctaaaactctcactagaccaactaatttatctccatcccaagctgttaagactgtagaagaattcatcagcgctttatataatcgacttggatactgtcctgaaacccagccaacagataagaataattgctgcacttcctcttgtgtaaatttcttttcctctatgtaagtaatcgccattaaaaaatccctccttttccatacttatagtcacattttttacattgcgtcattgtattttcattatcttccttatgatatgcccctgaccatctgcaaatactctgcaaaataggaaccacagagttccccttctcagtaagacaatactccacgcgaggcggaatttcatcaaatgactttcttagcacaatatcatttgaaatcagttcttttagtgttgatgccagaactgcatctgttatattactcatttcttttcgaagtacactgtatcgcaaagttccttttccagccaaaacgcatattattcgtgacttccactttccaccgaaaatttcaagtccatattcaagtggacacctgatgtcatcttccattttatgttgatacattaacttcacccccttacaatatcaaaagcacaatacagcagaaataggctcaatataaaattgataggtttgtaatatttttcgtaaatatgctgcattttaattccaagaaatgcccatgttaaacaagctgcacctccaacgcttactactcctacacctgccaaaagcaaacctggcaaagtactaatatgtggagcaagatagaccataagcagagtcataatataaaaataaatttttacatttacaaattgaagatagaaaccttctttaaatgacgctccttcatcttttttatcctttagtggttttctcaaaacaatggttaccgctaaccaaaccatatatatacttccaatatatttcagcacaataagcactggcgtgagataagcgttcaatccatatatggccatggtacaaataaactgcacacatgcataacctgcacagattccaaaaatgagtcgttttccttttttccatccaaattgagttgtagtatttagggctagaatatttccaggacctggggtaaaagagcaaaccagcatatatcctaacattgtccaaaaaactgatatcggcattttatcctcctatctttcttataagtccgtagcgattccagattgctacgcctctttcatattcaagtgaatttaaaactattatagaaggctgtctatatattaacaagtaactatgaaatttattagtaacttataaatttacggatatctttttctcttagagtgcttgaaatataattataccagactcaggaaagcaaaatgagtcatatgaaaaaattggaggtaatacttatgaaagtaaatgcttatttagaaatcacaatgaaaatcgaggaagctaaacgtcctgaagctgctaaggtttataatgattatcgtggaccatttctagaaacaattgaaggtgctttgacaaaggatctattaattcgtgatgaggatgttcaggtacttcatggcttcgatagcgtagaacatgcacaagcttacctatcaagctcaatgttccaaaatgatgtattcgtcggcttaaagccactttggagcgctgacccagatgtaaagatttatagcgtggcataatttcttgaaacataacgtaatttatccgtgcatcactatttgatgcacggattttttataagaatagctagaccaaatcaactttcgtatttgtaccttcctttttgagatcacccattatatatgtattttctttataatccctaatactttaacattgtgcaataatttacttaacatcctaatattcgaatagttttttttaagtttcacataataagaattaaatgagttaatattttatttattataaggaacttggaaggtggataatctaatgaaaagatttattgctatattttctatttttctatttttgtcatttaatataaaaagtccaactgttatggcacaacctttaaataaaaccttgtctgaaggtatctatagaatgaaagacttagacttaatggaaaatattatatacaatattcaaaacggctcttctgcaaccatttttatgattatagtagatgataacgagcagataatagaatcacgtcgtttacctgcaaactcagctaaatacaacattggacctttcaaatatgatgataaacttgtaatattaggtccaggttcaataaccatcacagagtaatagcatcaaactacttgaagtatacaaggatggttagccacagatgctaatgctagaaaaaatactataaattttagtattctaacaaatgtacactcaatggttgaaacttttccactagaacaaataaattcagcgtatgaaaaaatgatgactgctaaggttcactttagagctgttttaactatggaatagaattattagtatttttgttataaacgcaaacttaatagaagcaataatatatatttctattctacattataaagacaatactacctttcagttttagatagtattgtcttattcctttacaatgatttaaatataattaggcttaaatttctctacttccacaaaattaaaactttaattttttatattttcatttactttttctgctgtttctgtcacgccagattcagttgcatctgctcctgttgttttatctcctgaagtatcagttccagctacatctgttgctactgttttagctgatgtagttttatctcctgtcatcgcgatttccgttttctctattcctgctgtttcatctactgttactgccgctcctgttgttgtctcagttttcgctatttcacttcctatagaattgctattaagtactatattcctgaactcggatgctccattccatacattcaatccaaatttcccggttgtataataatcctgagttatatcacatacctttttactatttatccaataaataatatgatctccatttatctcaacttttaaatggtatctattatattgtgcttctggaacatcaccctctgcaaatgtaacctctttcatgccgccagttccatctggaacttgtccaaataatctataatgaccccattttccaacattagctataattcctccatctccaaaataattatcaccttgagcaagtaatacaactcctgctacatccccatttgctggattttgattatgccaatcacctaaaattttagaatctatatctaaaatataagttccttgacttgtatctatattctggtctgaaattgcaaaaccgttgttgtttttgccaccatctactacataactatcatcagaaacatgtaagtcttctggtgtattatcaaaagttaaacctgaacctgaaacacttgtttcagtgcttggagtggcattattaagggttacatttttaaatgatgtccctcctccataaacatttaatccaaatcttcccgtattaaaataattttgattggtatcacaaaccaactcatcattaatccaatacttaatatgagtaccatttatttctgctcttaatttatatatattatcttcagtttttggaactataccactatttaaatcactaacaacggcatttccattaccatcaatccctgtgaatacaaacactctatattcaccatttttatttacatttgctataatagatccttctttgggatttgcagtttgagataatagcacaagacctgcagtatttccatctgatacatctgcattaacttctaatgtagatgctacttcactattataagtttgctctgctaccgcaaatccatcgcccgaactatttcctatatagctatcctcctttacataccagtctccagcagtagcaaaattagttaaacttgcaattatactacttgggttactatcatatacgtttatattaattgttttccttgacttttgatccttagacacagcagttaaagttgtgcttcctacactttttgttctaaatgttgttttttcatcatcttgacttacaatttctaagacatcatgattaaattcccaagtaacaccttgctctgctgtttctggaactgtagctgtataaatagtaaattcatcacctacttttttgcctagatcaccttcactcaatgacactaatgcagaatctttaccagcaacctcattattccaaatactacttaatggataatattgaattgtagctgttgagtttccaccaactgaatatacttcaatcccgtcactagaacgattaggaaaaatttgtgctgaaccagttacttcaccattgtttccatacacctctactgaggcagcatccacaaaaatgtgtaattgaatcttaccatcagatgttttgctcattttttgactataagcttgtaagaatttatctgcacttggtgattttcctgatttagaacgatcgagaactaattctcctgttgcagtgttatatttaactatagtttcttgatctgcagattttccgactcttagtttgaatcctacttctgttgtattttcatctggtgcaaactctgctacaatttcatattggctacctgataaattactcataacattaggctgatctggagaaattgtgacattatcaaaagttgtaggtgatttacgtaaagttttatattcgtctattggttgttgtattaaacgaattccttcatctgtgttaaccaattttaattcagtttgtaaatcaaaagatccattaaaagtctttgttataggagcgacattattacagtaatcccagttattcatccaattaatcataattcttcgtccatctggtgtaccgttttcattcataccataataagtttgagcagcatatgagtctttagcaaaattcataggtaaatgttcatcattatcagtaacgaatttccatacgccatctacttctttgaaatctccaactcgataatatctgcccccttcacttaatacccatttatatgttccagtatctccaacttctaatttatatatatctggacactctgtttgaatttcatcttgcattccttctggatgccaatcttttaaattatctgatgagaaaaatcttaatggacctcctgctactaccataaaccattttctatcttcttcattatagaatactttaggatctctaaatgcagaattatttaatggatcagcgtctgatgctattacaggattaccttcatacttaatccacgttcttccattatccttactataagcaatactttgtttttgtctttctgcaccgttatccatataatcttgagtataaatcgcgactaatcctccgccttcaattccatcaaagaaaccagtagtattatccttatctataactgctgatcctgagtaaattgttccaccatcgtctggtgctaaagcaataggtaactctgtccaatgaatcaaatctttactaacagcatgtccccaatgcattggtccccatactgaggcatctggattatactgataaaataaatgatattctccattaaagtaaaccattccatttgggtcatttgcccaagccttagccggagaatagtgatactgttcacgataattttctaaatagttagttgaagtactcgaatcaacatctttattaatactattattaaatatagtcgtagccgatgcaagtgccattaatgctgaatctatatctttttgcgtggaacctgaattatctgaaactgcttgtgctgcatcaatcgctgctttaaatatagcctttgatcccactgaatattgacctacatcagttccttctactgccgcttcatattttgtttttgcaattgttattgcatttattagcgcttctttattaacttgagtactgctaccgctgctactactgctatggtgagatttgccactacttgtagtacttgttgagttgctttgttcgctagttgttgttgtatttgatttattattatctgatgttttatcgctattaccttgagtacttgtttcagctactttaactccatttgaattaaatgtcttagttggtactaaatctgaacctattgcttctccactctgtgcaaatgtatgagttgttccatttattgttatgtctcctaccctcatagctcctgtagtttcatctaaataataagtttttccatctatttttactactccagtttgcattgttcctgatgtatctgcaaaataccacgtatcattatcactaatccagcctgtcttcattgctcctgatggctgcatataataccatgtaccactatcatttacccagcctgttttcattgttcctgaattatctaaatagtaccatgcaccattatcgttgacccaacctgtcttcatttctcctgatggctgcatatagtaccatgtaccactatcatttacccagcctgttttcattgttcctgaattatctagatagtaccacgcaccattatcgttaacccaacctgtcttcatttctcccgaatcacttaaatagttccaattcccttcattttgtatccaagctgctgatgcacttactgaagtaaatgttgctgttgtcatggttgcaactgttatcgctattaactttaactttaattttttcatttttttaccccttttatcattatttttagaaatgtttatcctttgattctataaatataattattttagtaattttaaatttgtactttcataagaatttactgtactatatgaactcctctgtcttagataacgtttactttacgattaaattcactatataatcatgagaatattgtttttaatacaagtatagactaccctactaatttaattaatgttagacctttaatctataatattaattaggtaatctatactgctataataaatttcaatttaaaatggtttacttaaaataagactatgaattaatgtttattgtaatatcccagacgcaactcctaaaatccctactgcgaacaatccaaaaattattaataatggattcacgttcttctttaatagatacatacataaaaatgttagtaaaagtggaactaatcctggcattaagctgtctagtacactttgaatagttgtaactacttcttttccatcagcttgtgtatatttagagagaacaaaaggtatattaacagttgtccattttgaaacaagaccacctataacaagtaatccaagtactgaagcaccttctgtaagatatctaagtttatttcctcccatatcagcaactaattgagttcctttttcatatccatagaacattccataccagtttgttgcaagtcttattgcattgaatcctatgaagaaaattagcggtccaattatacttcctgtaagtgcaagtcctgcccctaatgctgcaagcacaggtcttagtgttccccagaatattgggtctccaactccggcaagtggtcccataagaccaatcttaacaccacttattgatccctcatctatatctgccccatttgccttttgttcttccattgctgctgttattcccataattggtgttgccataaatggttgtgtattaaagaattctaaatgtcttttaagtgctgcacttaattcatcacctttatataatttcttcaaagctggaattaatgtaacacaaaaacctattgcttgcattctttcaaaattaaatgatcccaataagaaatttgaacgaataaacatttttactatatcacttttatttaatttcttttcactcattattttatctcctttctgtaattacattaagtctgaatcatcaatatcatcaatacttctagttccagctactgctaatttaccttcattagctattgattttatatggaatattgctgcaataacacctacagcaccaaaaccaattaaattgaagttcgtaaatgctgctagtaggaatccaatgaagaagaatggtagtaatgacttactattcatcatattcattaccattgcataaccaacaactactataaatccacctgatacttgaagtcctcttgtaataacttgtggtatggctgcaagtgccgcatttactgcatctgttcctgcaagtactcctactatagctgctggaatggctacacgtattgcttgaagtgataaccctagtatatgacacatttctattcctcttgtgttacccttttcagcatatttatcagctaagtgttggaaaaatacagttattgttctcacaaatatagtaagaacttgtcctgcagctgcaattggtactgctactgctatacctgctccaattgactgtttaccaattataacaagtattgctgaaattacacttgcaagtgctgcatctggtgccatagctgcaccgacattcatccatcctaatgctaacatttcaagtgttccacctagtataattcctgttttaatatcccctagtacaaggcctactagtgtacatgcaattattggtctgtggaactgtgcctcatcaagtacacttgccataccagtaattgctgcaactattactaataaaattaattgtaaagtgctcatttataattcctctctttctttttttgatttatataaaaaagtttttatatgcttatataaattgtaattcctttaatctgtccattaagtttatcttagtatcttttgctagtttccttacctctaattcgatacctttttcattaagctttttaaacgcctcaatatcaacatcattcatgcacaatgcatttgtaacctgtttatcaccagccttatagcacattcctccaacgtttacagatttaataggtactccgccttcaaccattcttaatacatctgtagggtttgtaaataagaataaagttttaaaactgtcaaatttaggattattatatgcttcaattgctttagctattggaagcacatatgctttaattcctggaggtgctacttgaattactaattgttttcttaaatcatctgctgcaacttcatcactgcaggcaaatattctgttacacccactctccttagtccaaactgttgctacttgtccatgtattaatctgtcatctattcttacaaagctaatttccatttttttatctcctatcttttaatttttatatttacttaaattgcgcttatattgatataacttgttgcataaattttcaatattattttccaaagaacttatgtattagcattctcaattaactttacctattataattatggaactaaaaatgcagttatctggaatacttatataatttcttcatctatattgatatttttagttaaaacttttatagactcttttccagagttttctgctactcttaacaattcggttatgcttgaaaaatctctgcttcctagaacctctaaaatcattggcagattaacacctgctacaatttccatattctcatgttgcattgcgattatgcttgccgcattaaacgggcttcctccaaacagatctaccataaatagtactccgtctgttgaatctaactcttttataagagtgttatatttttctacaagtgactcaatcccttcacctggtttaaatgtaacggcacctacattttcctgatctccaaaaatcatttctgctgatttaagaatctcctctgaaaatataccatgggtacctataattactgagatcattactttatcatcctttcttgctacatatattatttttatatttatatacatagcaattcctatgccaactaaggatgtaaataaaaaaatcatccaaaactaaggctataactacctttttttgatatttaaatatttttaattacactatgaatttaagatttacatacttcaaatcacatttaacacagtttattaaataattttgtagaattaacacacatgtatataaaaattaaatgccactaacacacgatccttttagatccatgtattaatggcagttaacttttaaatttcatattttcaagtcataatttttttatatattgcgattaagtttccaaatcctggttttaaccagcaccacttaatagagttttgatcttaaaatcattaccacaacatatatactaattaaaatttaatgttttagttaaagtcctatactaaaccaagtttcatccaattatatcagcaatataatatatttcatcatctgttagatttattgataatgcatttttgaaaatcaaactagcttcttttaatgcttctataatttttttgtcaaaatttgtatcacattcatcatatactagtccattattcagcaacattctctccaatgcgcatgcaacatgaaacatgattcgtaatttaactggattttcaaatttttcactcaataacctttcagtacaattcaagaattcatttaatagagaatagatcttttgtggattaagaaatgttataaactcggcaatggtttctttacaaatattttcaaatattatttgcttatctcctgtattttttatagcttctatctttttaccttggataatacttattaatatattctcccctgttccatcgattaattgttctatagatataaatggaattccaagattaggatttgcaatacctataatagccagaatattattttcttcctgaatcttcttaattgacttagttaagttcgtaagcccaagtgaaataatattaacattcttaacacctatattatttgtaacagtttctaccaactccttaagctttatagctgccccttttccagtagaacatacagtaattataaccttatttttttccttagtctcttgaattgcttgagtgttaatattattagtgtatcccctaaaatcagtaagtaaatacgaatatactgaatttaaatcagcgtcacaaacggaacactttctaactgcttctagaactagtggagtggaaaccatatcaatactttttatgtttattcctgtcttttctttaataacatctgcaaaactattcaaagatcccatatctactaaaagcaatacaccttttccctcatcaacttccttaactttttctataacattatctaaaacatctgatggtgctctttcaagaggcatatcaacagcaagaatattatcagcttcaaatagctttttagctacattaaccatgctacttgcaattcctgatccatgtgatgctactacaattccaactctttcttgacgagatgattcttgtattgaatttaataataatgctaaatattcgatttcaacattaggtatacttaggttaaagttcttctcaataagtgcatggatttctttagcaacctcatattctttactttcaattgatatcgataaatcaatattggactcataagaaacagtattcttcttaatcctattaaatagtgcgctaaagtgaagacttgttgcataaataaatctttcattcaattttctatttaatctattttcagctagtatttttatcttttctgaaaattccacaatatttttatcaacaatctttaataggccttctctacgacttatatcattattaaatctatcataaaattgttttaaatgaatgctaatgtctgtagtaataaatctctttatttcttcatcattcatgccctcttcttgaagcacagaagttttactctctattattctataaatattaaatggtgtttcataatcctctgtttctaagaattttctattgccatctggctgaatagtgatattgttagggatgatattccacatagttgttttatctttagtttgatttccaaaagctaatattccgctttttatatttggaggtagcgtacttaaatttatttcaatgtccttatttgtgttaatacaattaaaaaagccctttgcacaaaccaattgtatattagattttagctgtcctacatttccataattggtactgcctatgagagctttaattgcttccgacgaaatcttaatagttttgttcactctctgtgcttctttggaaattaaatattgtacaagctctaatttttcattaataggtctttcatcaaaaggtggaatagttattgttataggaatccttctaataaaagtcttaagtagcgtagaacttggatcctctgttgtagctccaatcaatagcacattcgctttatgctgtctatctgtttcgcctaatttgttataggttcccgtatccataaagtaaaataccatttcctgcccttctggtggtaatctatgtatctcatctagaaacaatatacctccatcagctttttcaacaatcccttccttttctttttcagctcctgtaaacgcacctttgacatgtccaaatatatgtgatagaagaagttgaggattattagaataatcagcacaattaaatattataaatggcggatctttttgtgattgttttatatttttatagtatttgtacatcatattagcaaataaacttttaccaacaccagtactaccaattattagggtatgcaacccatttggtgggtataataaagcagcctttgcttgttctatttgatttttcaaacttgtattaaatcctattagcgagtcgaaaggtgatttatcttctttttcctctaacaaattgataaaatcattaatttctataccttcttcacatttatcatttaagtttacatttaatattctaataaactgttctctatcaaaatatagaacaggtctatctttaattttaattattttcttttccctacaaagagtattaagctctctagaagcattacttcttaatatccccaagtgttcagcaacttgctgcgcactaaatcccttaattttaaataatttttctttagtaaattccctagaatttgataatatatacttataaatcttatcaatttgcttcatagcattatcactttcctctaatccctagttttaatttttagtacttaccattatatatccaaatctataaataacacttctatttaaatttccaactaaataatacttacctaatttcttatttaaagcaattattgtgccaaacaagagtgtaaataaagcatattataataaatttaagcttaaaccagctttacttaataaaaatatttactctttacactcttctttttaatttacacaatacagattttcattaacacactttttctattattttttagtacaattacactctaatattatttgttatattttttcacactaatatatatgttataattgagcctctaaatttttgacctagctgagtactttgctcattagaagtttaaatgtaaatttattattgcaatatatattaaaataaatttcttacttcactcaaaataggcattgatgctattgctccataatttgtacatgtaatagcacctactttattagcaaatgtaattatgtctttccattcttcaaagcttatattttgtttattctcaatatcagatacttgttttaatacggctccaacaaatgcatctccagcaccagttgaatctacttgcttaattttaatggatggaattatttcatgctgtccatcaacacttagatatgttcctttagatcctaatgtaatagttacaaccttaacgcctaattcatgtagtttattaactccagctgttatatctttttctttagttaatagaaatagctcttcatcacttaatttagtaaaatcactttttcttatgaactcaacactatcttcaataaacatttctaatttatctggtgtaattaatgcatcacgataattagggtcaaaagatacatatatattattcgattttgcatattctaataatttaaaataagttttctttaattcaccttctaaaaatcctgtagcagaaccaaaatgaatgatatctgagtcagctatttttgataaattaatattattaaatgaatattctccatcactacctcgtagaaaatcaaaattacgttcaccatttgcatctataccaactagcgctattgttgtactacctttttctactgccatttcagtatttatatttaaatcttttaacaattctattaaatgttttccaaagtagtcgtcaccaacttgtcctaaaaaataagcatttccatctaatctagaaatacatgctgcaacatttgctggcgctccacctgcttttttctcaaacttttctccatcttttaatcctttattatcaacacaaaccatgtcaattaaaagctctcctatacaaaaaatgtttttattcatcttaatcctccatctatcttagtttatctttattaaactatagaaatttgctttgtaaactagtatttgttgaaaattttatacttatctatgtatctaaaagtagctgaattataaagcctaatttagtcgctttttttaacacatctaaatataatccttaatttaaaacaatactatgcttttcaatacttacttttgcttcacccttagcacaaaacgaaatatctgttgcatctaagttagtataaaaagtagatgtcattacttgttcgccatcatttgcaaatatttcaacagagtatttatctataattaatcttagtttaatctttccattttgatttcttatattcatttctctcttatgtaaggaatcacaaagtttccctgaataacttctatcaaatgaaatgatatcttttcttggatcaaaagtaactaatgtttcatagtcattatttttagcaattttaattataaactcttcgcaatttaaaccatcaatttccagagtcatatctaattctcttcctgatataccttctaactccacattatctttaattaatacattctcgtatttaacagaattcttatagtaatttctaatttctctaattggattttggattagctttccatcctttattgttagttctctaggaatactcatcattccgcaccacttaaagtcttttggaacaatattattttcccatgattgcatccatcctatcataattcttcttccatcttctgcttctagagtttgaggggcataaaaatctaaaccaaaatctatagttccatactcttctctattaaacgtatgattttccttatcatattttccaattaagtacaccgtattatgtccattatggaatttcagtccattcgcctttacttccattggtgaaataatcataatattatttccatcaatcttaaaaaagtctggacattcccacatacttccaatctcatttttacttctatctagaatacaaacaaagctccattcttttaaatcacttgatttatataaaagaatttgtccgcttccatcagcatgcctgctagctactacagcataaaacccatcagcttctttccatatcttaggatctctgaaatcttctaaattactaccttctggtagagaataacttgttatcacaggattacaagttagcttttcataatttactccatctccaattgcaatacattgagtttgtctaattatatgagccccatcttcttgaactttgtcaaacactccagtatacatgagtatttgctttccatctgactctactgcacttccagaaaaacatcctcccatatcatattcctgatctggcgcaagagctgttggtaactgctcccactttataaagtcctttgtcttactgtgcccccaatgcattggtccccatttagtatcgtatggataatattgataaaaaagatgatactcctttgcaaatttagaaaatccatttggatcgttaatccacccgactggtgatgataaatgaaacgatggcctctgttcttttggtatactctttatagattcttcttcaaacactcttgctttatttaaaatttcactactatttctcactacattattcataatcatttcctttcactcatcttaaatattatataagcgaccattcaagccgcttatataagttttttattttgcaaagtatgaatctaaatatttttgtttaatttctaatatttttgataaaccttgattatccatttcttttaaataagagtcccattcttcatctattccaccatttaaaatccattcagctttcttacgttctgtatatgcctttactgctgtttcatattgagtaagtttttctatatcttcttgagacataaatacaggtggataattgtaatcagctttcatatctttaacataagttttatgaagtatatctaatctttcttgggcatcatctggagatgttgtatactttccataataactatcaagaactgctaatggtcctgaaacaaattgatttgcacgaacttcccatggtgatgctgtacctaattgtaaatgctttaaagttttattttctgttaactcaaatacattttgatttttctcatcaccatatgttccccagttatcttgtattgattgaagaggatcatataacttatctatccattttgctgttaattctaaatttttatttgccgatgttacaacacatcttcctaaatcaaacccatatccatttgatctagtagcattaacagttccattaggacctgcaagtgctggaagtggaatatagtcatctttgtttgcagctatattagctctatcccatgtgaaaaacataccgtaacgatcattttttccttttgctacaaaagtatcccacttttgagtaaatgcttctggatctataagaccttcttcttgaagcttgtgaagccacttgataccatctttatatccatcttgagtagttgaatatacaactttcttatcattagtaaccatataatgatctccattgtctcccaatccaaaagccccaagtataaatcctggatcttcatttccgccaacagcattaataataaatgacattggaattacatctgttttcccttcagggtgtttatccctaaatgcttttaaaactgtaactaattcatcagttgtttttggtgcttgaagacccaattcatcaagccattttttatttatccatggaatatctccaacagcttgaatagcttcctttccacttcctaattcctctatccatgggaatgagtaaatatgaccatctggtgcagtaatcattttcttatactctggtttttcttctagaacttttgataaatttggcatatattttgttattaaatcttcaactggaataataactccttgttttgaataacgaagtaaatcattattgttcataccagcattaaatactacatctggaagtgtatctttttttgataatgctaaattctttttatcaggaaattgatcatctgtatagcatgtccaatctatatgcacatttgtttctttctctaatctttgaaaaataagtctttcatttgggtcttgagtcgaaattgatggcgcacttgtaagcatttttaaagtagctgtttcttttaatggaaatgaaacatcctttagtgtagctgtatctgttttgttgcttgagctaccacatgctgtaaatgataatactgttaacatagctaaagaaatactaaccaactttctaattttattttttctcatattatttccccatcctttttctatatatatttttttatcccttcactgatcctgccattattcccttatcaaaatacttttggaaaaatggatacataactagtaaaggtaaacttgaaacaacaatcgtggagtattttagcaattgtgccattttagccattgctgctgcactttgaacatctgcaatcataccaggtcttggtgtattttgaattaagattgatctaattactaattgcagaggttgcaatttagtatcatctaaataaatcatagcatcaaagtaactattccattgagctacaaattgatataaaagtaatactgcaataattggtttacatactggaatcattattttaaagaaatgtgtaatatcacttgcaccatctatagcagatgcttctcttaactcttttggtaagctttgaaaataagttcttgccagtataatattccatacattaattgcacctggaagtaaaatcgcccacactgtgttaagaagctttagattatcaactaaaagatatgttggcatcaaccctccgccaaaaaacatagtaataatatataaagtagtaataatttttttccccacaaaatctggtctagataatgggtatgcagctaaaagtgtggctccaactgaaattaccgcataagcagtagaatagaatacggaattcaaaaatcctcttaaaagcatatcgtctttaaatactcttgtatatccttctattgaccatttactaaaatcaaatgttattccttgattgtttaatgtattgggatccataaaagaagcaacaactatatatataagtggtataataatagctaatacaaaaagtattacgcctacataaccacttattgtaatagatttatcagaaaatgataatttttcgaattttttcattttcattttcatattcatcttatattccttctccctcgtttaattttttaacaattgaattcacaactattaataaaactatattaataactgaattaaacaaacctaccgctgttgaaaaactataatctccatttagaagacccattttataaacataagttggtaaaatttctgaagttggtaaattcaaatctgtttgcaaagctaatgctttttcaaaacctacgctcataatatttcctgctgataaaataaattgaataaccataattggcttaattgctggtaaatcaacattcaaaatttgttgaaaaatattcgctccatctataacagctgcttctgttaattcttgacttgcatttgaaagagctgctgtataaataattgatgcccaaccagttgcctgccaaactgaactagctacatatatagtccgaaatgcactaggcattgccataaagtttgtagcagttccaaaaaattgattaactggcccaatcggtgataagaaaacgataatcatacctgaaattactattacagaaataaaattaggagcatacaaaattaattgaatctttttcttaattccctcactctttattcttgctaaaagtaaagcaagtataatcggtaacgggaatccccacaatattccatataaacttacctttaaagtattcattaacaaagtcataaaatctggggaagataaaaatctttcaaaatgttttaatcctacccactgactatggaaaactcccgaaatagcactataatcttcaaatgcaattagtactcctcccataggaatatacttaaaaataattagcagtattagtggcggtagcgtgaagaacagatataattgataattctttttgatatactttaacttactatatattttagagttctttttattaataataggatctccaccatctaatctgttaaaattaaatcttgtactttttaccccattcaaacttatttcccctttcattttattatttatttttttacatttgtaacacaaactcaatttacctttacaaatccactctgcttgttaaatcttttttgtaaaccttatctttaatttataaatagatattaccagattctcattacatttgtcaatataaatattacattttatcatcattatgattttacatttgcacacaaaatatattatatctctttttatttgctagcatttatgtgtatataattattttattttacatttgtcacttcatttgttatactaatgtcaataacaatacttaaaatattgatacagattttatatgacaaagaaaggagcctttaataatgctaaataagaaaataacggttcaagatatagccgatgaattggggatttcaaggaatacagtttctaaagctttaaataatactggaacattagcagaagctacaaaatctaaaatcattcaaaaggcaattgaaatgggttacaaacaatttgcatatgtaaacaatgtatcatccatttctcccaattcatctttaaataaagaaattgcactattaacaagcagtatgccaaacagttcccattttggatctcatcttttatcaggttttgaagaaaagatgagcactcttggctatagattgtctatgtatgttgttcgtgataatgaattaaattcctcaagcttaccatcgaactttaaacctgagttggttgatggcataatatgcatagaaatgtttgataaaaattatagtgagcttatatgtggattagacattcctacactatttatcgattcacctagcacccacaacagtaaacccgtaaatgctgatattcttttaatggaaaatttccatagtacttataatattattaaaaccctaattaataataataaaacaaatatagggtttgtaggagatatatatcattgtgagagtttttacgaacgttggaagggttattgctctgctctattagattcaaaactctcatttgatgttaataattctattatcgaaaacgacaaagaaccttatgctgatcctgaatggcttggtaacaagataatgaacctttcaattcttcctcaagttcttgtatgcgcaaacgattttattgcaattaatgtcataagagctctaaaacataaaaatatttctgtacctgatgatattttagtatgtggatttgatgattcaatggaatcaaaaataattgaacctcatctcactactgttagtatcccaagttatgagatgggagatattgccgcagatttgttactttcaagaatagataatccaaccattccatttagaacaatccatgttcgtacttcacctaaatttagggaatctactggaagcttatttaataaaatcaactgttagccaattaaaaacaccctataaagatagacaatttaataaaagtccatctttatagggcagttttatgttaaataaaacatataagattaaaaaaatgtcttggcaatcatctttcaaatatagtcgtaaacttcaataaagttgccattagtgaaatttcttgattagaagattccataaatttaaatattaatacgcagctttaaatatgtttacgatatctctttcatttccttttcttggattactaaatgcatttccatctaaaagagctagctctgccatatattcaaaatctttttctttaattcccatttcttttaaacttgctgggattccaacgtcttttgaaagtctaaacatagcatctatagctttttctgctgcttctattactgaaagacctgaaatattttctcccataaattctgctatatccgcaaatttcttaggatttgatatcatattataacgttcaacatgaggtaaaagcatagcattagcaacaccatgtggcatatcatataatccacctaattggtgagccattgcatgtacatatcctaaattggcattattaaacgccattccagctaacaatgatgcataagccatgttttctcttgcttcaagattttctcctaaagctacagcttgtcttaaattttttgatattagtttaatagcttgtattgctgaagcatctgtcaccggatttgcatcttttgatacatatgcttcaattgcatgagttaaagcgtccattcctgtagctgctgttaatcctgctggttttttaaccataagcattggatcatttatagaaactaatggtaagtttctccagctaactataacaaattttatttttttctttgtattagttaatacgcaatgacgagttacttcactagcagttcctgcagtagtatttactgctactattggtggtaatggattgctaagtgtttctattccagcgtaatcataaagatctccttcatgtgttgcagcaattcctattcctttaccacaatcatgagaactccctccacctacagttactatcatatcacaattttcatttttaaatacttttaatccttctataacattaacatcttttggattcggttcaactccgtcataatatgcaacatctaatccagcttcttttaaatatttaactgttaattcaacagctccaccttccatgtctcttaaaaatttatctgtaactattaatgctttttttccacctaatattttacatcgttcgcctactactgatactgaatttgctcccataaagtttacacttggtactaaataatcatacattctcatataaaatattctccttttcattttaaaattatttattaaaaatttctgctgcagcctttgctatagccatatcttcttcaacacttcctccgcttactcccacggctccaacaacttgtccattttctattatcgggaaaccgccgccaaaaggtattattctgcagttattggttaattgtaatccataaagactttctcctggctgaatgtttggagtaacttcatgagttcctatttttaatgctgctgaagtaaatgctttgttgattgctatatcaacacttgttataaaagcgttctccattctgtgtatgagcattaaatttgtccctgaatctactgccgcaaacactattggcacattcatttcagcagctttagcttcagctgccacagccatttcttttactatatcaaggcttaattgttttatttcatttaacttcttcaagattcacatctcctttcataggcatattttttagtcgccttcagaatattactgagctccaattgtgcaaggtattcccataatttcaaataaagcttttaatctctccattttatcttcactaggagatttcaattctccgagtaaataatctcttccaatagcttcatacttattttctccataattgtggtatggaagaagatcaattcttttaaggtttgttaatgattttgaaaattgagctatttctcctatactttgtaaatctgcattaaatccttcaattacgggaattctaattattatttctttagtcaattgatcgcttaatttgatgttttttaagataatattattgcttacgcctgtaaatctcctatgaacttcatcattcatactctttatatcaatcatagctaaatctatatatggcattaccttttttacggcttcactattcacatacattgctgtttcaatagcagtatgccatccatatgctttacattcttttaaaagctctactgcaaaatcaggttggagtaacacttcgcctccagataatgtaattccaccatttgatcttctatattggacactatctttttttaattctttaatgatctcttcaacactgtatttctttccttcaagaacaagcgctccatttaaacaactttcaacacatcttttacatttaatgcatttacttttatctattctatatactgaattcatatcaatagctgaagtttcacatactgactgacatcttccacatttagtacataaatttttattaaacattatttgaggagcaacttcttgtgattctggattactacaccataaacatgacatattacaacctttgaaaaatactatagttcttatccccggtccatcatgtaatgaaaatttttgtatattaaatatgacaccttcaatatctttactcatcactttttatcccctctgaaacttttttacataacatgttctgttcttgcaatgatatcattttgtatagatttatctaaagaaatgaattgcgcactatatccagcaactctaacaattaagtcttgatacttttcaggatttttttgtgctgcaagtaatatttgtttatctattacattaaattgaacatgaaaacctttttgatcaaaataacttcttatcaatgctgatacatttgttaatccattatcaccttttaatgctgatggatgaaatttttggttgaataaagttccatttgaagctataaaatgatccaatttagcaactgaattacaagctgcagtagggccagacacatcacatcctcttgatggagaaaccccatcagctaatggttgtccagattttctaccatctggagtagcacctgttaaaattccgaagtatacatttattgatgatggatataatcctggttgaaattttccacctcttgggtttgtatatttattaacttccctacagtatactaatgcaccttctctagctaaatcatcaacttcatcaatatcatttccaaacttaggagctttttttagtaatgcttgtatttcttctgcattttcaaaatcattatttaatgctttctttaattctgaaggcgtaattttattttcatcaaacacaacttttttaacagcaactaatgaatctcctatattagctaccccaacaccttgtggtccactaaagttatattctgccccaccatcttgaaggctttttcctctaccaatacaatcatcaaccatagatgacaagaaaggtaatggtgctctttctgcatgtgcaatatctatacaattatcagcacaacacatatgttttacaaaatactccatttgaatcttatacgcattcataaattcattaaaagatttcatttcttcaaaattttgagttttaggaccaatttgtttatttttatctaatccagaatttatagttaactctactattctagcaaggttaaagaatgctgaatcatgccatccttctgtttttcctggcttttgtggctcaacacatccaattattccatagtctcttgcatcttctaacgtaagtcctctagcaactaatgctggaataataacttcatcattataataagctggaagtcctaatccttctctagttaattctgctgctctaagcataaattcgtctggagtcttattccatattcttactgatagagatggttgaggtaatttaacatgtactgctgcttctaatgccatatatgatattttatttgttgcatcttttccttctgaattttgccctccaacaattaaattttggtacattggatagccgccaaaatgcttagttgaaatctcatctcttactttattaatatcatttaatttaatccatatacaatctattaactcttgagcaaattcctctgttatattttcatcattttcataatatggatacatatattgatcaaatctagctggcgaaatagaatgtccattagattctgtatttattattgcgtgaacaaaccaaaatgcttgacacgcttcatagaaagaagttgctccttctgctggaacctttagacagatttttgctatttcatttaattcagattttctttttaaatcatttgcattgtctgcaagctctttagcctttttagcatatctatttgcatatattattgctgcttcgcaggaaataataacactatttaaaaatttctctttctttataaaatcaggatctatacttctatttttctctaattgttcctttgcttcatttataatcccattaaatccaatttttaatactttctcataactaacggaaacatgtcccactccattatagtaataatttcctacagtaaatacatcggaatttactgcttctcttgtttcttcagtcatatatgaagttgctaattcacttgttgtttttccattccaatattcaaatacagcttttaatttttctttactttcttctgaaatttgaaatgcatctccagttcttttgtctaatctatttaattcatcttgcaaccatttattagaaaactcagggaatacttgagaagatcttggttctttagttaagcttcctactataagttcttcttctctaattgttatagggatattttccaatatatgcttcaaagccaatgcccttcttaatattgccggttgaccttctgtttctttaaatgattctgttattaatactgctctctctgattctacacatggtttagcatttaatatttgagcttttaaattatttattctttctgtttgggtactaaatcctttacttatcattctaatttcctccaatcataatttcgcttggcttaatctaatattatcatcgtattgataaatttttaacaaaatttattgcttaatatttgtactttcttgctatattatcttacttttttatttattagtattttcttgtttaatgataacgtttttgttgattcctctaaatttaaaatttaacattcttgtttgcgcgcaatagttttctttaaatttcaatttttattaaaagttacattaaaaataaaaagctatccaatagtgataaaaatcattattagatagctttttgtctttaattattctaattactatttctatatcttgatggagttattcctactgctttcttgaaaacttttgaaaaatatcctgattcatcgtatcctaaacttatagatatatctattatagacatatctgtattatctaatagctgcttagctttttctattttatataaatttatataatcactgaaattcattcctgtgttttttttaaataatttactcagataaaaaacacttaaattacaagctttagacacactttctaatgttattttttcattatatttttcacttatataagttaaaactggatttaaaacagtgtttatctctttacttccaatcaatctttccctaattatatcatcatgattatcttggctcataaattctaaaaattcattcataacaatatttattttaggtatattattgagagtatataacttatcattatatacattaagatttgtatatgccttatttttatctctcattttaataaaaatattaatcattctatttagtaaacttgtacatttatctttataaatattaatatgcctattgcataacaattcatatccatataataaattctgaagcaaatccttaatatctttttcttcattaaaaattattttagatagaatcaataactctttttcttttaatttattttcatttgttgctaaatttataatatgtttatttaacatattatacaaattttctaaacttattggttttaatatataatcatcaatatttagatcaactactttattattgaaattataatattcaataagtaatattataattttatctttattattttcttttataatttttgaagcctcaactccatttattcctggcatctcattatctataattattatatctgaattaacttctttatcaatttctattgcttttttggcattttctaatgcggcgacaatgtttattttaatatctaatttattaattatttttttaagtgcttctagctctatgctctcatcatctactaacataacattacacattaatattacctacctttcatcaattggtaagcttattgtaacttttgtccatttatttaaatcacttactacatttataaaataatcatacctatagaaattttttattcgttgttttgcagccactataccacttaaagagtaatttatattgttttcttcagaatttataaactttaatttttcttttgatattcctattccgtcatccgtaactgaaattattataaactcatcttttttatctacaactatatttacattcccaacatcttctttttccatgattccatgaactatagaattttcaacaaatgggaaaatgctcataaatggaagtttaaaattatctacattgcctaaactaatactaaaacttaatctatcactaaacctaatcttctgcaaatttaagtaatctaaacaataatctaattcttcttttaatgtaactactttattagatttataaaatgtatttcttataaattctgtaaatttgtaagttagatcacttgttttttctgcatcttctattaatgctagtgaataaatgttattcattatgttaaatacaaatttgggacttatttgagtatatagtgattttaattttaatttttctaaattattttgtaatttaatttgttcagtttccaatttggtagactgctcactactttcatttaacttctttacagttatcctatgcatcccttcttctactaaatattttgataagtgtagaatcatttgggatatatttttaattttttctagtggaatagttggaagtttattatatgcatatataagctcttgatctccacctagatcacaattaacatttgcaacactttctaaatatttttgttcatcttcatttataagaacttgtccagccattatatctcctatatattgcccttgaactataataggtaccgcaaaatctactaaccccttatgacatatgtatatatatggctttcctgtccttgtagcttcaattccacctcttgaatcacacctttcacataattctgattgttttttgtcgcggcgtataatactgcaaaattctgtacagcaactatgttttgtaacaggtttacctttataatcagtagttataatagaaatttctgtagcttttgcaatatcgtcttgaatattctggaaatcatcgatacttattatatccttaagattaataatgttattcattcttcatcaccacaatcatccttcttttaaattatgtaattttaaactatattaactcattgtgatagttaaactcactagtatcacttacaactacaagagctctcataaacttactactctatcatcaaaataacagtagctaatgataataggcaaaagtcgaaaccacattttcttagctatttaatatataactagaaagtctaaatgcctgtatacatctattaaagtgtctacaggcattaaatattttctattaggttctttgataaactactttattgcctctgaaatttctgtgaatattacccctaatccatatgctcctgcatctggatatcctaaacttctatcaccaacggttcccgcacgtcccatacgcgctactatttcctctgtcttttttgctccttcgacagctgctttagctccaatctcaaacgcttctttaaaattaatgtttacttttgcacaatctatccaagcatcagcacatggtactagagcatctattagtgtcttgtctccaacgacagctcctcttccaaaagaacgttctccagtagcttgaattcctctaactgctgcctgtatcatttctgcaaattctgaaactgttaattcagtcttttctgatacttgctttcctgctgccctaaatgcagatccccatattggacctgatgctcctccacagtattccattattactaatgaacatgcatttaaaaattctcctattgttttatgctcttctgaaagaatttgtttccattccctttttagctgcttaaatccttttgccacactcataccaaaatctccgtctccagcatgagaatctaattcacagaatggtacttcatttttaataataacttcactcattttatcaataatataaatcatattatctagatttattttttcattattaatacatgcaaatttctcactagtttctgcctcaaaagtaacttcattttctgcatcatcactctcttgcaatgctgtatattcaattgcatctactggtccagaaactttaaatgatggtgcatcgcatttttctgataataactctttaagttgtccatctaacttcattaatgacactgatgcaccttgcatatctatgcttgtcatataatttcctacaaaagttctgcatatgttaatgtttctctttgctaattctgctgtgacagaattattaaataagtataattcttgtaatggagttccgccaaatccattaatcaacaacgcaacttcttcattatttgttccatctattttcatatcctttaagatagaatttataattctttcagctagctcatcagctgtacctatttgttctctcttaattccaggctctccatgaattccaactccaaattccatttcatcttctgctatttcaaatgttggagtccccttagctggtactgtacatgatgaaaatgcaaatcctaagcttctgacatttgaaacagccttttcagcaatctttttaacttcttccaatgataatcctaactctgctgctgcacctgctattttatgtacaagaacagttcctgcaactccacgacgtccaacagtgtataaactatcttgaactgcaatgtcatcatctactttaatataatcaaccttaattccatcttcacttgctaggtatgctgcatttttaaagttcatcatatctccactgtaattcttaataattaatagtgttcctttttcactacaggtagcttttattgcttgatagatttggatttgagatggcgaagcaaatacatctccacatactgctgtgtctaacattcctttgcctataaatcctgcatgggctggttcatgtccacttccaccaccacttattagactaactttatttttattaatatttttcttcttcataattttatattttcttacaaattctaattccggatgtgccatagctattccattacacatttccattactacattttctgctttattcattattttcttcattacttaaacacctctataataattttgtaatattcaccatattctgcgacaataactacttccaattcttcaacctttattggaaatgaaataaatctagctttacatgtaactaaattttatttaaagccatttcttttaatactattttaatttcttctatatttttattcatactgcattcaacagcagctgttattacaccttcaactaaaggagcatctataatttgaatcttttccttcatagaatcatccaaaaattctatagccatgtctgtattcataaaggcacttccaagatcaaaaaatatcattacaccatcttcgctataaactttttctatggcttcagttattttattaataccagttccaattctattatctgcagttccgcctgcggcctcaatcttaacctctggtgccatttgacctgcaatatccttaatacctctcgctactaaatcactatgagatactactacaattccaaccattttatttcacctcacctctaaaattcttctgcgattgtattaagtattagatacattgaagttgctccaggatcttgatgaccgatacttcttttatctaaatagctcgcccttccttttgttgcaactatatttttagtgttttccattccacttttagctgcatccctaattgcaattaaaatatcttttgaagatttattttcatctaaagcttttttacctgcttctattgctggtgctagcgtatcaatcatagttttttcaccttctgttgattttcccctcatcttgattccctctaaagacgtttctaacactcttataaagtcatttatatccatgaagcttttctttgtaactacgcttgctgctttcataaaagctgttccatataatggaccagatgcacctccaacattacttactaatgccattccacaattttttaatatattacctaaatcatcttctggaatgttatttactttttctacaacggctttaaatcccttgctcatattaagaccatggtctccgtctccaattgctgcatctaactcacttaaatataatttttctttttctataacatcacttattttattcaaaatgtcttttaacctattaccattaatcatttctaacctcctgaagtatacttttaaaatactttaaatcctggggtattagcttttgcgtcaagtaaattcttaagttcttcatcgagcttcaatattgaaatagaaaatcctgccatctccaaagatgtcataaattctccaatgaaagtcctatgaattcttattttcttatcttctaatatctcactgacttttttattaattatatatagttccatatttggagttgagcctaaaccatttataagaactgcaacttcttctccattatttattgttatgtcatctaatattttattcattaaatgttctactatctggtctgcacttgaaatcttttctctatgagtacctggctctccatgtatacccattccaatttcaacctcatcttcacctaaaacaaaatttgcttttccagctgctggtactatacaagacgataaagacattcccatacttctaacattggctacagtcttatctgcaactctttttacttcctctaaagtacttccactttcagccttagccccagatatcttatgaacaaatacagtccctgcaattcctcttcttcccgctgtatataagctatcttctactgcaacatcatcgtttacaattacttcttcaacttttattccttccatttcagccatttctctggccatttcaaaattcataacatctccagtatagttttttattacaagcaaggtcccttttccatcatctgtagctttgattgcttcatatatttgatctggagttggggaagtaaatacttccccacatactgcaccatctagcattccatatcctacatatccagcatgtgcaggttcatgtccacttccacctccacttattattgatactttattttctgacttatctgctctaagtatcacatttgtgccatctaatttttttaaatattctggataagcagatgtaagtccatctaacatgtccactaaaacattattaggattatttattaacttcttcattatttacatgcctctttctttagcttataatctttacctattttatctgctgtaacaattgctgctgctactgcctcaacagttattgggaatggcatagaataaattgattcttctttaatacatgactttttagcaacttccataagttcatcttctgtaatgctatctacaccaatatctgataaacaaattggtaatcctacttctaagcaaaaatctaatacttgatttaattcttccataggcgcattttctaaaaccaattgtgctattgtaccaaatgcaactttttcaccatggaaatatttatgagtaccttctaatatagttagtccatcatgaatagcatgagctccagctaatccaccactttcgaaaccaatacctgataaaagaatatttgtttctataacgttttctaaagctggtgtaactaaattgcaatctgacgctgctttcgcctttgctccatcactgataagtgtttcataacataattttgcaagtgctagtgctgtattagttccttttgcttcaccacacgttccttctctatatccgcaaggtaaccccgcatttacgttagaatatgattttgaagttgctcttgcttcaaaatatgttgataatgcatctcccattcctgaaactaagaaacgagttggtgcctttgcaattactgtagtgtctattaaaattacacttggactttgcttaaaataagcataatcatcaaatgcaccttctggtgtgtaaagaactgctgaatgacttgttggtgcatctgtagcagctatagttggaactataattaatgcttctccttctgcaacacatttagcagtatcaatcgctttaccaccaccaagaccaattatgcatgcacacttgtttttcttagaaatttcttgtagtcttgctacttcttctctagaacattctcctttaaatccactttctacaaaagtaatttcaaacttttcacaagttttatttagcttatccttaactcttgcaacatcatccttgtgtgctattaataacgctgattttccaaaactcttaacaaaataacctaagtttaaaatttcatcttcaccttgtacgtatttagttggacaaataaatgcttttctcataattgatttctccttttcattcaaatatttttaagttgcttttattataatatcgttttcaaataaatacattggactaaaatgacaagaatttacgatttcaaaccgtaaattcttgtcatttaatcgattaattgtattttcctatttatctgacattaaataaatattgtttatataatgaaaagaaactgtttaaaaatgttctaatacatttttaaacagtctcttaacaattattttttcttacaatatttcctataaagaaatggcgttacaccttcatattttttgaatatttttataaaatatcctacttcactaaatccaagttcatcactaatttcattaatctgcatactcgtttcctctaataagctctttgcccattcaatttttagtttagatacatacgttgaaaaattctctcccatttcctttgtaaacaatctgctaaaataacttatgctaatatgacaaatcttggccatttgatctaatttaacgttttcacttttatgtttataaatatactctattgctggttttaaagtatcatttactttaacattattatcattacttaaagtgctatctttaatataagcatttattatagcattagacatttctttttttgcattttcaatattctttattgtataatccttcaatgtgtttgaatctatttcagaatgtcctttcattaccttttgatacatatctgaaatcaaatttttttctaatgactcctctaccaagtagttgcataaagaaaataacatatcggcaattttatttacttcctcataagataatacaggcaattcatagtaatatgctttaaaatcctccaaagcctttttagctatggagtttttaggtaaaactactatttgctctaatatgctttcagcatcagcatttaataattttacctgtcctgccataactgccccaatatatttaccttcaatcattattggaatagctatatctattatattgtaatggcataaatacatatatggtttatttaagcggactgcctcaagcccacctctcgaatcacacttttcacaatactttacaagttccgaattacctcttatttcattacaaaatttatgacatccactgtgcttagtaactggattacctttatagtcaacgattattattgccatccttgtaactgctgaaagagattcttgtagactgtcccatttttctaaatctataagcttttttaaatcaaaactattttttatcaatttttactgctcctcatctctatcaataatatacatattattttatcatattacagcaaaaatatattaattattttatatattagtattctcttttaatactaaatcgaagcaatatttcaataactaattagcccctaacacccaaggctcctgaatagtggtctttaaattgttataagcattaataagcattcttagtgatgaatctaactgctcactttttagaactaatgcattataattgttttctgtcatcagtcctacatctacttgtgtctttgcatatttaagttttgtgttagttgactttattgtatcatttaagtcatttattttattttccaagtcaagtaacgttgaataagcttgctttaatccatttttcaagctcttttttgaatcatctagcttaacttgtgcttcctccactccatacttaccatctacatatgctccatacttactaagatccagataatacttcaatgcatttttttcgtaatttataagttgaagagcataagaactaagtccaatagaataagcaccttcgtctaattcaattgctcctgtagcatcatcttttttcatatatgaagctggagatgggattccaccagacggcatgcttggaatatctttattcataatatcctttaccccatcatcctttaagtcatctaaataatcctttgtaagattaattaatttctgattatattttagataagtttcaattttatcatttatgtattcatcacttgaaccatcaattttaaataaattatattctatatttggatctaaagtataatttgataaattcaaattagttaaaactcctaaataatccatgctgtcctttaatgaattttcttttgcggttatatcattttttaaggaattaatttcaatctgcttatctgttaattgatttgaagttgccatgcctatttgcacttttgttttaatagtttctaagtctttattttttatatctaaatttgttttagcttgacttatatctatttgctttataataattgcattatacttattagtgatgtcactcgatatttgatcttgtaaaaaatctttcgactgatttgtttgtttttctagaagctcaagcttatcatatgggaaatcatatattttttcaccaagtctctcataaaagtcattagttttatcttgaatatcctctttctttctgtacatggaaatttgctgagactttaaatttaaatcttcactattagttatagctgcatttataacctgatctaaagtaagacttggtttaccgttagatgattgtccatttattattgaattactttcatcatttattatttgagtatttactatcccattatttttttgattctctattgctaagactggatttatacttccgcctactatacttaatccaattccaatagcaactatcttttttatattcttcttcatttattcttcccccttgtattaaatatctatataagtttctatcgatattttttcgtcttcttcctctgattttttcccatttctatatttactcagtgcaattctagcagaatataatacaattcctattaaaaaccattctactgcatacattattccactttttacatatggtaatataacattccatccaactccttttaagtttatgaattttaaaggaagtgcaacattcataaatggccaaatatttttaattattctaggaagtccgctaggcattgcatactctggaaatgggattccactagctaaaaaggttactatatttatcatggtaaaaaattgagtgaaatatattaaattatcaaataacgctgcaaatagaacaccaatagctgtaagatcaacaagaaatattgaagtcaacgccaagtattctaatatatttccacgaagaggcaaatcaaagtattttcctaaaatacataaggcaattaagcttgaaaatactgatataaaaagaatcattaaaactcttgctaaaagaataagtatgtttttcacagtatcttttgatttaaaattgattaaagttaacttttctctactttttattaaagcaggtactaaaaatgtcataagaaaagtcccttgcagtaaatatggcacaagagagtacatcaaataccgtatatagctaagctgtggttcataaagaacacgctcactatatgaaaaagtcgtaatagctttctttgcattatatggcatcatatttttcccttcaaatactttaagttgaattccggcatttatagttcctgtgactccattacaatatgcatataaattgcttccaacaacaacatttgtttcatctattaatagtgcaacactaggagatttctttttgacaacatctttgttaaaatctttaggaatcaccattcccccactaacctttttctccttaatcgcttgttgtaattcttcttgtgaatctgcataataattaatattaacacctggactctttttaagttcttctattatagttctggataaagatgagttatccatatctactattccaaaaggaatattttcaatatagactttactgaaaatacaagccacaaaaattactatactaatgtgaagtaaactaagtgaaatgatactttttttatctctagctagaaacttcagaaacctcatcttttttcctccttctaataactttatttaaaattttctctttaatattagttcttttctttgaaatatttttaattatcagtataactaacataataatccatgtgaaaatcatatattttatcaaataatatagattaggcactacgtcattaaaatttaatcctaaaagagataagtctctcattggaattccataatatagaaaaggaataattttagataattttttaaacatctcaggcgcagccattagtggaaatgtataccctgacagtaaaacaaaagatgaagccataaggctagaactactcactgcttccagtttattttttataactaatctaaataaaatccctaaatttatcatagtaatactaaaagttatagttaatgcaattgcagctttaactgatcctctataaggcatttgaaaatatttatattgtataaacatcaatagaaaaattgatattgaacatattaatccaaaaatgatgcttttaattaataagaaaaaatagttctccttttcctttgctactaatgcaccgagtgaaataattcctatctgagcaattccaattaacattccttgaagcaaaaaattagctgtgcttcttgctgaatttcctaaaaatatagaatcagtttgtatgggaataatattatttttaatttcctgaggcattatcccaagtttaccttccccaatcttcattaaataactaactttaatagtccctaaaatttcagctattctagtcttacctgcacttactgctgacatctgagagccatcatagcaaatcatgattttaggcgcttttccatcgtttaagtctttagcaaaatttgcaggaatgataataccaaccactacttttccttcatccattgaatttttaacatcattatcattctcactataattaactacattaaatacttcgtttgtatttatttgagtaataaaatttttacttaaagtagaatcatcatgatcaactatcattgtaggaacattttttactacatgttcactatatgtataacctaaagcataactagaaatagctggtattatcaaaagtaacataacagaaacaataatttctttagactttataaatctttctttaagcttcgatactatttccttcatacctattctcacatcactttccaaaatcaacaaaagcagtcattccagaacggagtggcttatcgttatcagtcaattcaactttaacaccataagatagtacatcaaattcaccattatcatttgttgctcttttaactgcaaaatcagcatctttattaattctaactactttccccttaaattcctcatctttatatgctggaatctttacagaaacttcttgttctaagtctactttagataaatctgtttctctaacattacataatattgatggttcatcagttttagtaactacaataagctgcattcctgttgatataacttctcctgcttcaacattgacttgtgttattgtaccatcttctggtgcggtaactgtagcataattaagatttacattaactccttgaagtgctgcttccgcctgttttatctgaccttcaactgcttcaactgatgcatttgcctgatccacttgtgcctgagcagcctttatatcttctggtcttgcaccactttgtgcaatatcatacttatcttttgctacctgcatttgagtttcagcattatcaaaatctgatttaggaattgaaccttgatcatataaaacttttaatctatctacagttatcttggcaagatcataagcagacttagcttggtcaatttcttctggtcttgcaccattttgagccaactcaagctttgcacttgcagcatctctagctgcctgagcagcatttaactgagactttgctgtttcaatttgagcttgtacttgagcttgttgagctgccaatgtatcactatcaactataaggagaacatctcctttctttacattatccccttccttaactttgatttctttaacctttccgggaattaatgtatttacattaacatccgtcatgtcaacatttgactgcactattaaattactctgagcttgctttactagcttgtctccagttaatgtagatactggcgtgcatcctgtaaatatgttagctgcaaccattgaaaatactactaatgctacattttttactttcataaaattcctcctaaaatataatctagaaaattttattttctaaaatttaaacctcataagctgtatatttattgttgacttaattaggattaatacatatattgacattatattttttatgaattatcctttatatagacacatgtctattatagaaatatgtggattcttattcaataatcaatattaatggataagtctgttaataaactaaaatgataaatttgtctattaaatgggggattacaaatgacagataggcgtaaaagaaaaacacaacaagctgttcaaactgcttttgctaaattaatatcaaataaagatataaaagatattactataaaagaattatgtgaagaagcagacattaataagagtacattttatttacattacaaagatatttatgactgtgcagatagttttatgaattatgccgtcgataaaaccattaaagttatagaaccttatgattttaccgagttaataaatcacatgccggaaataattgaaaaaacattagatatatttagagaaaatagggatctttatgttccatttttcaattcaccaaggcactctttttctatgtataagacgaaacaacttattattaaaaagcttttagaaaaaactaaaaataatgagaaatcaagacttgtaaataagagcagcatctcctttattgtatgtggactttttggtattcttgaacaaatagaatttgatgaaataactcctgaaataacttcagtactaacatctaaaattcaaaatggatttattccttctaaagatactcattaatttaacgcagcatgttagtaaaccctaatgaactaaaataaatgagcaactgaaattaaattgcaaaaaaaatagcctaaaccacattgtattgtgctttaggctgtttcctcgctatccatatttaatatttatagcaggctcttttatctttatattcgtgtccattataagtttgctatttttgcaattcacaatgcacatttcataattaatgctaattttttgaaatatctttagaactataatgaagaattattcttgcaatatattaaaaaaaatcctcttttatcttcaattctgtaaataaaacattataaccactatcaatagggctacagcaatatatcccacatttaacatttttctttggactgtgtagatgacaaattctaagttgtctccaacctttatttagaacattaacttctattttatagtcgtttccttgtctgctaattctaaattcagcttcgtcaacttgtttatctaactcttgtgtagaccaatctgaatatcccaaattagttactacagcaccaagttttggaggattatctagctcatattctatagaggtcttcagccaattatcctcgtccactcttactactaatccgcactggtcaaattgattgatcggattaaacttaacctttgttgtcatagtaaagtccttttcgatttctatataaaacatatgagcattatcatttctaaaaccataatgagtcctttgccaaaaatcagttaccttatcaggttccacgtaaattcccttttcttccactttccacactttaggttcatatagccacttcatcttatgtattgacgaaggatcatttactaaatcaataaaaacctctggctctttttctaatattttatcattttttattattatatccgcctttgccttaggattatctattgaaaaatgctgtctttgaagccacatgaaataatctccataaagatcttttttatcttcatcgcttctttctatggacgatgtaaaagtacaatccaaccatactcttatatcaaaattaatatctacagtattcttaaatattaatgctccctcaactataactatatcattgcttttacatgcattttcaatttcattttttattgaagaaaaatcataagcattttcatagtaatacttagatggattaatattactaagagattcttttaatacatcttgattctcctctaaggaaattgtataaacattatattggccttggtatctttcttttaatttattagaaaaagtagtttttccacttaaacttataccgctaataccaattaacgccctcgaattttctttcactttttcatttattaaagaatataactttttcatgattaatacatcaactccctcagtaatatttcttattatatatattttatcatatgaaataaaataatagattaaatatgcccttcatatttcgtgccagacaaatatataaattctgcttatagccgatttactagaagaatttactgtcttagcatgatgcgaaatatgcaagcatactagtctagtattttttagttgtaccttaatgtagctttataataaataattatactacataattattttcagaagtcctcctaaaataatcctcacataaattaattcatttatttaacttgacaaaataaggagttaatattataaatatacatataataaatgtacttataataaatatatatattaaaggagatgttaaaatggagttaacattcaaattagaagtaaatgcacctaaggaagctatttggtcttattatgctgatcttgaaaaaagacatatttgggaagaagatttagaaagcattaaatttgatggagaattaaaaacaggaactactggaacaatgaaactagagggaatgccagagatgtcttttactcttactaatatagttcctaattgttcttattgggatagaactgctgtccctggggttggaggcatatattttggacatgacatattgcaacaagatggtaaaactttcgttcaacatactgtgagattagataaagaaaacccatcagaagatgatttaaattttctttgcaatgtattttctgatgtacctaaatctactatgataatcaaaaaggaggttgaaaaataaattggaatttccatcaaaccgttttaaagatgatgcagaatcatcaactggacttctttttattcgcgtatataataaatggcattccattataaatcaagaattacgcaaattagggatcactcatcctcaatttgtagtgcttactgccttaaactttcttggtcaatctgacgataatgtgactcaagtaagtatctctaagatggcagatatggatgtcatgtcagtatcacaaatcgttaaaggattagaaaagaaggaatttataagaaaaactataaatccgaaagatagtagagcaaatgcaattatactgctaccaaaaggacaagaaatggtaaaactcgctcttcctgttgttgaaaaaatagatgataatttttttggtattttacaagaaaatgaaaagccctttcgtaagtatctaaatcaactagattaatatctatttagaggtatgacaccaaaatatagaaaatggatagattgcaaaatatctatccatttttatacgtttaaacatgttatacattaaatataatttttatatggaaaactggcttttgtgctaaattaaatagtattcttaataagaactttaaatagttaaaagctctcttccaagagttctgtcatacatatctctttttatcctttatttataccaaatgctctttaatatgacattttacttttcaatttttttcctaccaaatcaataattaatcttagtataactccaaataatttttttaaaggatttatctttacatcataaaaataatatgaatttaaccaattcttgtcattccaataatcataatcagccctggaagtaaaagtcttagttcgtaaacaattaaacataaatatatcataataagatggagcttttctaacttgactttcaatagcttgtttaaatttattcgtaagtttcccaatttttaaatatgtctttttatgataaccttcattataaactaaagcaaaattatcttttctattttcaaaatacataggcgaaataatacttattgttccaattaaattacatgcccaaccactaatagtcatcttcatatatttaccaacctgcttatggccacctccatcactggtaaccacaatcaatgtaggctttcccactaattcttgacgatggaataaaaatgccattctatcaataattctttttaatggtgatggaacttgatatgcataaacaggtgtagcaataataattccatcagcctctaagagcttttttcttattatatctaaatcatccctgcaaggacagagtttttcactcttcttaaaacataacccacaacctctacaatcttggatttcataatcctttaagaaaatataatcataggtcatattcttagttcctaacctcgcctcgatttccttacatacatttaaactatcctgctttcttggacttcccattaatataactattctcattttattcctccatacactatccaacattggatataaaatttaataatatgtcctatctttttagataggacatattattatttgcttaattttttaattaactcttctaatttttctgacgcattttccggattttttaagatttcctgttttagactttctattgaatcatttgttgaagcttccatttcttcagcattagaaaaatcaaaatttgaaataaggcttgagatttcattacttgcagcaatgcattcatcaatctcatcaataagtgcttcatgccattttatttggtattcaagatttgaaatcattatttcgaatgaaattttttcaaccgcaagactttgcttattgacttttatcttctgccacttttttaaatatgttatcttatctcttaacccatcgatatggctatgtataagagaaatcatactttgtttatcaagtgtatttaacaatggataaataataaatttatcagaaccgcttgggtataattcattagttatttcattttttacaagttcttttaattcatctctgcccttatcagttattttataaatttttctagcttttgatccagaaccaatttcttcttttaaaacaatcaatccatctttttcaagcttatttaatgcataatatattgatcccgattgaatctttgtccacttatccatatggtttgtttggatgaacttttggatttcatatccatgagtagattttatgcttaaataatataaaattaataccttaattatgtttctcacctctttatccaatattggttataattcatgatatacccaagattgtatagagtcaaatatttttattcactatatcacttcttacccagaactcatttatttatgatattacctctctattaccatataaccccttttggaattatcttcatgaggcatctttcattacccatttttatacttttcagtagttcaacatcaacttcacacttaaaggcttcttcgaataatactttactatacccagtagtacattggcaccatgtatcagactctaacctatctacatccgcaagcattgggcatggacaaaaattaaactgtaaataaaattctccattctcataaaatagccctatatcttttgctttctgtaaatttccgaattcttctaaacttgatgatagttccattagctctttcacaagttctaacttcttatccattccatatccacactggcacttcattctgatcttcttaatagtcgccttatcaaatttgctttccaatctcttcattgtagaattcacccatatggcattgctttctaatttaccacttccctcttttccatatacaacctctcttgcaatctcctcattgctttgacccttaacagcttcataaataacattctcttggattttccttatatcaaatataaaatcccccttttcttgactttatctagtgataactttaatcatataaaagaaaataacaatcctaaaatttcataattatttttttaatgcgccttatcactatttttataataagggaaaccttacttttctacttctgaattcttgctctatttaatagcaacacataaatccatggttacatgactattttttctatcaatactatggtaaatccctaatgcatatctttcgtctcttctatacccactacgtgggagccaaacattaaagattcccagaaatgttataaaaatatcatatatatatccactaaatctataaactgcaaatttaccaccttttattgttgtaagattttctgactgtacatcttcatcgacagtgatacataaatcatatatacatttgtctaactgagtaatagatggatcattataagatttttcaatcaaaagcgtatctgttttaatataatctttataccgctccataaagctataccaattaacgcctatctcactataatctccaatatatctttcataaatcactttaaaatcattcaaattttctataataatgtgcccatcataatgctcaaaagatttaaaggaattatattcactaggacaaaatggattaataacgcctgctgaattcatagattttctaaattctactggacaaatactatattgcttactaaaggctgaactataattggaagaactgtatccataattaattccaatatcagtaatagttttatccttttcaaccttaagacttactgcactttgatccatttttatacgtttaataaaagaatataaacttattcctgtttctgctttaaacattctactaaaatgatattttgaaaaattacagtaattagcaacatcttcaatagaaatctcctcatctatatgctgcaaaatgtattcaatgcttttatttatcaaagatttcttaattatcactttaaggccctctcccaaatactttttacataaactaaaaatttcgttttgataaaagtttactttcattataaagaaatattactgaaatgctgattttcaataacaacattaaatagaaaatataaatttcatcaagtgctattttcatatttattttatatttaaaatacctctcacttctttaaattataacatattttgtaaagacaacatcacttatgacgccttgctttcacttataaaaatagccttagacaatatataaatgactaaagctgtaagtcgtatttatgatataattcatcgtattaatagcagcaattaatgcttctatacaaataaaatatccagttttcagacaccctatttagaattatattttaattacctttcttatttatactttattttaaatcaactataacaatcttatcttcaattatatattttgttctaccatcttctgaaacagatgtggtattggtatttattttgttaaaagtatacggaataatctttattacatttacattggcatcctttactggcaactcatttccatgatgtgtataaaaatatgcaccttttcctatttcttcttttaaaggcactgaatcaccatttgcatcaacaatatcataatagtaatttgcatctttgttattttcccatgcactaaaaccttttgaagtaccagaaataagcactctgtccggtgtaatagtaacgctttctaatgaaagctcattatcaccaattgtaatatttttacctaccttaacaactttagtatcgttcttataactagtggcatcataaacaaatgtataggtaaaattcgaagaactaacaccatattcttcagccaaagaagaaaatactaactttacatcctccttatcacttaatggcacttccttcatttctacctcaagaattacattattttctttctcaagttcatcattttctaccttatcgtatccaacaaaatccttatatcctgcaatactatatccaacataattcgaacttctctcaatctttttgccgttgatatagatatcaggtactaacttatctttattatcaacaagatcgttttttttctcattaatattaaaattaataatgattcttgaattatcagtaaaaaactcatttaaagtaagcttaatatctttcccctcaaaagttttccctatttcagttgaatacttttctccagtagtattaatacctaaccatgtattaatactatatctaaagtttgctactgctgctaaaactttatcaccatgaatgcctaaatttacaatcaaaagcaaggctgctatagctgctaaagccttctttttattccgaatcacctttttatttttagattttataaattttttcatcatttttttcttttctaattcattaacctcttctattacatactgtgaaaaatctatttctacattatttaataaactatattcatctttcatggcttatccctccttatggtttagaaaatatacttctaagcttactctttcctctagaaattctgttatataacacagagggtttaatattaaactcttcactaacatcctttacagattcttctttcacaaaaagcttaataaaaagctgcttatcaaataaactaaggtattttaagatttcctctgtttcatattctaattcgttctttaaagcctctttttctattgtgaagtcactttctatatctagttcagatatatccatatgctcaagagtttttaaatattttctcttataatctatagctctgtactttgctattgctgctatccaattttttaaaatattcctttctttatcaaagcttgtgatatcattccatattttaagatatacatcattaatgcattcctcatgatactgtggaaaattatataaatgtttctttactatagcttttattaatggtgcatattcattaataagtaactccatgcctttttcacttcttttttttattaatgaatagatttctttatccatagcaaaatcctcctttctgacaatgccttacacttactattacggatagggtaatgctaattctatcaatgaataaatttttttattttttgtgccttatatacaagtactttcataataaaaataaatctattaaatgataactcccaatatctctatggaaattgcatacattccttataattccaagagatatttaaaaatttatattatttctatccaagttataaaaaaatgctaatattatacctttaattctatcatcataagataatatattatccagattttaggctcaaaaaaatagtagccccaatttgcaattcggatggctaccatttttaataaaaaacagttatttttgcttaaacttacttatcatcatttatttgtgatcaccgtatcataagtaaaaaatcaagctttttattatacctctctctcaccatttatattattaatttaccactctcaaaaattaatatatatagagtccttaagcctttttatatcacttataggtggtaatccaaacattcgtgcatactcacgactaaattgagatggactttcataaccaaccttataacctgcctctgctgcttctaacacttctgaaagcagcagtctccttgcttcttgtaatctaatctgcttctgatattgtaacggactcattgcagtaaccttcttaaagcaatgatgcaacgatgaagaactcatattaatttcctttgctaattcatcaatccgcaagggtttctcaaaattattattaatcaagttaatagcttttgagatagccttagcatggctgcctatcatagcaaattgcttcaatatgtatccatgtttatcttgtaaaactctataaagtatttctctaataaatagaggcgcaagaactggaatttcatctggagtttctaaaaggcttacaagtcttagaaaagcatcaagaagtaatgaattaccttttgttacagttaatcctctttccaagccaggcttttcttcaaaatcttgttttgattctttaatgatatcaagaatttgatctgaattaaaactaagtctgacacataaatatggatggtcaggactagcttcaattatttttcctataataggtaaattaacagatgcaactaaataggagtttgcatcatatctataactttcttttcctaaaattacagttttcgcaccttgtacaattacgcatatggatgggatgtaaatcgaatgcagcggttctgaaatattagaggcacgtattaaatccaatgatggtatatcagttgattgaaatccatctctataagtaaatttctcaactagagaagccaggcgcctttgctgattacataatttataattttttatattgtaaatccttttttccataataatatctcctcataaaaaaattataatttcttttgcaggattgtgcaatgattaagaataaataggctacctattcatatctaaattatcctataatcaaatcaataaataaagaatatgcaagacaaaaatatttactcaatgtaaatactctcatatatctttaattataagtaaattattttaatggaggtttgtatcaatgagaaacttagaaggtaaggttgcaataataacaggtgcatctagaggaataggaagtgctatagctagacaattatctgcacttggggctaaagtagttgtcaattattctaataatgcagtaaaagcagaagaagttgtagaagaaataactaaatcaggtgagcaagccgttgcaattaaagctgatgttagtaatataaaagacgttgaaagattattttcagaaacaataactaaatttggaaaggtagatatattagtaaataatgcaggcgtaatactttataaattactttctgatgtaacagaagaagaatttgataagctttttaatataaatgtaaaaggtacttattttgcatgccaacaagctatgaaacatatggaggataacggaagaatcattaatttctctacctcagtggttggaagtatgtttcctacttatagcgtttatgcagctacaaaaggagcagttgaacaaatcacacgtcaattagcaaaggaatttggtcctaaaaaaattacaattaatgctgtagcaccaggtccaataaatactgaacttttcaacgttggaaagacagatgagcagatagaagcaattagacaaatgaattctttcggacgtattggtgaaccagatgatgtagcaaatgctattgaatttttagttagtgataaggctcaatggataacaggtcaaactcttcgaattaatggtggatatgtttaatactaatgtctgttaaaaaaacaaagtttttagccaatatcccctaagcccgcattatcccagcatattctgaagaatatatattctaatattcttcagaataaatatggcttagaatatatattcttcacaatatttatggtaaagaatattagaatacatcagtgatctacagcaaatagaggccgttacatctaaaacagcctctaccttttattaatcttcatctatttttactctcagcattttattcttaacttttactgcatattttaattcatatactggtatgcctttattaattgcatctgcaatttcatccatctcttttttaatattttcttcatcatcataccatccaagtacagttgatttttctccccaaagtgctccgctattaataccgattaaccaatatttaggctcatcgtttcttgctttatacattacacttgacgctaaaactttatagcaattaacaattgattttccgtcatatgatttaatagtgattttcccggttggcagaattacattagtagataaaggcttattattttcactagaccttatctcactcaacatcaaataatctaaagatacattaagttctttagataagataagcaatttctccatttctggatatccacttccctgctcccatttagaaactgcttgccgacttactccaactatttctgctagcttctcttgaattatgaattacttcttattaaaattatttcattgatataaaaataatcacactaccaacttgaaattctaatagtgtgatactttaatcgaatatttactttttatggtttataaatcattatatatacatttctttaatagatttaaatttaaaactctagaaaaacaatttcctaattagagctagattttaatatattaaatgttaatgtagttactcccaactttcgtaatggaccatatcttcaagcttctttcttgggcgagctttaggattttcatctggatatccaatagttaagactccaactacatatttgtctgatggtatatttaatactggtctaatttcttcctgtgtgaattctgccacccagcaaacgcctagtcccaagttattagcttccagtagtatataccctgttgaaattgaagtatctctaattattctttttaattcatcctgaggactgttatcatctaaatacacatccccttctttaattctgcaacgtatatctgcaacacatacaataaatactggagctgtaaacatccatttttgattatgagaagcttctactattttttgtctcatttcttcagatttcactactatgtaatgccaaggctgagtattgttacctgatggagcaagccttgcgctttcaagtaattcatttattttttcgtcttctactggtttactactatattttcttatgcttctacgcatttcaatttctttaatcatttatatacttccctctcttcatggcttagtacattttttatatacaattataacatattggacaaagtaccactctttattttaaaaagatattttttctaagtaactactttataatgctataaatatatgaatcatgatatgtaccatgatgatatcgatattttctcaatgtaccttctcttagaaatcctgctttttgcaataccttttgagcaatgatattttctacgtcagtatcagcttctatccttactattggataattctcaaatatatactttactattaaattaagtataactgttccatttcctttgttacaattatcggaacttaaaactaagccaattcttacaattccttgtctataaaaacttaagtaaagcaatccaattgtttgctcttctttttctacattcagtatttgaaactcagaagagcaaaagccatctttctcatattcaagttgtagttttcgaaatgattcaaattggaattcttgataatttccacgtgtcttttgcgaattaaactcataaattacttttaagtcacgttcctcaatagttcttatattaatatctccttctgtaatcatttttcatactcctcctgtatacatctttaaaataatttaaattgctccttctaaaaatatcttcaaactacaaacatcattaaatatatgattgggattaatttttttcagctcttttaagtcaacactatttgaccacgctgctgataaacacgttgcgcttacttctctacaggccactacatcagaaagtgcatcacctacatagcaaaattcatccttattaatacaatatttttttagcagctttataatattattgtgctccattaatctttctaattactctacacggatttccaactgctacactattttcaggaatatcctttgttactacactgcctgcccctataacacttccagctccaatattaactccaggtaaaataataactccgcctccaatccaacatccatcgcctatagtaataggaagtgcataagtattgcaaaaatattctccagtttctggattccaattttctactaatcggtcctctagctctattggatgagttgctgtataaatttgcacattagatgcaattagtacattattacctataataattttattgcaatctacaaaagtacaattcatatttacagatacattattaccaatatagatattgcagccataatcacatataaatggagatccgacagatacattactccctgttctaccaaaaaggcgtcctagaatttctattttttcttccttattctcatagctaagactattatattttgaaagtaatgctcttgctgtctttttaaaccctaaaaaaatttcatcatgacagttataattttctcctgccatacatttttctaattctgttttcatattataatgctccttttttcgtaattgcgtttatcaatagtataagaaacatcttgttacatatctagtaacaagatgtttcaaaattcatattcttcttgccaatgcttctataagaaataacactggtacttgtgtagtagcattatatccaccattagcttgatgcatgtccatatcgtatgaaatattccaatctgatatcttagcaatagtcgaattagactgattcgttatactcaaaataatacatttactaactttgaattgatttattaaatctataacaccctttgtttctccagaaaccgaaagtgcaattaccactgtggtcttcatatccttcgtaattggataaaatgtatcttctaatcccattgaaaatttccccaaattagaaaaatatcttgccccatatttcgcaagtgcaccagatgaacctgaacctaaaaataaaactgtttctgattttctaatcatctctgcaccttgctgtattttctgttcaaaggaattaatgttagttttcttaaagtaatttaacatctcagtcaaatcactttgtggtagaattttctgaattctatgtacatatttcccaagtttttctttgaattccttatacccatcgcagtctaacttattacagaatctaataatcgtcgacgttgatacttgagttgcattagctaattctcgaatggtcatataaggtattttttcttcattattaataataaacttatatatcttaatttcagtttcattaaatttttgaatattatcatgcgaaaacattatctcctccaacaaagttactatttatctttcaattacctttatattacgatacacttcttgcctttacatttcaaactccaagtaaattaacactcgtgaacactaatgcttccttctttgaatgcaagatattctgagctatcatcaattgtgtatatatagtattctccgggctcgtctgctgttattttataattccctgataaatctttaaaattttctccttttaccatcttcccatttactacatatccgattactgctgcttgattattcgttacttttgattgatatttgttaaaattaaatactaatgaatctcctttatttagtttccaaccactaccatcatccttcgtaaatacacctatactgccatttgtctctattatctctggagttatatattcattgtttttttcttttgttacaaagtcactaatcaaagctgaatccactagattcatttcatcaggtatattttttatagttttactatatttcagcatgttatgctcatcatattcttctacctgcccttttccctctacaacttccgccccaactaagtgcttattcttttctgtaatgtacgcggcaccctttattgtatatttattatattgtgtattatgataaaaaattaaaaaagctacaatgcaacaaactaaaacactacaaaatgcaataatttttcttttcataatatcttcacgccttttcatatgatatatgtaaattataacatattattgtaattaaagagttccgtaattcctagaaaacatttccaatttcactaactatattttaaaaattcaatgatatttttctatttaaaaatgacagaatagctatattggttcctaccccctaaacctttatttctataaaattcatatttctaattattagccaaaagtaaaaatgctaacaataaaataactaagattgttccaatcaatgcaataatatttatgattttatttgctttaagctctgtaattttaattaaccaaacttataactaaaaaaatcccatcgtcatcttgaataatgggatttttctgtttatttttcattacattatataacaatacttattgtggccttagctatcgcttccactatattatagttacattgtctaacttagctttgaagccttttaagattgcataagtaagtttatccatagttgcaccatcaaaaatagctctcttaacttctgtcttaaaggaaacatttcttaatattgcattcttaaaacttgttcctctaagtcctgagtaatcaaatattgtaccatttagcttctgaccatcaaaacataatcctgatagatctgagtaactaaaatctgtattatctaaaattgtatctttaaagcttgctccctttagacttgctttatttatttttgcaccacttaaattagctccatcaaaattagcattgcttaaatcactacatttaaatgaactatctcttaagttagaattactaaaatcggcattcttaagagcactatagttaaactttccattaactatctctacgcctttaaaatctgaatcttccaaagggctcttggaaaaatcaataccaacaagctgttgtaactctctagtttttgaattaatactttctacaatttctgatacctctccaatagattcaatggttttattatatgcttcatcttcatcatatccattattttttaaatcatttaatttctcttgcagatcaataaataactcttcttttatttctttaactgccattaaatcattatatggagtaaatatataatccaagtgctttcttaatttttcactcatcttaatttcacctcttaaattaaattatctaatattttctttgcattttcccaattcttcttattttcaatatatagttctttacctttatcagtaattttataatattttcttcttccaccttgagtttcttcaccccaataagatgttacacatgcttctgactctaatcttttaagacttgaatacatagttgcttctttaagttcatattcaccattggaagctgaatgtacagttctagatatttcataaccatacttatcgcctccaagcaaaagttttaggataattgtatctatatgtccccttattaaatcagaggatattttagaattaagcaatatactcacctccttgaatacaatatataacacattactttgtctgtcaaggtaatatttcagacatataaaatattctacttaaacctaaattatgtgcttgcatagtgtattttgtcatgtttatccattcagttttggttagatttccaatatttttatataatcaacttgacattataaataaaaatagtataattaccctgggtaatagttaaccatggtaactatatattttcgggagggtataatatgcaaggactatttcaacgctttttttcactacatcgacctcttataagtaagctaaatgaattactaggtgaatatgatctttcttattcattatggcaggttattctatatctaaaaaataatcaaccatcttccctagtagatattgctaactattataatatcgaaaagcctagcataacacgaagagttcaacgtttagaagaacgactaatagtaaaaacaatatctggtaaagatagacgtgaaaaaataattgagctaactgaaatcggtgaagaactttatgatgtatgccgtgaaagaataactcaattagaaaatgacgtggtaaagggtatttcagaaaatgatcaaatcataacatttgagacacttcctaaaatacaaaaaaacattacggatgaaaaggagatataaaaaaaatggataaacccaaattatggacgaaaaatttcttaattgtttcgacggcaaacttttttctttattttacattttatttattgatggttactataaccacatttgcaacagaaaggtttcatgcatcaccaagtgaggctggattagcttctggtatatttgtaataggcgtacttctttcgcgtattttctctggaagatatattgatcaagttggatggaagaaaatgctttatatcggatttattttgtttttagctactacatttttatattttttagtgaatagtatggcatttttattcattaatcgtttcttaaatggtgctgcaatgggaattgcttcaacagcaacgggaactattgtagcaaagataattccaaatgaacgtcgtggagaaggtactggttattatgcattaagtcttactattgctgctgcaattggaccttttttaggtatgtttattactgaacattcaaacttttatatgaattttgttgtatgtattattttcttaatacttagtttttttgctgtcttttttataaaaattccaaaattagaaattgtaaaagggcattcaaataataataaagagttttccttgcataatttctttgaaataaaagctattcctatttcaattattgctggagtaattgctcttggttattcaagcatacttacttttataagctcttattctaaagaaattaatttaatgagcgttggaagcctcttctttatcgtttatgcagtatttgttttgctttcaagacctttcactggacaaatgtttgataaaaaaggtgagaattttgttatgtatccagcaatagcattgttcgccttatctttatttttccttagtcaaactcatggaagcttaactcttttattagctgccgctatactaggtcttggctatggtacaacttcgtctagtgtacaagcaattgcaataaaggtttcaccaaaacatcgtataggattagctacatctactaattttatatttcaagatttaggcgttggtattggaccatttgtcttaggttactttgtcccgctaataggatatcgtggcttatatatgatgatggcagcagttgcagttctctgcattttcttatattattgcctacacagcaaaaaagcaacttctatgaatgatgatgctgaatcaataatggcttagagatttaatataattaataatcacaatcaagaaataattttgtatttgcaaatagaagaactaatggaatttaatcatataattccattagttcttttattccaccatctttaatacttataacaaatcctgtgaataaatacgattcttgattttcttcaaacactctaaaatttattataatattctttgtatataatatatcccacttaagcacaaatatcttacgtaacttgaaagttattcctcatctaagataacaatctaacaatataagtaattattataaataaacctgcgactatcgcaattattccgccagtcttactctttttattagtctcttctgaatccttacatcttaataagttaacttcatctaaaccaccaaataatagagaaaaccccagaaatataaatgaaatatcgctatgaataaaaaatattgaaataattgtgagtccgctaaatataatgcttgctataaaaaatactttattgttaattttcaattttaacacctctcacacattataatttataactatttttctactttctgattttttccagtgaatatcatccaatttttaaattattatatcaatttttataataaaatgaatataccattgagaatttctctataaaataatatctgtattccattaataaatctacatttaaaactctagcaaaccatgtgcgggattaatgctataataatgatatcgtttagaaatttaattacacatatattaatttcaatttacaaatcagcaattctccttctagttaagatgcagactataatcattccttcaataattttatactactcacttcttaatcatgcctctctacctaattttaccacataatcaaatctacttcacttttattaaataaaaaaataaaacacctcatctataccttagagatcatttcacttaataactttagagaagtatacacacattatggatgataattattaatgactgcatcgtagtaatacacctgattatttcatacatcctatcaatgattctatgtgattttcttttattccttctactactaatctcgctatctcctttgctcctttttccaaaaagtgagtattgtcttgaatcccatcgggatgattgagattttcgcctggtttcacccataagaatatctctttagttttctctattcctatttgctcaaataaacgcttacttttttcacccatatctattaatggtacgcttaattcagccgcaagatctcttactgctacaagataatctccatgtgtatcttttataatgccattttcatcaaaatttcttctatgtatagatgttagtaatactgggtgcgcaccagcatttctagcaactttaatatattcagttaaataagctttatatgtagtaaatggatctgtatataattcctcattttcttttttatcattatggccaaattctataaataaaaaatcatccgccttaattaattcagatatcttttgtaatattccttcatttataaagcttttagaacttcttccattgatagcaaaattacaaatttctatatcactagtaaaaaattctccaattctttctccccatcctgtttctggtttttcatccggtaattttgtagcagctgtagaatcacctgaaataaaaatttttatctttctatccacgttaattcaactccctttctaattactgtatttcttgtccacaattcacctaaatttatcgtaaccgcgctctgaatttcttatataacttttcaattatgaaaaaagtgattataaagaaatctattgtaaaggtagataaaagtaaaaatattgctcctccaccacatccatcatcttctgaaaaatataaaagtccataaatacctataaaagcaattattaataataaaattacatatcccattatgtttttatttaataaacgttccaatactttcactgcaaaatatataattccagctataattaatgcaaacacaggtaaaattccaattaaccccataatataactccttatttattagcgtacaattatttgcaaatattcttctttacatctactcaactatataaaatatttgttcagagtcatctactctcagctcttgtttcaattattgtgaaaaccgtctgaaatattacaactgcaataactgaaaaaatgctatcaatactgttatctccatgtacattcccccatatatatgctgaatattttaaatcctagaactctcatgctaaataaaaaccccaaatatagaaatttaattacaatatatagatcaattctcttttaatattgcatgtacacattatactataaatgtatttttttacaagtattctatgttgaaattattaaatatgaacgctaagtaacttgattcattcgcatagaattatttggtttgtatttatttataatttaaagtagattctaatgaaaaattaaacaagctcctcattgttctttgtccataaaactttgcttatagcttttaaaataataatagaattaattatgatgtttattctaattcataactaatgcattgttaattttttaactatgaattttatttaccactaatttataattattaacttcgaggtaaataaaattcattatcaaaacgacatcatttttaaatccaataaatatacttttatcctaagccatatattctttaaatggcaattgaattattcttccactttcatcacatcgatactccttaggacattcaaaatgtattttgcctgataaatgcattgcaacgtcaaaaaatgcatttgccataacatctggatcctggaaaacagtacctgccatatatcctttttgtatgaaatatagtgattctggaatagcatcaattccaacaacgggtatattttttgtaccagcacctttattatatccatgcttttgtaaagctttacagcaccaacagccatagtatcgttattagctattactacttcaattttatttccatatctagttaataaagcatctgttgcatctctagctaactcttcactccaattacaaaattctgatgcaagttgttcaacttttattccagcatctctgattgtcataatgcaatatttagttctatctgttgactcattactattactattaattccaccttgcaatactatatactgcataatattatctttatttgtatctatagtatttttattaccattccataaattaaccaataattttccttgtagcctgcctgcttgctctgaatctggaagtatataatatgctttatcatatgatttaactatattttcatctaccttaagtattcttttactagcaaaaattactggaatatttttttctttgattgaattaattagttctttgggatcgtttactaaatccactaaacttaatatgagaagatcaatatttccgctttctagaagattattaatagtttgattttgtatatctctgttattttcgctattgtaaaaattaaatttaaccattccttcatttcgtgattcaatatcttctaggctatgccttaaatcaataacataaggatcatcgaatctataaaaaactactcctacatttactggatttgttgaattgttatgactatttaatggggctgcttcaattaaggtttccattactataactgttactgtaattattattataaatttttttaatagcttcattctaaaacctcctgtaattctatctaatttataggattacttttaaaaagaaaattattctaaattctatattaataattataaatacgttcttataatatgctatttaagttttttatacttcttttatatatcaattgatattcactttaattttaaagaatacttcatatttaacatactaaacttacattttgtagaatttccatatgaaaaaaatatggtgaattcatttctgaatatcaccatatttaagtaatcctctcaattaattattttttatatacggcatataattttataaatacttttcttattattaatattacataataaagaatcactatatcaatgaataaatttactatattaatgttcattccaatatttccattaaataagttaccgaataaataagaacttcttccgtctacttgatatacagaccaataatttaaaggaaagccaaacgagtactcaaaaaagcttcctgtattctgttctattttcccctgcaaaataaaggtgcttattaaaactattaatatacttaatttacattctaaagtatctattcttctcttgcccttcatatttactaattctaaagtttcctttaaaaacatatatccaaaaacaactgccggtattaaaaatattaaagatataattgctgtataatgtagccctgtatcaacatttgaccatggacctaaacctatagactttaatataagatccccgtaactaggatttcctcctaatgaaattccaaataatattcctaaagcaaacaacattaatgaagttatccctagcaataccttcctgttaattttactcaaaattcacacctctatttaaacaatattttaactttaattacttatatacattatattctttaaactcatttttcacaatatctcttttgccattgatctactacatcttatcttcaactaggaaccgagcttactaacttttaaatgaatatttccagggaaatattaaaggtgcaatgtttcatttaggagcaacttgccacctaattcaggatttgacagttcctcaacatgctaatgttcgcttactaaataatcatagaagttatgaaaattgattaattacttcaatgatacgtatgagtttgcaatgctatcatcgtcgttctaatatgttaatattattagtactcctactcttgagattgaatctataccagctaaacttggctaaatactattcattatggatactccaactaagctctgaacttatgcatatagctcgccgaaataagtactaagcatctcattattttagtatttgtctcatagctttacctttttcgctataactactatcatttacagattcaaccttaaattttccgctttcatatacaacttttgatatacttgaattatccatattccttatatcgaaatttttatctaaatgttcaataaatactctaagcattcctccatgaactactattagaatatttcctccaccatcttcttcattttcaatacatatattatttatagttgtcacaaatctttttaaagctgtattataatcttcagcctcatgcgtttcatctaatgcagcacatgaatcacaataggccctttgaaaatcatatttttctgccatttcttcaaatgaatttacattaaggaaatcaagtatcgccttaaactttatcttctcaaactctccttcatattttccaaaatatacttctcttaatccttcaaattcttttaattctaagtccccacttgccttattctcttttatgacaatttgagctgtttttattgctcttcctaaatcactgctgtagacagctttaaacttcacatcactaagtcctaatcccgtatttactgctacttcaattccttccttagttagaactccatcacaccatccttgagtccttcctactttatttaaaatagtttgcccatgcctcatcaaatataaagtaacttttcccttatttttatcactcattttttcccccatactgcaaaaatcatctgcctcttctaatttatataaataaattatatcataaattgcaaatactgggataattaatctttaattatgagctatagtataatattgaatctatttattcaattcaatatgctaaattattttaactactcccccttgatttctatagataacttaagttatactaattttgcaaaatggacttggtggcaacgaaagttgctgccttttttattatctagaaatttatatttaagttaaatctgtagacattatgccccttgacaatatgattcatggaaaagacttatttaggaagttacaattcataaagggaataaaaaaacagctattggatttccactttcagatatagtgaaaaagtccaatagctatttttattaaaaagatgttcctttattatctaaatatatatgtaattatgcagccacatttattggtagcacaatcgtaaatttagtcatatattcattgctttcaactttaattcttccattatgcttttcaattaattctcttactatgcttaaaccatagccatgattcttgttattattatttttagtagtaaatccagaatcaaaaattttattaattatgttatcgggaatcttttccccgtcatttgctatatttataactatattgtttaaatcctcgtatgattcagcaattatagtccccttattcttcatagcctttaccgcattgttaactatattaattattattcgatataaatccatctctttcattgttgttaacctaaaatcagcattatctgatacaataacttttatatcatctcttataacatgtttagttgctagagataaaagtgaagagccttcagcatccttttcataaacatttccgctattttggtatgtatttataattcttttcaataagttagacgcatcttgatacatattcatatcacaaagttcatataagcttaaaatatttagattgtaattatcttttatatttttaagctcaatattttttgatgttaaaattccatttaatttatatatttcatctgaatttttttttatctttctaaaatctattatattaaatattataaatgcaattaaagctataactataatatttcttgataataccggctcaatatcgtatgaaatattatataaagaaatcaaaaaatcaggaaagaaacttattataattatgtattgtacggagttactttcgtctagtaatagcttataaatttgcctaatcttgcttctaaataaaaagcataaaacaaataagaatatttgagaaatatatacaagcgtaatatttaatatatcgatatcatgtatcaaaaaattatttaatattaaatatgatatattactaaatacagctatccaaattactactatagaatatattaaactataagctactattggtttcagcatcctttttccaaaaatcaaatatacaattagtatacttaacccatgtgttacaaatatgcatactgatgaatttccaaataagtatgtaatagaaaatccatctaccgataataacatcatacataaaattaattttttgttgtcttttattttatcatcttccaaacaataattaactatacaagtaaataatatactttgaaaaatagtaattaatgcatcaatatattgcacttccaatttacatcccctttataatgttaattgattgttaacgcttattatcttaaattcttcatagactctggcatatcttcaattccagctgatacaaatgacaccataggggatttagtcatagattttgaaagacttaataataaatttgcaatcattttttttattcccataatacccacctcttaattattatttatattatttagaataattacatctatatataaagagaagtaattttatttaataaatcagagatgtaaaattggaaatgtatgtttatcaattttcattatgtgttagattatcaaataaattccttcaacttcttttaaacctaattattccattaattacattataatatttattgtgcaattattcaacaattatagtcatattaaccaaaaagcctcattgtattttatttttaaaacaataataaacttaattcatgttaaagcaagtttgatttaatatgcaccttatttataaatacttgcatgttacataaacttttacacatagataaaatttatacttttcagttcttaataatgtaattcttatatctactgctttttattttcaaacttctaatttgttataggagttgttatttcaatatgattaccttcactatctttaaattcagcaacccaattatctccaatctgttttattggaaatacaatttctaatttttctaatttctttttaagaacatcaaaactattaacttctaagcttggtaagcaattatttccaaaaacatgtttttcattaactttttcataagcaaacaagccgagacgaaaaccattaatatcaaacacactgtaaatctcatctctaacggttacagtttgctcaaataaattttcataaaaatcaattgctctattcatatccttaacacataggtatagagatttaataatacaattcatgttatccctcctttctacttgaataactaatcctctaaaatagcaattgcacgaacaggcgctccatctgaatctttaaattttattggaagagcacagaatgtaaaaatgtcatttcccactttatctaaagatgtcaaattttctattacaactatgtctgtttcagcaaaaagctttttatgaatagttaaattttcatctttaataggatcaattcctataacatctattcctacccctttcttcttactttttattaagtattcagctacttcttctgtaatatatggataatttccaaaataagcatccgtcccccagtatttataccagcctgtataaaacaaaatatattgagctatatctgctttttcttttacagcttcaatatacttcatcgtaatcttttgaccttcttttaaattgctgcaatcaactactatgccttttccaacaaactgttctgcactaaatgaatccaaagttgttctttgagagaataagtgtgccggagaatccatatgcgttcctgtatgagaaaacatagttagcaatgtttccttaaagccatctttctcataagtacttgcaacttctaatttaggtttctctgttcctggatatacctgcatattctctgaaatggtatgtgttaaatctattactttcatattaatccccactttctttacatgttttaatgtaatatttttcattctataagtattataatataaaaagatcgcatatcattctaagtgatgcgatccttgaatataaaattataaatttgtttatgcttttctttaagtttaatctggtaatgtaaaatagttatcaatatacgctatcatttgatctcctaaagttagataataatatactggtattaaataacttgaataaaatagcctttttaactcttcttcagtaccttgaagtgctcttatcaaattttgctgatgccttaaacttataacaaaactttgggctataaatgatatttgatccgaaaaaaatacatctgaaattgaatcattataagttcttttatgttcttctaaattacgaataacttgttgatattcattaatataattttttatactcgtatttactgcaattaattgttcatttgttgaattttctcttatatttatggttgctatatttgttcgtatagttttgatatcttgaaaattttttataatatcttgtttattctttaattctgatattttaggcccatattgtatgttctgcttaggtattggctgtgcatatactaaaattcgtcattgctaataatataactactattagcactaccaatctatttatttttttcctcattactaattcgctccttttatagaaattatactaactatataaaactaaataatatttatatttagctattataagaattagtaatatttgaaactttacagatattataaataaacccaatacctttgtgtaatcctatttccttcatccacttcattttccaatattccattattatttactattgtttttgcagatccaatattatttttattgcaagttattaatactttcttaattcctaactttacacattcctttagtgctaatcctaacatctctgttgcatatccttgacgtctttctgattttctaacactgtagcctatatgaccaccaaagtttaaaagatagtcatttaatcggtgtctaatatcaatcattccaattaaatgtccatcgctaacagaaacagccatgtatgtatttgcaggaactaaaccatctcttacagtttcttcttttgaattatcacaaaatgcgctataccattcttcaaaagtttcagcactacctaatcctgctgtaccatccatgctgtcattattttcaataaactctcttttataatccatgagtttttccttatcttctaaagttggtaaaattaagcttaatctgttcattctctcccccaattattctattaaattagttttaattatttactacatatatttagattagatttctatattttagtctcatctacaacaattttatttattaatgaacttcaaactatttttgaattttatatctaaataataaaaaatcacaaattcacttacaatctattctttttaaagtagatagatagaaaaatcaaaatctactactttaagtaaaatatattattatgaacactgcgatttttaatatgttatttactattatttttattgtgataatgaacccattttactaaatggataaaatctaaatacagccttaccttttatattgcttttatctatatatgggtttttccatcttcttgagtcacgagaatcaggtctattatcgcctaaaaagaaaaacttgtcttctggaacatcaaatgttctattatatttttcattgttttttacataatcttctttaatatcatttccatttatattaacaataccatcatgtattacaatatgatctcctggtagtccaataactcttttaataagtgtttcctttaattcatcagaatagaatacaataatgtctccccttttaatattacccatattatatatttttgtaacagccatcttatcatcgacgtttatagtaggtaccattgattcactaggaacatatatgttaaaaaacaagaaattttttattaacatagctattataagggctactgctattggaattacccattccttaaaaaattttataccttgattcttatagttgtgattaactgtactgtccattacttctctccttttgtgttcattcttttttatcttgtaattattatatcacatatcaataatatggtattattcattgatattttaaatctatcttataataatactatcttctctaattcatcgctataaataaaatatagaatcatttataattaataattgttaactcctacaaaaaattcttattcttttgtttgcctgttatgtatatatattgcaatttacaatgcacatttcacaattacgactaaaattcttgtactattttaggaattattacaaaaacttattgttgtaatatatattctaaagataacttgaactaagcaatatcactcttagcattgcatcttttctatatacctactattttacttcgtctctccataaggatagtatcatgccatatcccatcaacatcacatccaattttttctcttactccaacaactctaaaaccacatttttcatgtaatttaatacttgcttcattaatagaaaatattcctgattgcagtgtccatatattttctttttcagtttcctctattaccctattcataagttcatatccaacattattcctcctacaagatccactaatatagatgctgacttccgcaacacctttatacacacatctgctacttgttgggcttagtgctatccaaccaataattctattatcactactagtagcaacaaaccttcctatatttaaatgtcccttgtcccaatcttggtatctaggaatttctgcttgaaatgtagcccttttagtttttattccttccatataaatattagcaacactatcccaatcttcttctttcattttgcgaataataaattccatatttatttccttctttcaattaacttaattattagaacattacatacaaatttctttttgattaagtagtgaaatctcttagaaataacactaatttatctgtaaattatcatatcatttttccaatttatataatagtaaatcttcaaacaataaataacagcttcaccttatctagtatcaattcattctcgttcttaattataacatatattgtaattttatcattattctgtataaacattgtgttaatatcaaataaatagaaaggtagattaagtattttcaacttaatctaccttaacgggtgttttctggctttattttaaattttcggcataaattataatatactattattatctgttaatctatttattatttcgctccctacaaaatgaacaatacaactttaattaataagctttttaagttaaaaacaatttatgcatacaaattctaatcattaaaatttcagtagtcatctttacttttctatatatttcatagaaattagtttataattattaatgaattaaaatattttatctgaatcacagggggaatttacaatggctggttgtaacgaaaagaattgtacatgctctaatattaattgcgaaagacatggtaagtgctgcgaatgtgtaaattttcatcgaggtaatggaaacattgtagcttgcttaagagatttcaaggttgaaagcaaataattaaaagccttatccaaaaccatcataatctaaagccatacttaggctttagattttcatcttaattttccatttaactttaatattcatattaattgaagtaggccttctattctaactcccaaccatttttaatacattcttggagcccttttaatatttctattgctctatagaccaaatttaatttagcaaattgttcagccattggtatatcttccaagttattttctttttgatattgttccttttcccacattatgttacgtccatacgtccttgtatgaacattatttataacctgccatatttgtccttcatctctgttgttattattgcaaaattcctgtactttttcttctaatagctctccactacacatcataattgtattatctcctttgatttaacatagtctattaattttaattctttccaaaatgtccatctttaaaacagtctatgttaaatcatctataatcccctgcaatctgaaattattgtaaaatataattagaatatctatctcattctttcacataataatagtgcaatctgatagctgccactaactacaccccgaccatttcctcaaaatggtagttgtcacttgtttcattagaataggagcttaactatgcgttaccagctcctattccttattattttttctataaaaaatataataattcacctccaaataattttatacctactatattactgtattatttacaccataaaacattcatatctgaatacctatagttataaatatatatcagaaaattctatattggtagtttgaacaagtctattatcagtcattaaatcaatcattggtttttcgtttttctcttctattactttctcattaggaagtaatattttaaaagttgtacctttgcctaaattactttttacacttgcacttccacccaatgcttcaacaaacctctttaccaatgacaatcctatacctgttccttctgcctgccttgataaagaactctctacctgcccaaatctttcaaatattacatctatcttatttcttggtatacctattccattatcttttacttcaatacatatattagttttcgcagaatgtaaatttacaacaatagattttcctgctggtgtaaactttattgcattggaaagaagatttaaaataattcgttcatatttttcatcatcagtccctattatctttttcgtaagttttgatacgaatgttaaccttacacccttttttgatgcaaattcatataccgattcagttatagcttttgttagaaaaactatatctatattttttttatttatcgtgatccggcctgcattagcacgagtaatgtcaagaatattattaactaatcttaattgcctattagtattttgcttaatagttcccatatatgtttttatcttttcagtcatttgatttgagtaaactaaatttaaagtttgtatagctgtattaattacattaagtggtgttctgaattcatgagaaataaatgataagaactcatctttcatttccattgcctgctcaagtccttcgtttttttcacgctctacagctagcaacttttcttgtacttcttgtaaatcttgttgacttttcatcatatccgttatatctagaaaacttaccactccatataaaaaattggaactattatcataaatcggtgtcccactaatgatattgtaatattccatgtcgtcttttttaaacttcacaatattattccttactatttctccagattttacacgatatattggagtttcttccattgacattttatttccttctaaatcataaagtcctgtagctttataaccttcccctaactctttaaaatctccagaaaaacgttctctagcaactttattctttattatatacttaccatctttgtcaaatacataaattgactcctgcatattatctaatatagcttcaaacagttctttctgttctttaatatgcctctcataattaacttgttctgtcacatcacgattaataatgattcctaaactaactttcccatattcatcaaaaacaggagttgcattaaaatcaaaatatatagcatcgtctccatgcattataactatcctctgattcttaactttttcacctcttatgaccttcattgaagggaaatcttcaagtgaaatgcgtttacctttttcatcgtaatatatttctccaatttcaaatgacccaccaactttatctactggattattaagcgaagtaaactttttagtatattccgctacttttttatttattcttatatatttaccttgtttatcaacaactgttaatccatctgagatattatctattattgtttctaattcttctttttgctgttttataatttggttttgaatttgtagctctttttccattttcttattctctgtgatattgctattagtttcaaggacaatttgtttcccattctcatctactattaactgcaatctagtttcaactaaaagcttgctgccatctttttttgtttgctctatttcagcatgccaaattccgtcacttaaaagtgttgattttatactgctaaagctaataggaaatgtagtttttagcagttcataactaatacttcctatagcttcttcgctgttataaccatacttttcctctgctcccttgttccaatatataatagacccattaatctcccaagctaagatagcatcatgagaaagatttaataggtttgcctgcatcatcagctgttcattttgtttttttataacctttgtttgctcttccattctttttctgtctaaaactttttctgttatatctgttgtaatttcaatacaatattttagaattccatcctcaaacaccggagcgagactagcctcccaatacgtcactcctctttcaaattcaaacatatattcatcactgtaaaacggtttctttgttgaaagcacgcctttccatacttcctctgatgagcttccagtccatccttttattatttcatttaactttttgcctattgaattttctatactattaaatggtttatcgagaaagtttagataagtttgatttgctttcaatagagttatatctggagcactaaaaatagcgattccaaatttgttatgagagcatagagcttctactgctgtgaatttaacatctagacgtgaatttggtttttctgagaaaatatacacatttccaattgcaccttctgccacatctatatttataaacctagcatctaatgatttagtaaacagaaagtaatctttctccccatcaatatcttctaaatcggcattaggcccgattttcaatatattgaataattctttaatatttttatttaatagttcttcctctgaatattcagtcatttcaataaataacttactgatttcagtaacgatcccattgtctaccactatatatgattgttccccaatgaaatcgaaggagttgtataattccataataaagccctccaattttcagcttttttcatttgtgcttttgcacctattcattatcttaccatgatattccatgcaatactaccggtctcctatgttaatgggtaacctatcgaggaattctgcacatttactcaaaataaacgtgcctttttcttcatcattaaatactttctacatattgtgtaacattttagaattgcatataaggaatttcgttttaattaacgtattacatttaaatattaagtcttagctttaatattagattcatatagactataatatttccagtaaataaaaataccgcaaatccaaattcatggtcgtgcggtattaatataattgttcataaaaaatatttttatagaaatatcttcttaatattataaaatcttactcttcaataaacttcattagctccttattaaattcttcacgttgatcatagaacgctgcatgtccactgtatttgaatggaataagcttagaattcttaatcatcttttcttgtatctgtcctaattcgaatggaacaattttgtcatggattccatgaataattaaagttggaacatctatctcttctaaatcagaaaagaaaacttcatttatccaagcctttgcaattgctgctgttgaccatcctgctgcctgcaatcctaattgaaagaaccactgtgaaaaagcttcagttatatgttggtaaaaaaacatatccccaaatccttgaagcattttaggtctatcggtatatgttccttcaattagctgcaaaactgtttctttatctaagccataaggaaaatcaggacgtttaataagacttggagctactgccccaaaaagagcaagttttgataccccataacctttatgacgagccatatatctaacagcaattccgcctccatttgagtgtcctgctaatgttatatcctttaactttaatgtatcaattacacatttaacatcgtctgacaaggtatcaaaattgtagcccctatatggtttatctgactctccaaatcctcttgtatctataccaatgcatctatatcccatctttggcaaaacatcaaattgatattcaaacagtttatgacttcctggccaaccgtgtataaataaaattgttttatcggcgccctcattaaggtcttctacatagatctttacatctggttctactttgacatagtaacccattataataacctccaaaaaactatctataatctatatcatatcgattagaataggaatttgtgaataatcaattttgattttctattttcactccattccaataatcaacaccattaagacctccatattgattacgtccacatccccatgtgccattaaatcctatctttccattctttttatagaaataaaatttaaacgcgccaaatacacaagcgctttcagggtatgcataaggataagatactgttgaccatatccctgttagagttaatatacttgcattataatatccataaatatacggatatcgaccaacaactccatttggagctagctcagttaaatttacaattccatctattgctccattatttatagatgttttaaatgaatacctacctaatatttctgtaaattctattttatcagttaaagcttcgtgagaagattgcattctactcttcctttagtattatttattctagttaatagtatatgaacttatatttaaatatgtttatacatttatttcctacaacattataatatctaaaattcatcaatatcatttctttcatatatgtatcaactccccaactcatttatacatatctctttagctataatccaaaactaacaagttctctagctttatccaataaattaaattgaactacatttaatcaaattataaaatccactaactcttgattaattcctttgaataatttcacttaatattcacataataattaatacattatttaaatagtctaaatttatgaaaggttgatagtttcaatgaaacgatatgttatattaatttttatatttttattaatcttatctactaccatatcacaaattgcctatggccaagttggtaaaacgcttagtcaaggaatatacagcgcaagagatgcaaatttaaaaataggctcacctataactgctaaaattgactcaccaaatagtagagttattataatagtcatcgacagtgatcagcaggtgcaggaattaatacgtcttggtccccaatcgcctcaacatactataaaacctcttgactatggttcatctataataatttttggcactagtccagtaacatttacttaaaaatgcttattcattatatttttattgtgctgataatcatagacaacgatttttaattaactattaacttctttatttactttttatatatttatgttaaattctatctattattatattttaaatttaaaaatgttatgagaacatcatgctgtactcgaataaacagtgtgatatttttataacatttttaatcatgaaaataaatccaactatattccagttagtggagttggcggattaccagaggctgctgaattgattaaacagggttctatgacggggactgttatacaagatccttctgattatgcaaatgcagtttattccataggaatgaatattgtttcagggcaaaatccgcttaatggaacaaattataaattcgatgagacaggtaatacagttaggattccttacaaggagtattctaaacaatcatagttttcttaatcataaataactttccttaattatatggaaattattattctatttaatgattatatataactatttctgtctataattatattagacatgaattactattctcctaacattatatataagataaggcagctttttaaattgctgccttatttatatttatataattaatcttttaaaaaccatttgtagtaacattttgactactctataatatattaatcattgtaaatgacattttcttcacttctcactgaaatttatgttataaattaatgacatattctttagttctttaatacaaaaccaaaggcagtagctaaatttttgatatcatttttacggtaaataaaaatatataaatatttttatctactaaaatgtacttctaaatttatgtctgctgcccattacttttattttggtcatcatttaatattagtatctatcatgagtacaaaactcgaataattaaatcaacaatcttactgatttttataagtatcattccactcacttgttgtaacataagaggaatcaattgattttagatatttatcaattttatctgtgtctaattcaccttttattacgttataatagttattattgataattataggatttacaaatgttatatccatcacgtccttatcatttatataaaaatgtgcagaatgtatatatccatctgatgcttcaacatttgttgcttttttaatggtatacccatctaaatatcccatgaattctttaactttctctttgtcatctattgttattgatttaccgcctcttccatcgtagaatactatctttgtaatatcatcaaactttataccagttataccatttatcttttgagattcagagtcaacatttgttgaagtattgattgcactattattatttgtagatgctgcatttgtatttccagtagtactatcagaattttgaatccatgctccatttgaatctactgaataaccttcaattgtagtacttttagccatagcaccactactatataaatagtaccatttttcttgatattgtacccaacctgttttcatataaccatttccatcaaaataataccattctccattaatgcttctccaacctatagcatattcatttccttctgtataccaccatccaacattatcttgtttccaagctgcaaatgctttaattggagctgctactaaaacgcttgtagatattaaaccaattgcaactaacctttttagatactgctttttcattttatcaacctctatttcttatacttactaattatcagcaactaattccagtataataaattttagtactagtatattattaattttaattgctccaaagtgttttaattatagttaaaaaaattaattcaaccttaatcctaaattacaattatcttaaattatatttttattagcctaaaaaagtgcataaatccacttcaaaaatatggtacttaaaacttttattttatcttcctgaaagttgaaagttaatattttttattaatgcatgtatatgctaatataaccttatgaactattttttctcaaaagccattgtatactccattgcttttgtatcttcatttatatgttcatctataactttaaaattattcttcatataaaaatttactgcagttgtgttctttgtaaatacatgtaatgtaagatgagcatatttagatttgcaatactctataagcttcttaccaacgccttctctttggtattctttttttacaaaaagcccagctatataattttgttctacaattcctataaatccttttataacattattttcttcaaatatataaatatctgctgacggaagcatttgcttaactaattcaaaattatccttccaatattctttaggtataaaatcatgagcctctatattcgtgtcaagccagatttccattaccttatccaaattatctaatttaaaatctttaatcattttttctccttatttcctacgaaaataaaaccattttcattatactttatgaaggccttaccttaatagacagtttctctctccaaattattaattaagttctatcaatagacttgatgtttgttgtaaatttaagcttttttctttttcttacgtattcttatgctactttgctcattattcatccctgtcttttctattaatttagtcccaaatgcggcaacttcttgaatatctattacagttatacaacctgtttttaactcttttaattcaaaacttcctctcattccctgttgctttgcattccttataagttctcttaattttaatatattctcttccgttggttcttcatcagttaaaggagtaaaatacccgatatatccacttttgaatactatttttatttctaacatcatcctaaacctcttaaaataaaaattactatctttatatatattcattaacaaggtctatacatgttattatttcaatatttttataatgagaatatttaaatactttgcataatcactagcttgtattattaaccttcaacaaccaaatatgtaatttacttcattagatattactatacaaaaagctcgcacacctcttagcatttcatatcttaaaggattattaaaactacttaatatcattttacatttgccataatgaattaattatatcatattatttgattacttccacaaaattacagacaaatagattaactttcattatataattttaatatttaatataaaaacaccgcaaaatcattagatattgcagtgtcaatttatatgtaatttctaaacatctaattcttaaatatggttttcccacatttcctatggatcttaaagaattatctagtttagcattatattttgtatataatcttataaactatgaattttattaatcagaatctcatatctaaatcgctttaagcaacatattcatgatatggcagacgaatagcaacctttgtctcatcaaatttatattgtgtttcataaagcggatctctaccttcaaatacattcatacctattaaataaatagcttctgccatttcatatggatcttgcataacagaacctgccataaaaccttttttaattaattcttgtgcctcagctgtagcatcaattccaacaacaactattgttttatttttatctcctaaattatatccattgttttgcaatgcctcaacagctcctatagccatctcatcattatttgcaattatcgcctcaatattcttaccatattgcaaaagtagtgaactaatatttgttttagccagatctctttgccaatcggcagcttttaatgcaagctgctcagtttttattccggccttatttattgttccaatagaaaattcagttctttcccgtgcctctatacttccatgttcaccctctagcataacatattgcaaaaccccattattattcttatctataaactttctattcttattccatatatcaacaataatttttccttgcatctctccagctttattagcatttgttcctacataataagctttaccataagatttaagtacatcagccgctaatggttctctattaaaaaaaattataggtatatttttagacttaaatctatcaataacatcctgtgtagcctttgtattaactaaatttaccattagaatatccgcgccatcacttaccaagttacttagtacttcatcttgcatggattgattaccttttccatcatagaatctaaatactaccttcccttcattcttcttttgaatttcttctaagttctgtctaactaaagagacatatttatccttgaaattgtatagtactacatctatcattacagctctctgccttaatccatctgttcctgcaataactactctagcaccacatactgatacctccattgcaaccgcgataaatataatttctaggattgctaatattctctttgatatattcattttaaatcctctctttcacttttgtttaacattattgttgtcatcagcgaaagaaaatatttattttgacttctattcatattaaattttatacaaatctctataaaataccccagttagcttatattaacattgtataataaactgattttcatatcattttattatagtattagacaatcttcttttcaaagcaaattgcttttgaatttccatcgtattttccataattctgtatctgatggtatcctcttttcttatagaaatttacggcttgctcatttattaatctagtttcaagccaaatagcagagtaccccattctctttgcctgaagctctaaatatgatagtatttcacttccaactcccattgtcttagtccttgcaaacatccgcttaacttcagctacatctttattaatataccgtattcctccgcatcctacggcctctccattatcatcatatgcaaccacaaacaaggaccgcgggacacatacatcctctgggttaaaggaattccttccgctatctccagttatatgctccagttctttagacaattcatccattaaacgtatagaatcagcatcacttggattcttttcaataatcttcattgttaatatctccatttctccaaatttaaactttgattttctattttatttaaatatatgataaaatcattgtgaaaggtggttaaacaatgattgaatttataatgtcaaacttaaacatttttattcccttattacttatatttttaacgattgatacttttctattagcttataaagcttttttaataattaatactaacttaaaactgtcatgcaacaattcaaaaagttactataataaaaacaataaaatggcaattataaatctaactatagaaaataactcatctaatccaatagatgttataaaagtaaaattaacttatggctttaaatcacatttggcaacttttccaacaacacaaactgctaaaaataaccttaagtctctcgattcaaacgtattattagaaaatattctaaataatacaactatacctgaacatacttccgtaactggttatgctatttttgaaaatgttggagcaataagtgactcaaaaaactataatataataattaaaacttccaataaagttttaagaaaaaaaataaaactataatgctttatttatgcaacctcattaaatttttaataactggtgctttttattcttcccattataactgtattataatatttaccatctttgtggatacgatcatttattaataaaccttcttgcacgaagccatagcttttatataattcaattgccttagtatttgtctctaccgcagacaatgatacttttttaatatccgaactgtctgcatatcttaaaatattttctagaattactctcccaattccatatccccaatatttctttaatatgcatattccaaactctgctttatgtctgaatctaattaatttatttccttctaggcgtgaaaatcccacaatttttccgcctacttcagcgactaaaaatagatttatcttagaagcattatcctcacaaataattccttcaaaatcttctggagttaagaacgcttcccctgattctctatcaagattttctgtttctccatcaatctgaactcttaatttagacaactcatttgcatcctcttttctaggacatcgaagtatccatcttaagtttttaccgtctatcattttatcttctattatcatcatgcccctcctttcatatgcctcataatccataattctagcaataagttcataaagatagccaattattaaagaattttagtttcgccttagattcttctatttcattctctataattctatttttaaataaatcatatcaacgagctgtattccattttcaaagattggatggtcatagttatctgtaaaaaaatttttaattctgtgtgatacacgaaatccacagttcttatagaatggaattgttagatcactatcgcctgtcccaacaatcatagttgtacactttcccttataatagtcaaaaatgtatcttataagctttttaccatatccttttccttgatatttctcatatgtagccatattctttaattcatatatattactatcttttttcactactacgcaaatgctttttaaatcatcatcatataaagcaaacatttctccattctctagatacctatcaatcatatcttcttgttcatctgctaacagtaataaatcaagaaactgctttttgttatttatgatctttttaacctccattgctcttcccctttctttaaataaaacatctatttatctccaaacctaattttaatgtcaacaattttcaactatcagctttgaaaataacctcaattgcataaattaccaattaatgatttgaataattaattggtaatttcatatactatctattgaaatgatgataatctgaattttattttaatctattaattaacagctgccctcgtaaagagggtcagttctggcaattaaaaaacaaatatcctaaatgaacacaatttaaatctccaaagctctcaagatgagagctttttttattttcaataattgctactgctacttatgaatagtctaactaagtattcacataataacagtatattgacacgtcatgtattattaacataattttttattcaaattcaaatatagcgaaatgaggctggtacaaatgaaactaaaaacttttttaatagcacttttgatattaatagtatctactacacacaatgcaaaagcaatttttgagtcaaatacatataaagaaggagtatacgatattacagatacgcaacaagttaaagccacagccatgcttactacacccgatgagattgcaagtctaataatatttgatcccaatggtaatgaaattttttataaaaaatttgatactgttaatgagtctgtaaatttaggcactatcttagatgatgatcgtattgctgtagttggaaaaggtgaaatagcaatcactattcagcaatagatatctcactcttaagtttgttcaaatcataattattatcttatagcaacaataatttccttataatgaatatttatttcttaactccatataatactcctgggataaattataactttcccttcattgtaatccatttaatgagcctctttttgtagaggctcattagctattataattttgctaatccctagttctttcaaatctcttatagaatattttaatgctactccatttccatgaatatctgataaaactgctactttcattggttaacacccctgttacaaaacatttcattaatttatttaactaagatacataatatcttataatctgtgaagctataaatttataatgctttattaattttatgtactatacgaaacttctaacaatatctttccctttaaattaacagctattaatattaacatattgaatttattataccatatattacatataatgtattttactttctaactatattcttttgtatttataatgttcagttattatatatttttattattgtacacttcaagcttcaacctaacattcgtatcatagttttaaacattaaaatagcacctacatttgtggtgcttaattacaatttatatcaatatctactaactcaatttcattgcttccttttggtaatttaggaatctcatcatcaccatattttattcttattaaagatgccctatagatatcatctgagcaattaccatattcatataaaaatagtacgctttctttttctaagcaatgtggcattatatcctcaatattatatttttttcctttgtacttaaatatacatcttattaaagttctttctgtatacatatttctcaccctaattatataaatgtatgctaaatttaaaaatttgttccatttcttattgctgtatttttattattaatatacacttataaaatttaaaatcaaaaactccccgttgattatagatttgtatttttaaatatatctaaaatttaaggggagtatataaattccaaagttctatttagttaaattgacgctctactttatcagcctttaatattacatagaaattataattaaatcctttctccatttaaacaactaattagattaactatagaattaacttgtccttgagttgcagttccacaagtgacagtctctcctattaatatatttgctaaagctaatacatcattaactgttgagttaataggcaatccaacttgtaacagccaattactacagccaagagcacataccagctgaccactataaaatggtataaatttaatattataggttaatgcaagtgtttcacccataagccttccaagtgtattttctgttaagttattactcaaattatttctgcaaggatcatctagtatatgagtgcaataatctcctgctaatatggtgtcagaaagaattattctatttactaaaatctttctaattccactacctattattactggataatcaatttctccatcacaatttgcatcaagaatcgcatgcccataattacttgcccagaaagctctagttcctcctaaatttaaaattgagcaggttgcaccggcaactccaaaataaagatcattaattccatatatttcaggaagtgcagctacaacaaaaacataatttgtaatacctgttccacattgctctataggtataggcatttgaacagtaaatgtgaaagttgcgcctggtgctaatccactacttgtatatactattccttgatccaatgctgccacatttaatggagcatcacctttgttagtaatattaactctaaatgttgctgttcctcctgctgtaattttccttgtttcacaaattttctctactgtaaaattaggatttactattgtaactatattaacatcataagcagaaatctcacttgaataaccaagaggattataaactacaatcacagtacttaccaatgggttaggatcacttccagtgactagatgactgctttgaaaagtaacagatgttcctggtgatagaataaatgctccagcatttattgcctctttagtaagatccgtaactacattattaataatatctacgatgccttttaatacaaggctacgagaattaagtggacttgtattagtaataacataggtataggttatcacatctcctactcggctatatgcaggaccagttttagatatttttatagaatacttgcacaaagattcatcaatggtgctatcacttatttcagacatagttttagtttctgtatcagtaatttcattttgccttgtttcacttggcataatttcactgcctccttatcataagtttactaactgtaatatattttatgagccaatgataaattatgttacacatacttatgcatatggatttcccccacttagaactttcttcctacttatctcaatcacactttttataatgataattaaatttttttgttatagttgtatattttactgaaacatcgtcaatactattatatgaaaagagtaatatcttattaaaatagaggcagtatcgttagtgtcccccactgatactacctctattttttatgtttttataagaatcatatattagttacagtctcaaattatcaaataaatacttatttcccatttcagtatatataattagtatccaatctcctatagttctcagtaaatctttgcttatatcaactttatggaatatgcataatgtatctatcttacaaaatgcagaaacactttatagcgatagatattttacataagtaaatacaaatatttttagctataatttttattgttcataattaaatcatctttcaagaatccctagctaaaaacattcaattttttattcttattttgaatatttctctctatatgtgcaataataattatgtgacataaattaagttttcataattatttttcggactcctcgttgtaggagtcccccccatcccaatgtattcccacataagaacactgtattttaaattttatttaacttcctattatattttttctttaagcatattcttttcctcaacagtatttgaataatcaattgcccaatcacataaattagctaaaataggcagcagacttcttccatagctagttaaagaatactcaactttaggtggtacttgattataagcaatcctattaatcaactcatcatcctctaaagctctcagctgttgagttaacatcttttgtgtaatattaggtaaacttctttttaattcattgaatctcatggttcttttacccaaatgccaaataattatcggcttccattttcctcctataatatctaaagttaattccatagaacaattgtattcaagtcctttaaatctcatcatttttgactacctctttaatttcaagtatataaatggtaactacgttactaaaaagtgcgttcttgataataattcctataaagtataaattatattttgtaagcatcctaaaataattaatctaggattttattaagtattctcaaataggagtgatatcaatggaattaattactgtaaatcaatcaacatgtgttaaatgtggactttgttcaaatgtatgcccaagtggagttttatctatgaatgaaaatggaccaatagctattcatccagataattgtattgcctgtggccattgtgttgcagtatgtccatctagttcaatagataatattaaaacacctttatctaatcaattggatttagaatcatttccaattatagattctagcactgccgaatcttttcttaggtctcgccgttcaatccgctgctacaaagaagctcaagttcctcaacagacactattaaaattagttaacatagctcgttttgcacctacagctagtaatacccaaggactttcatatattataataaaaaataaaaaaattttacaacaagctacaaacatagtagtagaatggatggaagatcaacttaaaaattccccatcgccacattggagcttttcaaggcatgtcaaaaattatagagaatctagtgaagactcaattttacgtaatgctccacacataatattagcaacatctacaaaagacttcaaaaatggaataaaaaatactatttctgcattctcatatcttgaattatttgctaccagtcttggattgggttcatgctgggctggattatttgaaatgtgtgctttttcaaactataaaccactactagaactgcttcgcattcctgataacaaagttataacaggagctgtcatggttggctatccaaaatataaatatagaaaaatagtaaatagaaacccgctagaagttgaatttattgattaatatccttaaaataaactgatcaacttttagatatttcataatcctattccaaaaaaacaataggattatgcttctatctatataatagaacctaccaaaccactaaaaaattagtttgtaattgctttcataaatcaagattttatacaattaaaatctacaattcttccaaaaaccattccaattactataagtattaacactaggattgcaacagttgcaacttccacattaaacgcctctttaacacattctatctattattcaaatacgaaactcacaaaagttagtataacgaattaattataacatattttgtaaatgaaattttatactcattttaaaagtaactcctttatttattaatctatgttacaattaagtttctataatctattactgattacctagttaactagcatctaaaatacaactctatccttttctaatgcatattatgtcttctactgcactttcactaagtaaattatacataaatttttttaataatcgcatactaaaggaaaatagaaagaatagttcgattctatagataaaactatgaaaggtagttgtaccaatgaaaaaatttattattatattttctgttttcttatttatgtctcttagtatgaatacaaagagcgcttatgctgaccccaatcctaagactttaaccgaaggcttttacaaagttaaggatataggcttaatgccaaatactacttataaagttagaaatacatcccctactggtagatctgttgttattatttttgactcaaatcaacaaatgcaggaatttttgagacttgaaccgaattcccctgattaccttgtaaagcctttagagtttggttcaataattataattattggaggcggtaatatcactttttcctagcaaatcaaaaaaatgtctaaaattcatttgaatagtattatattataaaattcttaaaattttacatattaataaaatatcaattttattgggaagatatatttctagaataatcttccctattatcatttatagattcaattagtttataccaaagtttttattaaattttctaaaattctatactcaataatatgcatattaattaaatattatcttttattcgaatacttcgtggacatttacctgatctataaatatatcctttcttttccaatcgctctatatgtgcatgtacacttgacgtagatgctaatcctgctaaatttccaatttccctgactgttggagatatcttctcttttcctatatagttttttataatatctaatatttcttgttgtttttctgttaacatagaatcatctccctatagctttgtatataatgtcatttaatatttaaagttagttgtttcaatataatacctaaacatatttaaattatcagacgcgacaatacaaacgtacgttcgcttatatattactacttttaggatcttttgtaaataagaacacaaaaagagccaaaactaaaattaattttggctcttttaattccgtaatcttatgcaattatttaacatattctttttatattttatgactgctataaattaatgtatagctttctttgcatattttttacccgtcccttcaacacttgtaatagtaactaatgcatcttcatcaaaaccatgcacaatattttttagctttgctatctcaagtcttgataaaaccacataaataacatttgttgctgttccgctataagcaccctttccatctaacaaagtaattcctctaccaagcctagccattattgcttctgatatctcagtattcttatctgatacaattattactgcttttgactcattaagaccttcaacagttatatctatagttttaaaagcaataaaatatgctattaaagaatacattgctctatcccatccaaataaaaaacccgaagttcctaagatgaaaagattaaaaaacataactatttccccaatagaaaatgcagttcttttttctaatattatagccacaatttccgttccatctaatgaaccaccatttcttataattaagcctactccaactcctattataattccgccaaatatagtggctaaaagtacatcttgcgttattcctggaactggatgaagcaatgttaccacaattgacaagcatattactgaaaatatagttgaaatagcgaatgtttttcctatttgcctatatcctattataacaaatggtaaattaaacagaaatgtaaatactcctagttgcacttttgttagatagcttgccataattgatattccagtcatacctccatctattatattattaggtatcaagaatatctctaaacctactgctaccaaaatagaacctattatcatgaatagtattctgcttgctttaacccaaatatcattatattttttcgtcatttaactcccccttaaatttaatatattttattcaatagtaaaaactatgctatataaattataacatagttttcattactttattatatgtttttaatattacttaagtattacaactttgattttagaaattaattatatactttataaaaaaaaactcttcaagaataaaatcattccacttgctataagtaaagcaattactgattttttaactgtttcttcttccatctttgaatcaactttaactcctataatcattccaataataactgccggagaaagacataacgccataattaatgcttccttagttaatattcctgtaaataaatataagaaaaatctaaatatattatctactaaaaaaatacaacagatatttccacggaattcatttttattctctgtagttctgctgacatatgcaactaaaagtgctccaattccataaagcccagctaatattcctgaaattactcctattactatgagaaaaataatgctagctttcttattttgaattttactaggttttcttgttaacatttctactgcaattccaacaattacaacacctagtatacattttaatatccgatcacttccagcctttaatagtaatgttccaggtacaatacctgctagtagcattagagataatggaatgacaatttttagagaaatattttttctttctttccatgccatatatgtatttgttggaattccaaagagaagatctactggtgttgttaacctatttgatactacaaaggaaaataacgaacccataacaagtgtatttccaaagccagttatacctttcgtaaaatatgcaaataaagtagaaataaaaagatatatgttttgcattttttgccccccataagcttaaattacatctttaactttcgttactgttatcaattatagcacattttataaatataacctccattatttgctaacttccgtatttatcaccaaaattaaaggtgtagaatatttatacctactacacctcatcattagtttaagttctaaatttagctattaaatcttgcagctctatggaaacattctttaaattttttgcagattgatttatttgttccatacctgctgactgttgttctatagatgccgatatctcctccgtagtagaagctgactcttctgctattgcagacatatcacttatacttcctataacatcatttttattattgtctatactacttatgctaactactattctatctatttgtttaacaatattagatgctgaattttctatagtcttaaatgccttttcagtatcctttgatacctcatccatttgaattaccatatttcctacagttatcatttctgatttagttttatttatctccttcttaacctctctaacgatagcatctatttcttttgttgaatctgcagcttcatatgcaagttttctaatttcctctgccacaatagaaaatccatttccttgcgctcccgctcttgctgcttctatagctgcattaagagacaatatattaatttgtgatgtaatagctttaattgtttctgttattttctcaattgattgcgatctattacttaaaacattaacttgatcaagtatattttccgctactttacggtttgattccacaacattttttaatttatttatattctccataccttccaaatttgattttgatgccaattctatatgactctttaccgaattagtattttctacagagccatgaatctcttctgctagcccatctaacttatttaccccaacttcagcattcctagcaagatcagtagcgccctgtaccatctcatcaactgcctttgctatagcctctattgactgtgatgtttcagatattatatttgataaaaagtcagaatttaatgctacatctacagaattctgtttaatgctttctacaagttctcttagtgttcttcgcatgtttgccaaggccatacccatatcgtaaaattcgtctttatatctttttattacatttaaaccagcttggtcaaatactaaatctaaatctgcagttttattaataaatttaaccagaaaatttattctttttgtaataatattaattatatatattgttactacaacacttattatgattataattattgcattcagcatgagcattaatcttgaatgactataaatttgatcgttttgtatattagctaaactcgcctgttcctgattatattgaacaagtttttcaattgaagtatttacattctcaaaatcctgcctagattctccacacattaaattaaatgcatccttagtttgagattctctacttaattgaatagtcttcatgctaatttcaaaatatttaggataataattcttaatttctttaactatctcaacatcattttttgatattatcgttccttgatattcctttaattcttcttcaaacttttctcttaaatcttgaagttctttttctgtagcattcattaaatcaggatcatcatctagtacatgtctatattccctaagtctatattctgacatagtttgatccatattgtgagctaaatcacttcccctagaccaaacttctgtgatctcacttgcattatcttttacacttttaattgatattatagaatacactcctaaaaaagacgttagtaaaattattaacccaaatgaagcaataagtttatttctaattgtaaatttcatttgaacacttcctccaaaataaatttaaatctaacataactattagataattatcttgtttggcaattccaattatatattcagttccgttacatacaacataattaatcttttttatgctatcttttgaaattcttttaacatcctctacatcatcaacgacagcaccaaaaacgccttcgctatcttcaataattattattttctggtcatcatttcttttttcattttttatacagatcttctcacctaaattaatgattggtatgattctcccccttaaatttattactcctagtatatattctctactaaatggtattttagtaggagcagcataaccaataatttcattaacttgttctattggcaccgcatatttttcttttcctatctgaaataccacaaattgctctccagtcattaatttccctccattctatatctgcagctattcttcataacataatatgaagattggaaatacattgttaccggccaaagaactaaaatatttaaaattatgttttatgaatatatttttcttatcttcaaaaaataaaatatatttgcaataaaactaggaaaggtgattacaataatgaaaaaaattagcattatattttttattttcttattatttaatatagcaataataacttttgccaatcaggctaaaattcttaggcagggtttttatacaacaagagatttaaatttatcccctgacgctctacatactatacaaaatacttctaccaatgaatatgtttctgtagttctttttgattcaaatgaaattgttcaggaatttgtaagattagcccctaaatcagaaaaatatgctttaccacctatacaaattggatatgagataataataattggagatggtgaagttactatttcttaggggatatagattagtttactttagcaaaaaatataaaggtggtcatatttatgaaaaaatttattgtttcaatattatttttcttatttttgttatcaaatatttcaatgattcaggctctgtcaatatctagagttttaaaaagggggttctacacattagaagatttaaaactatctcctaatacaagttatactattcaaaatgattcttataatgagcgtgcttacatacttgtttttgattccgaacaaaattttatacagtctttacgattgagacctcaatcacagaaatataatttaattccgcttaaagacggatataaaatagttgtagttgggaatggtgaagtagttatatcttaaaagcgaataaattcttaagatttatttagtatttaatgatagttcctatataattactgacaaccccaatcacaatgttatcagatttataagtttaagactaagatcagctaagcatgatttacttccgcttaacaaagtaaacgctatagttttaactactagtactaaaatctgtatatcaaaaagccatcatataaaataatgtcatttaattagctaaataacattattttatatgatgactttttctatgaatttttaatttaattttatttgccttcttctaatagtgaagacatcactaatgctaagtcgttctttttttcattatctctaataaaatttgcttctttatcatcttttgttattatttgaatatattcttttgcatcttcatttttgacattaaatgattttatattttctcttgatattttatctgtataggcaatatcagatagccctccccaaacagaatgagtaatagcctgtatatataaatttttaggagtaagaatcaatttaaaatcatttactactccacctgcaactccctgtccaatcaaattgaccaacgtatttgctactttacttgaagctttaatgtctttgtaagaattaatagaacatagtatttcttcatcatttaatacacttgccatatttcaccctccaaattatatattttaattgaataaataattatctgcatcgcaatctattatccaattatatcatataatagtaatatattcttattattaaattcttaatttttattatttctctattataaattctgcatgatcacctatagcatgaatcattggaatgctaattactattttgctatcttccatataactataggctcctttctttggaatttcaatcacgccatctttctggtgaaaatcagcatcttttagtatatttaaaagttcatcatcactaatgttttttatgacagacttctgtacttctattaatttctcatcctctgaaagcattttaacatcatctaacttttttaatttctttagtacatcctgcacattagcatagtccgaaagacctactactgaacagttctctaaatctatattaaccgtataaaagattgaagttggatatgctgttcctttaatatttactagtccattaaacgctattgatatatatttattatttttagttttcacttcataatttacttccatgcttatatcattaatatttgtatcattctcaacatatatatttataatacttaaagctgcattttttaaatctttatttatggagtgaagctttactgcatcagcataattttttatttgaggataattaatctttacacgatttttactataaacttcatcaactatttcgtattgtttcgattcattatttaaagatattttcatattagaattattagttttattgataactaaaacctctttttttattggattaatacacttcagattattaacataaaaatttcttattaataagaaactaagtattgttatgccagttaataaaagtgccgatttcttcattttcatatgtatctcctttaattctttaatttgaaggttaattttattaattattttgtcctcatgttatacaaataatgtagtccataacttaataataaaattactttaacttttttaatttttttattgaatttatcggtcactatgataaaattatcttaagaggtgaatttataatgttaggtgataaagtaaaactactcagaaaagagagaaaaattacacaacaaaagttagctgaagctattggtgtaagtcaatctactataggaatgatagaaggaaatagacaaggtgctagcaatgatacattaattaagttggcaaatactttaaatactactgttgattacttattgtctgataatatagaagaattagactttcctgataagagaattagtgacactggatttggcgatgatgatataagaagaattgagagagctcgaagaaaaatggatcctaaaaacaaagaaaaaatgatgaaaattttaaggtctgcttttgatgagtacttcgacgattagatatacgcatataaaacgtatagttaacgatatttatataaaattaaatattagcaaatttcctataaacgtatttgaaataataggttctttcgataatataaaaatagtttcttatcatcaattcatgattgaccacaatctaactaaagaagaaacttttgaaatattaacttctgacgaaggatgtactgattattttaaaccttcaaataaatatataatttattataatgatttagattttaaatctgatgaaagaattagatggactttaactcatgaattaggtcatattttatgtagccactattcatctgataataccaaaatatttgatgattacctatcagaatctgaatataaaattatggaggctgaagcaaattattttactggtcttttactatctaatccagtaattcttcataaattgaatattagatcttctcatgacatagaaacgtactgttcaatatcttctgaagcggcacgttatagatataaattttataagaaatggtgtgaaaataatattttaactagttctgatagattcattatcagaaacttccaatcttatctaaatgctcagaggcttgaatatttagaatttattagttttattaattcattttagctatattatctaaactaaaatttttatcatataaagtataatagtttcactactattccatgatttataagcaaaaaaggactatcgcactataaattaatgatatgctccctatatggtagacagttaagatgaaaaaactatcaatcataaaagggagcatattaaattttaatctattaatgcaatagacctatatttataaaaaacttagatgattacaattaagttttatttatactacagataaatagaattaatttgttttaaacttatctgttaattctttaagcgttgtggccatatcgctgaagctttgaactgatgctgtcatttcttcaattgaagctacttgttcttctgtagccgcagatattccttgagtttctcctgctacagcctcagaaagctgtgtaatatcacttatgttaataaatacttccttttcagttttattcatattatctatagcattacttacttcctgcatattagatgcaacttcttgtatagatttaaatattaattgaaaatagctattagcttcatttactactttagttccatcattaacttcatttattcctttattcataactacagctacattttcagtttctttttgtataccatttataagagcactaacctgccccgcagcttctccagattgttctgctaattttcgaacctcatcggcaacaactgcaaacccttttccttgctctccagcacgtgctgcttctattgctgcattcaaagccaacagatttgtttgttctgagatgccctttattacttctgtaatttttcctattgcttgtgaatgttctcctagcttatctataaccttagatgtatcattaactgatccttgaatattaaccatacttgagttaactttatgtagtgcctcgcttcctttctcagaatagctagacgcagtttgcactgctgaagaaacatcatctgatttttcatttatatcttttattgctttatctaaaatattcatattagaatttatcttatctatcttagaacttactaacatagaaccttccgcaatttcattaacattttctgcagaatttgtagcaacttttgactgctgctcgcaaacatctgtcatctcactagatgctgatgaaactctctctgaatgctctttaatattatttattacctctcgtaagttaacagccattttttcaaatgctcttcctaaattacctatctcatcgttggattttatgtttatattattaactgttaaatctccatctgaaatcttatttgctgcatttaaaagtatatgcaatggtttagttgcataaccaactagaacaaaaactcctccacatgtaataaacaatataactattcctattaaactagtgttaattaaagaatgtatgctcttttcaacagtaatacttttaggaatttcagcacaaataacccatcccgtctttttatcttgaacatagcttacaagcatacttttcccatctttaactacttcttcggaaccactctctccacctacacctttcttaataaatttgaaatcatttaaatctgtacgatcttctggcttatctaacgtcttagtaggatgagctagtaatttgccgtctgaatctacgatataaacagttgcattatcctgtgaaagctctttaacaaaagaatttagcactggaagttcaatgtttccctgtaaaattcccgttacagttccaccctctttatctctaataggcgtcgctaaaactgttattagacttccattatctctacttacaagcacttcagatacaacctcatcctgtcctttaagtgctgatttataaaaattacgatctgatatatccgatgatttagagtcatcacttcttacaaactgaactccatctaatttagtaacagccgtaaatgataaatctggatatacttttgaactctcaactaaaattggtttagatttttctgcatcataggaactaataataggatttctcgccatgctctttatcccatacatattcctctcaattagaccatttatcttttcatccacaatttgtgctcttttaaaattatcagatagtgcattttctatcgcaatcttttgtgaaaaaaacaaattaatgattgtgaatattattaaaggcacagaactcgcaagaagaagtgttaacgtcaacttccttttaatattcatgtttttcctcctaaattattatatatttctaaaatattagattaatactttaattaatattcgacaatattaatcaaatacctcctataaaacagacattttttatcaattatagtaattagcccaacaaattccaaggtaatttatttacatattactaaataaattacctttacatatattttttgtgtaagctctgtcatagaaccaaatctgctatctcttctcagggctatcccagatatttatcaaatttatattttcctcgtattagaatacaaaaataaatatagactttttgcattagacataacgtatcatctatatttatttctccagcaataaatttctgtgtttaatcttttttattgcgaattactccttgctttagtaatgcctctaatcaaaaaatacattacctcccataaaatagtggtaggtaatgtatttcactaaattctactatattaactacttttaataaatttgaaatgcagtattagacgaacttgttatataactactatatgtagtctcagccagaactttataagtaccttttcctgtaattctatatgtcaaaataccgaaaaaaacctctccatatctatctgtcattcctttatatactgtcacaacccctttgggcgaagtaatactaaatttaagggtggctccttgaattgctttgccagaagtatctgtaaccttagatttaatatatattatatcacctgctaagtaataagttttatttgtagacacaaccgttcttgtctctaattttgaaggttgtgttgtcacaggctgactagcaacaggttgcgtattagttgctattgttgaagctggctgtgtcaccgttgatgtttgtcctttaggtgcttgtattagcccataaccgtaccaactatcttttccgcttgttcctaaatcaataacattttcattaagttttgcacgtaattgatttggagaaagccctgggttagcctgctttaataatgctaaatctcctgtaacaaaaggtgctgccattgaagtaccgctcatagatacatatttattatttaaatatgtactaagaacattaacccctggtgccgctacttcaacagtatttcctgtggaagaaaaagaaggtcttttattattagaatcaattgccgctactgctataaccgaactatattttgctggataatctactgcatccgttgctccatctgatgtaccatcatttcctgctgccgcaacaactaaaatgccttgattataagccttgtccacttcctgctgcaatgcagttgatggtactgaactaccaagacttaagttaataatgtccattttatttgtaatacaccaatctatccctgcgattatatcagaaaggtatcctgccccatcatttcctaatacttttatagcataaaggcttgcctcattagcaactccaacaattccataaccattgttttttgctcctattatacctgcaacatgagttccgtgcccattatcatctaggtatgatgttgtataagatgtgaaagctgcaccacctgccactgatagatcctcatggttagctattccagtatcaacgattcctatttttactccttttccagtataacttgaagaccatgctgtctgagcttggattttattgactccccagtctactgtttgagaatttgttttaactattatatcttgttctacggctaatacattgggatcatctttcaaatccttaatagctgtagtaggaacagatgctgatagaacgtttgcatttttgtattctcgtcttacattacctctagcttttgaaactacatttttatcagctttatttttaaatacgacgattactcgctcatttgatgttgagactgatgttactaccgctgcattaacatttgctgtaaatccaaatgcaactaataaaaaagtaactgctgaaataatttttttcatttgtatacccctccttaaatttatctttcgtaaatgtgcttaattaagcttatcaacactcttttagtccttcttccctcctcctataaatcaaagtaactttttatctgtacttctaaggaattgtactgataaacagatttgattaattttattataattctatataacaaaaaactattcaaacgaatagtcatggaatattgctttatctcgtttcatttagtaaataatatacatattcctataaatttatcacctatagggttgcataccataatttcttatagtttttcttcatcttttaacataattatatcatagtgccatatgccgtacaattcataacatacaaggattgtattccttatataggttttatatgaatattattcatataaatacattactatcaaaataatttcataaacttcaaagtagcttgttaatttttttcatcagaatacattaaattttctatgactattaaaattttttctatcatactttattgatactttcaccctcgtcaccactccctaatatgtgaaaaagagagtcacctcattttattgcaaaataaaaacaggtgatttgattaaaaccacctgcttttatgttaaatatcggcaataataagccaattatatttaattttaaatactttattactaatttttcccctttgatatcataggaatccaaatatcactcttatattcttgcaaagaactatcttcttatgtatacaatcgagttccagcatgttaatatggattttcgaaatacgtttaatttgtaacattcatctctgtgaatgattctaaaacataattagtattatctatagttgtgacaattaacttatcagttgagcttttaactttagcaacagtacctgttagtatagataaacaatcctccactaaaatcggaatatcattcactactaccaactccatattatcacacttttccttcatccaattatttaagatagattctccttcagatgaattacaacctgcctccattaaatattctcctctcatatccttttaaatatatcttattttttgaatcttcatttagtctttattatttaattatcgtacaataatattattgttttaatattattatcagaatatttttgataaatttcaataataaaacttttacacctaattatttgacactattttaacatattacttcatatgttacaagaaaattaaattgataatatatattctatatatgtaaataagtaacatagaaaaactcaacttaataagattatttcttattaacgactttcttcccgcttgttctagattatatacaacataaaaactaaattaaagcaataaaagctaggttcatgcattcttttataacatatgaaataagcttatcgtttattattaaatttatttactaattgaaactcatatttctttactttataacctgagaaatgaacaaacaagtattaagttcaatatagctgcttcaactgctgtatgtttaatgaatagtagataactaactcaatgccatattaagttaataaaatggttgaacaattatggttattatttaagagatttcaaattgtacatgaatcataaatttatttgaaatcaatatataaaaacttccttattaccaatttaattagtatatttaataagacaaaaaaagatagctattacagctatctttaatacttacctcgcaacgtcctactctgccacacagtctcccatgcagtaccatcggcgctatagaccttaactttcctgttcggaatgggaaggagtgttacctctatgccatcatcacgagatgcatgtttttcccaaatcttcgatttggttgaaaaacagcacaccaacgaacgtatgtgagttagtgtttccttagaaaaaaataacccaagttcatcgcttatactattttttcagcaattatattaaataattactacttaaaagaaccttgttctttcaaaattgcacataagtgagagtccaaattttatatttggatactcgaacttactcagcgaacgccagtgagtcgagcttcctctattaatgtatattacaacttgattatattggtcaagccctcgacctattagtatcagtcagctaaatatgtcaccatacttacacctctgacctatcaaccttgtagtcttcaaggggtcttactagcttatgctatgggaaatctcatcttgaggtgggcttcacacttagatgctttcagcgtttatcccttcccgacttagctacccagctatgcttctggcgaaacaactggtacaccataggtcagtccatcccggtcctctcgtactaaggacagctcctctcaaatttcctacgcccgcgacggatagggaccgaactgtctcacgacgttctgaacccagctcgcgtgccgctttaatgggcgaacagcccaacccttgggacctacttcagccccaggatgcgacgagccgacatcgaggtgccaaacctccccgtcgatgtgaactcttgggggagatcagcctgttatccccgaggtagcttttatccgttgagcgatggccctcccacgaggtaccaccggatcactaagcccgactttcgtccctgctccacttgtaggtgtcgcagtcaggctcccttctgcctttacactcttcgaacgatttccgaccgttctgagggaacctttgggcgcctccgttacattttaggaggcgaccgccccagtcaaactgcccacctaacaatgtcctgtcaccagtttcatggcatccagttagaacttcaatactatcagggtggtatcccaacaacgactccaccaaggctgacgccctagtttcccagtctcccacctatcctgtacagacaataccgaaattcaatgctaagctacagtaaagctctacggggtctttccgtccaatcgcgggtagcgagcatcttcactcgcactacaacttcgccggatttgcagttgagacagtgcacaagtcattacgccattcgtgcgggtcagaacttacctgacaaggaatttcgctaccttaggaccgttatagttacggccgccgtttactggggcttaagttcacaccttcgcgaaacttcgctaagtgttccccttaaccttccagcaccgggcaggcgtcagcccctatacatcagctttcgctttagcagagacctgtgtttttgttaaacagttgcttgtgcctattctctgcggcctgatttctcaggcaccccttctcccgaagttacggggtcaatttgcctagttccttaactgcaattcttccgtcggccttaggattctctcctcatctacctgtgtcggtttgcggtacgggcactacttctctctctagatgcttttcttggaagcatggaatcagatacttcggttccgtagaaccttccccatcacgcctcagaattgttggaacggatttgccaatcccaactccctaaacgcttagactagcatccaatagctagcacatcctatccttctccgtcacaccatcgataataacgattatagtggtattggaatatcaaccaattgtccatcgactacgcctttcggcctcgccttaggtcccgactaaccctgagaagacaaactttactcaggaaaccttagatattcggcctgtaggattctcgcctacatctcgctactaatgccaacattctcactcgtaatcagtccaccgctccttacggtacgacttcagcccgattacgacgctcctctaccgctcacgtaaaacgtgaacccgtagcttcggtggtaagtttgagccccggacattttcggcgcaggatctcttgactagtgagctattacgcactcttttaatgagtggctgcttctaagccaacatcctagttgtcttagaaatcccacatccttttccacttaacttacactttgggaccttagctgacgatctgggctgtttcccttttgaccatggaacttatctttcatagtctgactgccggactgatagtatgtggcattcggagtttgataaggttcggtaaacgctatgccccctagcctattcagtgctctacctccactactcacattttccgacgctagccctaaagctatttcgaggagaaccagctatatccgagttcgattggaatttctccgctatccacagctcatcccatgctttttcaacagcaacgtggttcggtcctccacgaggttttaccctcgcttcaacctggccatggataggtcacccggtttcgggtctacagcatgcaactagtcgccctattaagactcggtttcccttcggctccgtaccttaagtacttaacctcgctacataccgtaactcgttggctcgttctacaaaaagcacatcatcacacacataaggtgctttgatcggttgtaggcacatggtttcaggttctatttcactcccctcccggggttcttttcacctttccctcacggtactgcttcactatcggtcatcaggtagtatttagccttgggaggtggtcctccctgcttcccacaaggtttcacgtgtctcgtggtactctggtgcagaactgattatcatagttttcacttacgggactattacccactgtggtccaactttccagttgtgttcaattaactatgatttctcgttatgttctgtccgcaaccccagagataaatctctggtttgggctctttccttttcgctcgccgctactaagaaaatcgatttttctttctcttcctccaggtacttagatgtttcagttccctgggtataccttcataaagctatgtattcactttatgatacatggggtttcccatgtgagtttcctcattcggaaatcttcggatctctgactatgtgcgtctacccgaagcttatcgcagcttatcgcgtccttcatcggctcctgatgccaaggcattcaccatgcgccctttgtagcttgacctaattattagtcatatcacaaagaatatttattcttggctttgttgtattttatatatacattaaatctatgtgcaattttcaaagaacatctgcttgcttattatcgtcaattgcttcgtcagcttcaaattttactcatttatgtacgtgaagtacgcttcatttcataaaattttcgctttctcgcacttgtcgctactaagctacgcattttgaaagacttagtctttcaaaattgaacagaacaaatacttaagtaacctttgagcaagtattttatattttgatacataataatgtatctgtactagccaaacatcatgttggtctagatttctccatagaaaggaggtgatccagccgcaggttctcctacggctaccttgttacgacttcaccccaatcgctgaccctaccttaggtcgctgcctcgcttgcgcgttagctcacgaactttgggtattgccaactctcatggtgtgacgggcggtgtgtacaaggcccgggaacgtattcaccgcgacattctgattcgcgattactagcaactccagcttcatgtaggcgagtttcagcctacaatccgaactgagactggttttaaagtttggctccacctcacggtttagcatctctctgtaccagccattgtagcacgtgtgtagccctagacataaggggcatgatgatttgacgtcatccccaccttcctcccggttaacccgggcagtctcgctagagtgctcaactaaatggtagcaactaacaataagggttgcgctcgttgcgggacttaacccaacatctcacgacacgagctgacgacaaccatgcaccacctgtcttcctgccccgaagggcttccccgattaagggtaattcaggagatgtcaagtctaggtaaggttcttcgcgttgcttcgaattaaaccacatgctccgctgcttgtgcgggcccccgtcaattcctttgagttttaatcttgcgaccgtactccccaggcggaatacttaatgcgttagcggcggcacagaggtcatgacaacccctacacctagtattcatcgtttacggcgtggactaccagggtatctaatcctgtttgctccccacgctttcgagcctcagtgtcagttacagtccagaaagtcgccttcgccactggtattcttcctaatctctacgcatttcaccgctacactaggaattctactttcctctcctgcactctagatatccagtttggaatgcagcacccaggttaagcccgagtatttcacatcccacttaaatatccacctacgctccctttacgcccagtaaatccggacaacgcttgccacctacgtattaccgcggctgctggcacgtagttagccgtggcttcctcctcaggtaccgtcattatcgtccctgaagacagagctttacaatccgaagaccgtcatcactcacgcggcgttgctgcatcagggtttcccccattgtgcaatattccccactgctgcctcccgtaggagtctgggccgtgtctcagtcccaatgtggccgatcaccctctcaggtcggctacgcatcgtcgccttggtgagccgttacctcaccaactagctaatgcgacgcgggtccatctcatagcggattactcctttaattgctatgccatgcggcactacaatcttatgcggtattaatcttcctttcgaaaggctattcccctctatgaggcaggttacccacgtgttactcacccgtccgccgctaatccgttcccgaaggaacttcatcgctcgacttgcatgtgttaagcacgccgccagcgttcgtcctgagccaggatcaaactctcaattaaaagtttaatcttagcttactcaaataaaaattgctggtttacttaaatgtatttatctcattctgttcaattttcaaagaccaattttctttccaaagcctgttgttacaaggcttataagtttctgtcgtttctgacagcttactcagtatatcaccgctttcgaagcttgtcaacagtctttttaaaaaactttttgaacttcattttctcgagttctttcaagctttaagctattgatttcgcatcactcagcgaggaattacatcatatcatcaccactcgacattgtcaacaactttcgtagaaaacttttaatttcttctttattaaaatcttttcaagtcttaagttgttttgttcatatctcttagtgacgtgttttatcttaacacctctggcatatatgaatttcttatcttcttacctttttgtgaagttattctaatttttcgctattattcgctaatatgctaactaatacatatattgatacactagaaaccgttgcatacattgaatattctgaagtaaatatttaaagatctaacctctacactttcgatattcaaaaaatatgaaaccttaatttataaattctttcaattcactttatatactattcagaaacatttgcatacaaggttatatctaaaataaaataataaaaaattgatgatatcaaatattttatatcatcaattttcattaaactatatttattatttataaatgtatatataaaacctattctctaacccacaatctcatttagactttcctctttgaaataaagtcatacccacatttctaaaactcacttgttaatacttattgaaacctccattatatactacaaatcctgatttagtatttgcgcctttagacgtattataaactacactcaacttaccatttttacgatacattggtgttgcagtttcaccaggagatagtgatcctattgtattcccattagaatcataaacagtttccgatgtagaaccatttttccaagctccagcattaaaatatttgattatatttgtagcattgctaacatatcctgtccgtactccattaggtgttggatattctatcaaagccagttgtgttgaataactaacatccaatactgttattttatccccatcatcaactctacgaccaggaataatattaccactcgaatctcttacgtaaagaaaatctcctgatacttgagcattatttgtataagtaaagccactttgtgttggatcactcggctcagatggattaccctgtagatatatgaatccaagaaaattcgcagatctactcttaaatgctgatactgtctgattttcctctgcgccatcatatgccttactcacatgatagttagcttcattaaagtatattgtgtcaccagaaacactttcaataaatacaacatgccccgcgctaccattcccgaatacagctatagaattagcggctggtgtttgtcctttcggataagtagtttcattccaccattgttttgcattgccataaaactgagagtttaactttattcctaatttctcatatgcacgtccccatacaaaccatgtacattgtcctttgtagccactctgcgtaaatatgttttcactgttataagcactacttgatatgtttggtgaagttgcagcaaaaacaatgttaggagtttgtccaaaaagtattaataatgatacagccaaaatcatcacttttctaagttgttttttcatattacctctcccctcttaattactagtattattaacagcactatgagcttaatccaatcgttaataacactctttaccacatttatatattctcatattgctaaacctaaataaatagcgtttcctctaaacatacaatataaggtattaaaagcaatgcaataaattatttgcttgattattgaacaattattctttttattccaaaatttgtacgttttattccaataatattgaaattttatccaatatactttataaagatattgttcactaaataatctagagaggttaaaatgataaaattaatatcaacttttataacaaggtacttagaagaaaataactcttctttaattaaaacagatttactaaaaattcaatataccctagaagttattttgggagacttaactaaattaataatattactattaattttttggaatttaaatgaagtaccattcttcttattgtcttttgctattctaatttcaacaagacccttatggggaggtattcactgcaaaagcttcaactcatgcttaatatttagcttagtatacttcatagtaatattactgtatagtagattttgtccaaaattgaatattaatttctatatagttttctttataatatcattcattataacattagcctttgctccttgtgataatgaaaaaagacctataaataataaaaccatattaaaaatattatctttaatatcgctaactttttggggcatattatttttcaaattatctaatttacggatatgtaattgcatatttgcaagtatattactacaaattgttcaaataattatcgttaatgtgaagaaaggaggcctttttaatgcaaaaatctataaatattttttcagccatacttcttagactatttaatttagtttcagaatcaagttgcgcaggactttatggcgaacctgatttccctgaagaactattaaagtaaatatcaaaaattatttctccatattcgaagttgatttttatatatcctttatgtgagttaattatttgttgtacattgtacaatccataacctcttgtacctatatttttagtagaataacctcttgtaaacatctcatttaaattaagatcactagaatttactatttgatttttaactattaaatgagatgcatttttttcatttaaaattctaacttcaatattttttttaatacatttttccttcattacctcatcaaatgcattatttaataaattatttagtacattagatatttcatgataactcaatatattatctaaaacattattttctatcttgtattggaaattaacattatctttttttgctttgcatatatttctgtatattatagatcttacaactatattatcaatgtatataagttcatttactttattatcatacgtatcttcatctttgatataattagtaattgctgatttcagatccttattatctacaacttctactatccctcttattgtatttttataattaataaaatcatgctgcctttgttttatctcttggattatttcatcaatgacggcattatattcattagacagttttaacttttctttttcccttattactttcataatatataaatatgttaaaatctgagaaattactaatacactcaatattaatgttgcaataaataagttatttaaaatcattttattgtcataattccaaataattttaaaaaccacagcatatattccacatgttaaaattagataaattaaaatattactatctatcttttcaaaagaaaatgtcttatttaaaaagcttacttttgaaaaaatgattatgcaaattaatgttattaattctataattattattccaaaattattattataaaaaagtttatcgacaattaaagaaagcattaactgtaagctaatctctacaagtaatacaaaaagaaatcctaatataatttcttttaaacctatcttgtatatggctttaattactacaacaatcattatatatgtaataataaagtttactcctaattgttcaacaattgtggttaaaatagatacgataagtataatagataacagtttagctatattattatttttcttatttaaagctgcccataaataaattatattaaatgtatccaagctatttataataaaactatttaacatattatcacttttccttttttaaattcagacataatgctatttttaaatttgtatcctaaaaatgctgtcttactacactcattaaaatatacttcactaagtttaacgtctagtttttctattttgtatatataattcgtgtttattgcaaaagctctatggctttgtactatataattgctgtcaattaactgcaatattttttttaaacttatgttatatgcagtataaacgccattgtaagtattaatatcacagttttttccatcaacttctataaatataatatcatttacctttatcccaacgtatactccattttttaaagtaattacaatttctttgtctttttcctcgttataattatcaactttgttattcaaatcacttgtctcattaagaataatcttattcaacatagcttgtacatcatttttatcatatggttttacaatataatcatagcaatgagtttgtttaaatgcttgtgttatatattccatgtgtgttgttaaaaaaatgatttgcctaaattcgtatttagatatacttctaatcttcatagcaagatccaatcctgaagattgttttaaactaatgtctattaaaaacatattaatatcattatttaaaattatttctaatgctgacatctcgctatcagcctcataaatttttacaaagtcacatacagataatatcattctctttaaaatgtctctttgtatagaatcatcctctactataataatagaatacaaaagtaccactctccaatccatatacaatctaaaaaatatgtcaataatactgtctcatataatcatgaggttaaaggctaatttcccttgatcttattttttattagattatttaaacgcctctacctatataatacaatattatataattatatacaattatcccacttttgtgtaatttttatttattattctttaaagacagtgataaaacgtgctgtatagactatttaatctaatacagcacgttttaattataattattcttattaaattttttaaaattaattacataaacatagctattttttcggaaagaaacatttctaattccccatttccttcatactataatctgcatatgaagcatactcagttttaggatatttatcttttacctgcctaaaatatataagagcatttgaataatcatttgtctctttatagcatgtccctatttgatacatcaaccaaggcataatatctatatcagaatcgatttgtgaagtcatttttaatttaggaagtgcttccgcatattttttttgtttatatagcttatttccatcattgtatataggccagagtccacttctttttaaatcttgccataatttatcaaacttcgctttcgtatcattatcaagattttcgttcttcacatttattaaatcctcagcagcactttcatattttccgtctccaattgatttctcagcctcatctaacatgccaaagatattatttttatagctatcgctttttactttctgatcttctgaatctattttagctttctcactactttcaagattcaccatattctcttctaacgaatcatctactttgttctgatctttatcgacttcctcttgctttactattagtttattatttatactaagcttatgtaaaaattcttgagtttcaataggaaccttcgctattgctatctgaataaactttggataaaaataattcattacaataccgcccataatgattactgtacttaatataactataattattttccctgtggaacgctttggttttgtagagtactcattccatatatcactattaatatgatttataacatccatattatttatatttcttcctctggatgattttatttttaggctttgtatataatcatttgctaaactatcatatatagcgtattttttgagtttcttaaagaccttttctgcatttctatattgcttcatactaacatagcacaatccaataagcttaattgcatctgaaaatcccttattataggataaagccttttttaaatcatttatagccaactcaaagttgctcttttttatttctcctattgctgaattatatagaataatggatttcttaatgtcatcatcgatcttatatctattcaattccatttcctttatattgattggatttatttttttaatctccatctcaaaattaaccaaataattacctcctaaaatattacacaataatacactaatgctcaaacagtaatatcttcctattaaaatcagaataactttacatttgtatttaaaatttgatttatttctatgtataaatcttagcaaattatgtaatataattcaatataaagtcttactggtaaaatattttctaaaatatttttaaacgtacacaaaattattgaatatcttcattttaaaagtagtataaaaaaacctaagactatgtatgagtttaaaacaattctctcttatacatagccttctttcgcttccaaataatattttattataagtaatttccttaatttaaattttgcccgcttccaatttttattccttgaggaaatttaaacacctcatacggatcatatttcaatttaacttctcttaatttctctaaattttctccataatactctttttcataatcctcaatatctgcgcatggaaaattaatatatgaacctgttgtgatactatttatgtatttaagcttttctttaacccattctatattcataggcgcatactcagcttcttcccaaacagattgaaatcccattataaatttcgcatctctatagtaaaaagctgtatcatttttatctttttccataattgctccacctaatccatatagagaaacagctgcatatactgcacctttactcctctcttcaacaagttctatgatttttttcatttcacttctactataatccttatacacgaatcttcctgccgatttatatttttcatatggaggatgaccatcttgaatccttctatttacatctaagactgaaatatagttaaaatcaaatactccttttttagaaatattcttaaagtcgcccaaaattacatctgcctcttctctggtaccatataatattcctgtaattctgactcctcttccttttatttttgaattatatatccccatctttaaattaactcttttatctaaactcatatataaatgtgtccaagtctcaaatatatctaatatctcatgatcatcagcacctatataatctatatctattaaagtcgccatcttaattttttcaggaagtttaaatatcatgctagtaactactccaaaatttcctccaccagcacctcttaaagcccaaaacaagtctgtattagatttatctgtagcaactattctttcccccttatagtctatcaattcaatttcaagtaagttatcagaggctaatccaagcaatctatttgaatacccccatccgccacctaaagttagtcccgaaactccaaccgttggacatcctcctcctggaaatggatagcccagttctcccaaaacctcgtaaagttccctatttctaactccgccttgtatctttactattcctatttcttcatctacactaactgcattcattttgctaatatcaatgaccaaaacatcattccctgttgaatatccctcatagtgatgtctgcctgaccttattctaatttctactgaatgcaatttggcccaagttattgcattgatgatatcatcattagtatggcaatatacaattgctaatggatatttttctatagccctattccaggcttttcgttcttcttcataactaaattcctcttttgtaatgatatctccggtcaatcctctgtaatcaaaatctatcaagtctatcaccttctacttttctgcaaattatttcatctacttccataataccatattatattttttataataagcgtattctatctaataaaatactttttttatacaatcttttgatgtaaaaataaaatttattgaaacttgttaagaaattgtaaacttttattttttattgaatattataattttcccatgtcaaatatatagctaatcataaaatcataaaggagagatttattatggataaagaaagagcacaggaaattgtttcatcatcagtaatggcaaatgtaacacttaatggaactccaatttacatcgaaagcgtaaatactaatacagaaactgctaatatccatttttttaaaaatccaaaaaattcacgcgaagtgcctttaactagtttacaagaacataataaaaaatagcattaaatataaaattataaaaacgccttataattttacatttaaatttcaattcttaatgactacaattttgtagtcattaattctacatattgtatgcaaaaattttgaattaaccacctatactactgaattttttaaaattactatttaattattttatcaatgaaaatttatataaccctaccatgaatttcatagtatcaaatacttcctttaggatatgctaatatcataaaggatataacagttaagcaaacaaatatgttcaaaaaacaatatatttgtttatcagaatttaatacaagtcaaaagacttgtattaacattagatgagattttatatggttaggaaaagtcttattatagtagattaattttattataatatgattccaacttatcttataaagtcaagctaagattatatttggtagtgtaataatcatatatagtcaaaagattatatatggtcgtgtaagtatcttatttagtcgaacaaaatattaatataggtattgcactgtttaattatggtcgaaagattataattagatactaagttatctatattagtgtgagttatactgctatattctttatttaatggccataagtaaatttacataaatttacttatggcttttatttctactcatttcctataacgaatccttatttatattctaaataactacaataaaatttttccatatgcaacaaaaaggtacatgtgaggaagttgcttttagtaaactttcacatgtacctttagtttatgttggaatatttgcaactaataaagctcatacaaattatttcaaaaaatatatcagctttttatatctgcctcagaattttctttaaatacaattttatttgaatccaattcagtttcatcatatctatatggctttttcttaaatccctttattactttaccaattagacctcctatagcagccaaaacaaatatccataccttcttaaatattattagtattttagcaagtaaacctatcttatatgctgtgcctccaacaattagtgatgctaatcctgcttctgctaccttatcgccttttatgtaatctgagtatctttttccttctttataagcataatttttaagaatattttccagtttaggtttaaccgccaacatttcgtccttacttgcaaccagtgtgacttcagtcactccaccacgccctaaaactcttacattataattaactatctgttcgccgctactattacataatactgaccatattaaattattggtatttggatcataatgtggtttttcatcccatccaattatatctaatgtagattttccattcttcatcctttccttgtcgtcctcttcagttccattttttatatcatacaataactcatcagaatttatttttcctgtatcattatctttgacatagcccatattatcaaattcaaataaagtatcccaattttcattattatcttttgataaaactattccctgttccataccaatgactaagttacccatttccttcattaattccttcacatcttttccatctgcaaaaaagtattcactcagaagatctagcgttgctaaaccgcttcctacatctatagtctttggcccttcaatccaatttatttccgatgtatatgttgaatcactagtatacgaaataacagggatatacataaatatagttaaaacagctaatgttcttaatatatttttcaagattttatccccctatgtattaacttacatttattattctaaagttattttcatgtgttgtatattatacttttgtatactttttcagctttaaataatacaagaattatataattgaatatactaagataatttcaaagttaattttaatagcaaatgtttacgctttaaaacaaacttaatattaacaaaaaaatctttatatgcattttataatcataatatccaatactttaaataaaattcattctcttaatttgcgtatatttagctaggttatgtgaatactaatctcgaatgatttatataggaggtgttaaatatgccaggaacagctaaacaatatgttgatcaaagtgtatcttcttgtaaagatactataagttcactacaacaagcacttagctctgcagaaaaacaagataataaaaataaaattcaacaagcaataaattctcttaattctgcatgccaacaattatctgagtatcaagactaatttatacttagatatattcctataggaatgcaataaaccactttattctaactaaatcagaataaagtggtttattatcttttatctcaaatatgtcttgaagttatactttataaaacatgaaattaatataatcagacttattagaaatagctattatatcaaaaccatgattctttaatagatttattacaatattaaaattttatgctaaatttctcttaacaacttcttttgtttctgcttttgatttaatccccttatggatcaaccaaagcataacaaaccatgccggtgttacaaataaagctacacgagtttcattattaaatgctaatgtaattataacaaaagctaaaaacgctagaattatataattcatgattgggtaaagtggcatcttgaatttgttcgaagctgcaagttctggattagttttacgatatttcaaatggcaaacaacaataattgcccaaataaagataaaacaaaatgttgatatacttgtaattagaacaaatactccttctggcataatgtaatttaaaataactgaaatcaagataacaattgctgagaacattgtagcattagcaggtacttgattagaagttaatttattcattgactctggtgcattaccttcttttgcaagagagtaaaccatacggcttgtactaaaaataccgctgttacatgcagaagcagctgatgttaatacaacgaaatttacaatacttgctgctgctgcaattcctactgctgaaaatacctgtacaaacggacttttatctggattaattgaagtccatggatatatgctcataataataaatagtgctccaacatagaaaataataattctaattggaatattattaatagcctttggaataactcgttctggatcttctgtttcaccagccgtaagtcctactaactcgattccggtaaaagcaaatacaaccatttggaatgaaagaataaatccagttgcacccttcgggaacaatcctccatgactccaaagatttgtgaagctagctgcgccagcatctgtagaaaatcctttaataaccataaatataccgattataattagcgctaaaattgcaacaactttaattaaagcaaaccagaactccatttcgccgaataactttactgctgtaaggttcataatcaacaaaactataagaattataagacttggaacccattgagctacattcgggaaccagtattgtatataaagacctgcagcagttacatctgccatcgcaagtgaaatccaacagaaccagtaggtccatccagtaataaatgctgctctctctcctaaataatcatatacaaagtctacaaatgaatgatagtttaaattagaaagtaataattccccaagggcacgcataataaaaaaacaaattattcctgttatcatatacgcaaacaatatggatggtcctgctaagtgaatagaccttcctgaaccaagaaataatccagtaccgattgctcctccaattgcgagtaattggacatgacgattttttagtcctcttgataagttttgattttctgattttaattgatccattttatccctccatcttagttaaaaggcatgtactaaaaagccctttactaatataaatattttgtgatttgagatataaatgggaatagataagatctaaatgaagtaatctataatatattactttgataagatatgttatctgtcccctgtccttttacctgagagtttcgcctttacagctttctccttcggtgctcttttcgagtctctccaaggtttcatccaatagcggtcatctctaattaaataggtacctgaaagatttacttcttcggtgaatgaccatagccattactctcccgctatcttcatctgaacttttagattttactgttatatagtaatacatttttaataaagttgcaacatttttttcattttaatcagaattcttaagtatttttatcataattttaaaacagccacaaaaagaaccctatttctagagttcctaattatttacccatttacttttttcttattttatccatcaattcctttgttgatgcttctttctgaaatacgattttttattttcgatacataagagtttcttgtttcttaataagatttcactccccttactctctgtttcctatcaagctatttgcatgcatttagtctatatttcatattgatgatcaccttaaattctactatttctatataactaactacacaaaatcaattttcattttccattgaatttagaaattatataacaaaaagtctagtataaaaaaatactaaactttttaaattttttcacttatataaatgctaatttgatattttatgtatcgctaaatattttttcttaactctcattattcatcttcttttatataaaaatgatttggatatcgctcttttttaagctccttttcagtccctaattcacacgccatggtgaaatagtcaaccttgtaattaatatgttccatatatttatttaattcatctatctttttttgaacattttccctgtgctttaatattaactccaaccttttatataatgtaccatcaccttgtctatttaaaacgacgaattcttttatctgctcaatgggcatattcgtgttctttagacaattaattactgctatccactctagatttgactcatcataatatctatgtctattttcagctcttttaatattaggcaataatccttcagattcataatatcttaaggtagatgctgttagtcctgtaattctagctgcttcttgtatagaatatttcatagtttctctccttatactagaaatttctaagataaattatacgccaaaattactatttttagaatagaaagaaaaagaaaatgtatacataaaacttgattttttatccctagcctagttagcacttatttcatcaatcatccttaactcttcatctgtgaattcaatcttatgaactatacccacattttcaataatttgcgatggttttgatgctcctataagtacacttgttacttctgaatcttttaatacccagctaagtgccatttgagcaagagtttgccccctattcaaagcaatattatttaatctcctaatttgatctaatttcttctctgtcaatatatcttgtttcaagaaccttccatctacttttattctgctatcgtctggaactccatttaaatacttatctgttaatgttccttgtgccaagggactaaatgctataattccttttccactttcctttgctgctcttttaagtccattgttttcaatagttctatcaaatatagagtatctattttgattaattataaacggacattttaaatcatttaaaattgcagctgccttttccattgtctctccattataattcgaaattcctgcataaagtgcttttccactttttacagctgtatcaagagccatcatagattcttctaatggagtatcaggatccattcgatgatgatagaatatatctacatattccaatcccatacgctttaaactctgatccaaactcgctaatatatatttacgacttccccagtctccataaggcccttcccacatcttataacctgcttttgtactaattaataattcatcacgatatgtcgctaaatcgtctcttaaaatacgtccaaaattttcttctgcacttcccggaactggcccatagttatttgctaaatcaaaatgagttataccattattaaaagcagtaaaacataattctttcatgttattgtaatctgcattgcttccaaaattatgccaaaggccaaatgatatcataggaagctttaaaccactttccccacatttactatacttcatttcattatatctattttttgatgcttgatatttcattctctcaactcctttgtttttataactttactttaacacttaaagttaactttaagtcaatattacatttttagattattataaaatgaaaagttaatttcttgtttgaaagggtaaattcattattaatgactttagtctcccactactttttttgacaaaaggatttaagccttgtattttcagaaattattaaagatcaagaatttacttattcacttgatgatttttagattgtttaaaatatactatgcaaaaataaactaactaaaccagcactaccataaacatttagtattttatattgcataatatatattttcatttaaattgaattgtgtacctaattagcgtttggataaactgaagtatcccatgaatgatctgcacttatttcttggtctgttaagttataatagtcgtattgtataacatcaccgtaattagatacaggatcgtcccacgtacaatccacatgacgccatttgttatttatataaaccaagttccatgcatgagcctgtccatcagcagtcccctctacaaccattgatttaattcctgcaacagtaaacattttttgagctaaaagagaatatccctcgcagactccagtatgtttaattaaagtattataaggatcatatatagttaaagattgatcatattttgtattatttattatccaatcatgtatcgcacgttctttctcttgctgactcatgctatctggagcaatctctgcgactatagatctcactttcgaatccaaatctgcttccattcctgctgtcattttataattgcatttaacctgtattccaatattacctgatctataacttgtcatggttacatcgtaatcagatacattaaacatttcataagagttagtgatttttaacttacttatctcatctttaataatattttctaggttgttaatatccacgccaccacttggacactctatataaaacgatggattttgaatactgacattctttaatatttcttgtcctattaatgtatttactgagtcaatccacactcctctggaattcaagtaatacccatcaatagtagtgttctgtgccatatatccattttggtagaaataataccaaaagccatctatctttctccatccagtggcatacgaattaccttctgtataccaccagcctttataattagacttccactctgccgaaactcctattggggttagcgctgtaatcgaagctgcaactaatgtacaaataacgacatttcttaatcttagacttttcattttattcctcccttcaatacttataacataattgtatattacttcatcttttttcaaatatgttacaaaacagttttacacaaaaaatctagttactgtatttatattttactatacaggtttaaatgtttattttttcaatatttaaaaattacaagtaaataatgttaatcagaaaatagagctagtattttaataccccaaaattaatctttgcctacactctgatctttgatatgatgacatctttaatatattttcttccatccattttcgctgttcataagaaaatctttttccaaagaataacataaattgattgtcataattatctcctactaatccataggtagattgagtaaatttaataaaaccaagagtctccaacaatgctgtatcatgaagataaattgatttctcctcatcaaacatttctaatcccaattctttctctagcctggatgctaaaagattatgcttagattcaccacattcataaaatttcccatctcttgataaccaaccacatatacctgtttcactcattcacttaataggatagatacttattatttagcttgtaccttcctattttacacctcactctcttgtataataatctgaatatattattgctaatttttatgtttaagcagcattttcattctgtaaaccaataaaattcagcatatcagtataaaaaacttttacttttaatttaatatatttcataaattctatatttccacaaaagtatttaaattcctctattttaagggatgtaacgatatatgaaacaggtggaactacatactaaaatcaccaactaatcatataaatgacatgcaacaaaatgctcaccttcaatttctttaaagacaggaatttcatttttacatcgctcatatgcatatacacagcgattacaaaacttacacccgttttctctatcttccaatgttatctctgattcttttagactaagcctctgccttctcaattttggatgactaactggcatagattcaagtaacatttttgtatatggatgcatcggattatcaaacaaatcttttttttcagctaactcaacaatgctccctaaatacataactgcaattctatcacagaagtattttacaacgcccaagtcatgagatataaacaaaaaagttagtagatatcgttgttttaattcatttagcaaatttataatctgcgcttgaatggaaacgtctaatgcagccactggttcgtctgcaaccacaaacttaggctgaacagccaaagctctagcaatccctattcgttgacgctgaccaccactaaattcatgaggatatcgatttatagcttctttatccataccacaaatccttaagtattcttctgctatattaaatgcatctttcccatgtatcaatctatgtttcttaattccttctgctataatttgtccaactttcattcttttatctaaactagcaaatggatcttgaaaaataatctgcatatcttttcttaatctgtacatttccttgttgctaattgatttcttattttcgatatcaaataaagtcttatcttcaaatattacttttccaccatcagcatctattaatttcaaaatagttctagctgttgtagactttccacatcctgattctcctaccaacgcaaaacattctcccttttttattgagaatgaaatatcgtttaccgcatctaaaacaatcttttctcttcccaaaaagcttttttcaattacatatttctttctaatccgatctacttctaaaatagtgtcaatcaaaatcctttgcctcctcatataaccagcatgctactttgtgattatctctaatattaaataatggtggagcctcatcttcgcatcttatacaaaactttttagaacatctattactaaatcggcaccctgagggcatatctgataaagatggcactattccttcaatactttttagaggttttccactttcacatctatggggttgtgactccaataatccaagagtataaggatgtctagcattatcgaataactcatatacattacattgctcaaccacctttcctccgtacaacaccataacttcatcacagacttcagcaactaccgataaatcgtgtgtaataaataaaatagacgttttagctttattatttaattcttttaatagaaatagaatttgagcctgaatagttacatctagcgctgttgtaggttcatctgcgattaatatttctggttcacagcttagagccattgcaatcattactctctgacgcatccctccactcaagttgtgtggataagaattataaactttttctggatttggaatatggactgctctaagaatctcaattaccttctccttaagtgctctcccatacaaacttttatgtatctttagcggctcttctatttgcctccctattttaaacactggatttagtgaagtcattggttcctgaaatatcatagaaatttcatttccacgaagatattcaaattgtttttctgtaaacttacttaaatcatttccatcaaataatatttctccattttcaatcttacttatcttatctggtagcagtcccatgatagataaagctaaagtactcttaccacagccagattccccaataagtcctaatattctgcccttttcaaaagcaaagcttacatcatctacagctattactctatcttttccttccccaaaactaacagatagattattaatacggagaatttgtttatccatatttgcacccctcctatatattcattttgggatcaagagcatccctaagtccatcccctacaaaattaattgatagaactgataagaataccaatactcctgcaggaatccaaagccaccattcatattgcaatacacgcatactttgagctgctgataatatattcccccagcttggctcgggctgttttactcctaatcctaagaagcttaaaccagcttccattaaaatcccttgtgcaacagccaacgtagcattcactataactggtgataatgtatttggtaacaaatgattaataataatctcaaaactgttaagccccatagctcgtgcagcctcaataaattcactttgtttaatagaaagaatttcagctctcacaattctagtaactcccgtccattgtaaaagacctataataaaaatgacgttccaaacactaggtccagctagcgcagcaaccgtaattgctatcacaaagaaaggaaaacacataattgtatcgactatacgcatgattgcattatcaatccagcctccataaaatccgctgatgcatcctaacgtaactcctattagcagctgcaaaacagttgcacttactgcaatccccaatgaaatacgtccaccatataataatctagtaaatacatctcttccaagttcatctgttccaaataaatgccttaaacttggttgactttctatattcatcaaatctatcgtgtccctcccataacctgacaaaaagggtgcaaagattgctgctaatacaaatataatcaaaatacaaaaaccaattgtggccagcttattctttagaaacctagttaaaatcacatgttttaacacacctttcctcccttaatcaaattctatacgtttatctacagctgcataaagtatatctgccaataaatttgtaaataaacttattattgcaaccatcataactatacccataataagcggataatccctgctaataacagcattgtagttcagccttccaatccctggccaaacaaaaattgtctctgtaagaagagcccctgacaataatgatggtatctgcatagttactactgtaattaaagtcagtaattcattctttaaagcatgttggtatataacattcctcttcttaactccttttgaacgtgctgtacgtatataatctgtttttaaaatttcaatcatatcagaacgtgtataacgcattaaactagctgtattcattagtgcaagaactatcatcggcaataacatatgctttgcaacatctattatgaatgccaatccagttaaattaatgcctgtagtcaccatacccgatattggaagccatcctagatttacagaaaacactttaatcaaaatcataccaaagaaaaaggatggaatagataatcctataaatgcaaatactgtaacaatatagtcagttttactaaactgttttgtggcgcttataacaccacatggaattgctattaaaatactaagaatcattgagcatatagataagatgactgtattgcccagcctgctgcctataacatttagaactggctgtttaaattgaatagaatatccaagatttccttgtaaagcttgcattagccacttaaaatactgaattaatatgggatcattgtatcccaattgttccaacattctttctttcatttcttgtgaaagattaggatccatcatagatgaaaatggatctcctggttgcaactttacaagtataaaaacaattatagaaattccaattaatacaggtattgtttgtattaaacgtctaaatacatatttttgcagaacgatcacctcctcctataaaattatatcggttagggcttttcccctaaccaatacatcaaatttttaatttttatctttcacttctatctatatcgctcttctcttgcgcagtaacttcctattttgaaatcgtccagttttgtatgtctggaaatacagaatatgctgagtacttatatccttgcaatttaggattatgagcacgaattgcattttgtgaatataaaaatacatatggtgcttcatcattcaataattgcccccattttgcataaacttctttacgttcattacgatcaatagtagttgaagccttttctataaattcatcacttttagcatttataaaattcgaaaaattaaattgagaattatttgcaatgcttgaagaccaataacgatcggcatcacctggatcaacttctaaggtgaatcctaataatcccatgtcataatctccttgtcctttagtttttgccatagcagaagcaacatccatagtactgatatttactataatacctacatcctttaaattttgctgaataattggagcactttgttcacgaaccttatttcctgtcggaaccattaaatccacttcaaatttcttaccatccttttcaagaaccccattattttcaatccatccagcttcttttagtaattctctagccttatctgcattataatcataggtgttaagtccagactgaggataagcccatccagctagagatataggtgcatttattacttgtccatgttcacctagtaaactatcaactatgccttttctgtttatcgcataagtgattgcttgacgtactcttttatctttaaagaaatctctattgctattcatagtcataaattgataattcgcacttggtttctcctctatttttatgcctgcatcttttaacatctttaaatcttcttcttttgtgcttgaaagttcaacaatatcaagatctccttttgctaactctgaaagctctgtttctgtattagcaaccttaaaaataaatttatctattttgggagctcctccaaaataattatcgtttttagctaattcaacatattggtctggtttaaaatccataagcttatatggtccggttcctacaggtttgttaagtaaatcactttgtttgtcccaatcagcaacatttactttactccaaatatgcttcggaattattccacgctgtgaaaaatttgataatgctggtgcataaactttagaatatgtaaagcttatggtatatttatcaataaccttaattccacttatagaatctgctttaccatcatgataatcctgtgcaccaactattttggaaatttcattgaatcttgatcctgtatactttgggtcagccatactagtaaatgtaaatgcaacatcatctgctgtaaaatcttctccatcatgccatttgacatcttttcttaaattgaatgtcacagtaagattatcacctgaaaattcatatttatctgcaagtccaggcttaaaatcattattctcatccaataaaatcaatggtgaatataccaagctatttacgttattatcatacgttgtatttgataacaatgggctaaacaaacctttaggtgaagattctacagcatatcttaatacagattcaccacttgatgattgattatcggctgatgaattagttggtatttctgcagatgtacttccacaaccgtttaatagcaatatagataatagcattgaaagcataccagctaatattttattttttctcagaaacataaacattcctctctttcataacttgattttgattcgtataacttaaggtattgattttattaaaatactttccaacgcaaattctaggaatatatttttcaaatttcaattcatagtattttaatatgattactttttttaaattataaccgtggcatattaaaattttgattaaatatataaaatatatttatgaattttaatatgaataagcactacacttaaatcatcctatttatacaaatattaatcagtacaaaaaattaatcactacaaaattgtagtgattaattcttactttttatttataaatattagtccaataatgcataatattattcctagtagtttatttatattaaagccttccttataaaaaattatacctactggaatgagtataagtgcaagaaaaatattagatactagagaacctatacttatatcccagcctgatctatataccattatatatccaaattcaagaccaacaatagcaaagccaagtaatatactcgcccaattcagatcatcaaaggattcgaaaaatcctttatctgatttataaaatctaaatgctatagcggctacaattactccagttaaataagtgatgaataaagaagagaaagggttagccttctccggaactgattttgagcaaatatgataaatcatatttgatacaacaacaattataatagaaaatgcatacataaacataaaaatctcctccattagttttactgcaattcttttatggtcatagataaatatcagaaaattcaaccctagtcgcttctaaaatatgattataaaaaaactcttttgatgatctgtactcatatgtttcggtaaccttttcatttggtagcattactataaaagcgctccctttgctaactttactatttacaaaaattctcccacctagatcctcaacaaatttcttaactaatgataatcctaatcctgttccctccacttgacgagatagagaactatctacctgcccaaactgctcaaaaattgtatctattttatcacttggaatacctataccttcatcgcttacttctataaatatattttcttttaaagcattaaaccgtacagttattttcttattatcagaagtaaatttaatagcattagagagaagatttaaaagtatccttgcgaatttttcattatcaatagccacctcaaattctttatatgatgtttctaatatcaaatcaatttcttttttactagcatatgatcttacagactcaacaatcgcatctataaaaaaaacaatatctatattctttttatttatcttagtactcttcaaatttgaactagttatatcgagaatattgtttactagccttaattgtctaaatgtattaagttttatcatccccaaatattttttagtattatttgataactcattaaaacaaatatactccatagcttgtactgctgaattaattacatttagtggtgtcctgaattcatgcgatattatggaaagaaattcatccttcatagctattgttttttctaatgtttcattcctttcaaattcagcctgcaaaaccgaatcatgttgagattttatgatcctttcctgcttaactttttccgttacatctttcatacacatcattccaaataagaaattaccactatcatcatatacaggactaccacttatacacatatatatattttcgctatatctctttataattattctatactcagtaattatttctcctcttaaaattctatctgacggaaggctcccctccctcaattccttcatattaacatcaaaatattttatttcactatcatttttatttcttccttcaattatttttataacattaaaatgtttctctgctgctttattaagcataaccagattgccgcattttcctatagctacaactccatcagacatgttatcaataattgcttttaattgctctctattatttctaatttttttctcattacttacaagttctgtaatatcatcaaaggcggtaactgacattaacacagtattttctttatcataaataggtgaagaactcatatctaaaacactttctttaccgttatctacaactgtaatacgttgatttttaattttctcaccttttaaagcgcgaaacgatggcatgtcttcaatatcaatttcttttcctgattcattaaagtatttagcttcactattttttccatatgaagtctttgactcattagagtgttcaatcaattttctcgatatctcattttgctgaagtatatctccttcttttgatctaacgaatactccatttggaatactttcaaatacagcctccatttctttgttttgaaggttaatggcatcaatttgttcttcaactttctttctattaagtaccttttctgtaacttcagatgtattacttaccacatattttatactttcaccttctgtaactggaataattatggaatcccaatatgtaattcctctttcatatccaatatgttcatattcttttacttgaactgcttttcctgtaagtatagcttccttccaaaacttttctactttacttccgctccatcctaatataatcttatctatattttttcctatactataatatgattgattaaacggatgttctaagaaatctaaatattgctgattcgccttgataagtatcatatcaggaacactataaacagctactcccacgaagtttgatttacataattccgataaatatgtatgtttagcttcaagtcttgaatttggtttttctctaataataaataattgactatcttcttccttaattatttctattgaaattgatctaaattcaagagatttagtaaataaaaaatagtcggccttttcagcgatgttttttatatcaacgcttgggccgactcttagaattttaaatatctctgtgatactttttccaagcaagtcagcagttgtatattcagtaatttctgcaaactgttgactcaccttaaaaaccttatgattttttaataatatataagaaatctcttctatgcactcaaggtaccttctatcttccataatagtatcctcctaagctatccattatcattagcatatgcaacaaaataagtaatattttaccacagtattttgtatatttctactcctaaattttcttaatttaaattattttgaatttttctgcattattctttcgttatatttcattctaagaataagtttaaattcccaataaagtaaatcttcttaattcatttatatttttgcaaatgtcttactataggaaatttataaaggatatcatatatggattattaatataaaccataaaaatatttttcttctgttaactaatctaagtaattacagttgttcttctaattgcaccattaatatgatctcagtattttaaacttaatccttcctacctctgtccattatttaaacttcttcgccattagatgaaattactttcttataccaatcaaatgatttcttcttcgatctctctaacgttccatttccttcattatctttatccacatatataaatccataacgtttcttcatttctcctgtagtaaatgaaatacaatcaatacatccccacggagtgtatccaagcaaatcaacaccatctaattcaatggcttttttcatttcttttatatgttcccttaaataatctattctataattatcattacatgaaccatctgcctccttaacatcaatagcaccaaatccattttccactataaataatggaagttcatatctttcatataataaatttaaagaatatcttaaaccaatgggatcaatttgccatccccaatctgaggcttttacatgtggattcctaacacttgcacttgatcctccatttaccgaatccttattaacttcattaactcctgatttaactacatcagacatataataactaaaccctaaataatctacagtcccctcagctaaaattttagcatcttctagttccatcttgatatcatacccttttctactccattcttttaatgcataagaaggataatgacctctgcaatgtacatcagcaaaaaaatagcgatcatgcattgattcaacttgaagcatcatatcatctggattgcaggagaaaggatatatgggaacaaatgaacacatacatccaattttaaagtccggatttatttcatgcccctttttaactactaatgcactagcaattaattcatgatgaacagcttgatacattacctcttctctattctcgccttctttaaactgaattcctgaacaagtccatgcaaatatagaatttacagtatttttctgattattaatttcattaaaagtcatccagtacttaactttgttcttataacgctccattacagtggttgcatagcgtacgaaaaattcaatgacttttcgattactccatcctccatatttcttgaccaaatgataaggcatttcaaagtgacttaatgtaataacaggctgaattccatgctttaataattcatcaaacatattgtcataaaatttcaaaccttcttcattaggctcaaattcatcacctttagggaaaattctcgtccacgcaatacttgttctaaagcatttaaaacccatttctgcaaagagtgcaatatcttctttataatgtccataaaaatcaatagcttcatggttaggataattttctccattaaccactccatctgttatccttctcggtactccatgagctcctgcggtcattacatctgcgacactcgggcctttccctcctttattccaaccaccttcaacttggtgagctgcaacagcaccaccccataaaaaatctttaccaaaagccataaaacttcctcctgacatttacaatataaaaataattttttaaataactatattataatcgagtttctacactctaattttattttaatatttagcttacttcaattctaaatataaattcattattgaagcataaatattaacattgatacgataaataaaattaatgattataaaaactcaatgatacttcccatataatgcatacttaaatttcgctaaaaatcccaaataaattaactatttaattgctgaaatttattcaaatattatgctaaaattctttcgatgttaactataaatattacacttttcattgggtattatagttacattctataataagcataacctaaaattatatacatatgtactaataagacaaaaaagtataccctaaacggcacagtcttttagacattaccttttagagtatactctcctcagttcaattctattgattatgtataattaaattaagcttatgattaaaccaaatatcaaaaactagaaataaaggactttcataaaaataattgtcctttatttcgataagccacatgtaattattatagcttactagtttgagaattcttgtgttcccatatatttaccatttccataaagaacccctacaccaactttattatatgcagaattcatcatgtttgctctatgacctggtgagttccaccattgggtaaataattcaacagcatcatatgtgttgtatgctatattttcacctgttgtagtgtatctatagcctaccgcttgcaaccaatttgtccactttgttccatccggatttgtatggtcgaagaaattattttggatcatattattactcttatatctagccacttgtaataaagtattatctaatgttaacggttttaaaccagcttctgttctttttgcattcattaattcaagaatcttttgttcagcagcagcttgtacagttacagaataattggcaggtaacttaggcaacccctgaacatctagtgagcttgtacttgtagaagtattagctgtacttcctgaatttgttgtatttccagttgttgtagtaccagtactatttgtgtttcctgttgtaggttttgttgtcacagtaccagttgtacttcctgttgcaggtttagttgttgttacagttccagttgtacctcctgttgtagggcaagttgtacttgtcgtatttgaaggttttactgtagatgttttattattatcttgtactacgttatttccagaatcgaataccttatcacttgatggagctttagtccctataacttgtccactttgagaagttgtatatattctattgtttactaaaacctttccaatctccattataccattctgatttaggcaataagtcttaccattaactttaataacaccagtttgcattactccactattatcaaagtatgaccattgaccattgttattaacccaaccagtttgtaatcctccattagagaatacattgtaataattgttaaacattgaattagtagtcgctgcagatactcctaatggtgcaatactagtcattgttgtagcagcaataacagccgtcactatctttcttaaaaaagctttcttcattagtttttctcctttgtttttttatttgtcttctgaatttttaaagtaaacattttctttattaattgctttacttgtttactctttcaacgaagtccatgccttaatactatcatcttttcgacattattcaacacgattttccttagaaattctctttgagaagaaaatagctgtaaccttctctattttgcttatttttactccatcatccgcccttatatgctctaaaccctgactctgcaaaggactcccccctatatatttttcgaaaaaatataatagtattattaaaaatattactaattaaaaaccttgttttttacattttattcataattgtcataataattttaacattatttatctatattcaaattttatagtttcacaaaaaatataggtggataatccacctataaaatattaatataagaaagttaagtattagttaatggggtatctacacagtatacatttttttctctaaatatattccatgtcattaaaaataaataagatttatttttaaataattctcattattttatctacagtttccaatacagaaatgttgcttgtatcaatctttttagttgacatttctttatataaaccaagacgttcaacacttctacttacgcactcttcatcccgtaactttaactttacatctcctaaaattctcttctttagagcatcttcatcacaaattaaagttatcttgataatctcaaaatttaaatcattcagtggttctaatatatcatcaaaaatatcttccatatgtataacccaattaaaaataatatattctaatgatgaattagtaagaaagtttctcaataaataatttatattatttatcaccattttcttattttcatcattaaccacgaaaggatttatcatccagcaccaatctccatcaagccacactgaatttttcaactttttatttaattctctacaggttgcactttttccaacccccatagttccatttattattatcatttttctcttcataactctctcctttttataacgtccaattcacacgaactaatagggtacctctttataacaactccttttatagtcccatatttatagtagcactgtccatttaattgttaaagatgccctttttatcatatatattcaataataatcagcacattgtctacaaaaaaaactttcaacccttataacaaaaagtcaaaaaatatagattgtaatgcaacatttcatgtttttcatataatattccaacattgccacataatattctaaactatatgatataataattaatcaaagttatttattttacgaaacaaaatataattatatcgaggaactaaaacaattatgtttttaaaaggagcttaaaaatgaaatacgaaaaaatattcctatcaatcacttttttattaacttactttataagtataatacttttaccaaaaggttttatcggcgccttaactattataatggttattccagctttcgctgctataatttccatattgatggaatcaaggtcattaaaagtattactaaatccctttacttacaaaatcacattgaagggcttaattttcgctattgcatttccattaattgtgatctttctatgcgggtcatctgcatatttaactaaacaaggtgtattatcagaaaatatatcgtacatatttctcgatgctataaagattactttgatctctttaacactttttatagcaggattatttgaagagtatggttggagaggttaccttttacctcgattcttaaaaagatacagtattaaaagaactaattttataatgggtattatttggtcattatactatgttcccgcattctttattctaaatatgcattttggtttacctaaagacgttacatatgtagttttgcaatgtgcagctatttttgcgttaaactactcctttacttatctttatacaatgtcaccaaatgtacttctaccaagtataatgcacatattatggaataatataaacatagccacacttggctactcttataataatgtttcttatggatttgttgttggcaatgtaaaaattattaatggggaaggattattagggttgatttttttaagcttatttgctatttacgctcacagaaaattttccaatcatccgagtttaaatatatagatatctaaaattagcttattcatagtatatcactcaaaaaacagtataactccatactataatatcattacagactatcgcatatatggtttcgttctttaaaactctatcctaatatttctagttttaaatctaattttcttaaagaattaaagataggcggagccacgctctacctatctttaattttgtttttcagattattatgtttgaattgttttgcttatgtctacattatcatattataacaaaataatccatattttcttatacatttgtaaaatctcacaaaaataaggaaccttcaacaattttaatataaaagtcgtttctagagcttctttgaataaaacaaactagcttaactcgttatatcatttaaactaattaaatgcttttaaaaccaaagttgcattgtgtcctccgaaaccaaatgaattactcaaagcataattaaattcgaaattctttccttcattaggtacatagtttaaatcacaatccggatcttgatttttgtaatttattgttggagggatgaatccttctcttagcgcacatgctgttataatcgcctctatagcacccgaagcccccaaaagatgacccgtcattgattttgttgagcttatagcaagctcatacgcatgtttcccaaaaacagattttacagccatagtttcatttttgtcatttgcttttgttgatgttccatgagcgtttatatattctatatcagaaggtgtaatctttgcatcttcaagggcaattttcatacatcttgcagctccctccccttcttcagccggagcagttatatggaatgcatcattagtacatccatatccaactatttcggcaattatattagctcctctatttaaagcatgctcatattcttcaagtataagcacacctgaaccttctccaagtacaaatccatttctttctgaatcaaacggcctagatgcagtagccggatcatgatttgttgtcatagctttaattgcacaaaaaccagataaagttagtttcgttacacatgcctctgctccaccagcaatcattatatctgcatcatttctttgaattactttgaatgcgttcccaactgcatttgttgaagttgcacacgctgtaacagtacattcattataacctttagctccaaattttatagcaacgagtcctgaagccatattagctatcatcattggtaccaaaaatggactcactcttcgaggacctctctctttcaattcatcatactgactttctagggttccaattcctcctatgccgctgccaattattacccccatacgttctttatttattttttccaaattaagcgctgaatcttccacggccatttgagctgatgccagagcaaattgcgcaaatctatccattcttttaacttcttttttatcgacaaatctacttggatcaaaatcttttacttgagatgcaactttagtaggtagatcagaaacatctattccctcaatcatactaattccagactttccagcctttattgacttccaaagctcatctgctccaattccaagtgatgtaactgctccaatccctgtaataactactcttctactcatacttaacctcctactttctgtaaccaatacagcataattctttctaatttacaaagtatttactttataacttttaatcgatataataaatctaaacaatttaatatcgtctttcaatatgattttatatgtaaattgttaattaaaatgaacagatattgcttttttaatgtctgatatatttccaaaataaataaattaatatatttaattttgttcagcatcaaatatattatataaaattattaccttattatctttcgtttatctcaataactattttttttagaaaaggtgtttaaaatatgaaagacttaaaagaaactattattgaaactgtagattatattgaaaataacctctataataagatttctttggctgatatctcactacatacagggctatcaaaatattacctacacagaatctttaaatctttaaccggcgaatctattatggaatatgttcaaggtcgaaaattaacatctagccttaatgaattaattaatacaactatgcgaattattgatattgctcttgagtacggttttgattatgaacaatcctatattagagcatttaaaaaatgttttggacatacacctcttaaaatcagatctgataaaatttctttgagtttaatacttaaagaaaaaattaattgtaacgatatcttatccataggtaattctattacatataatcctcaatttgtctttaaacaaaaattcaatttgattgggataaagcataagatattaagtaaatctggtgataaaagcgcaaattcatatggccgagatttcttctataatcataagcataaaattaataatttgataaacccacacgaatactttggttttacagattggggtagtgatgacttcatatattacattccaagtgtccaagtttccgatataaatactatacctgaaggaatgattagtatttctataccggctcataaatatgtagtgtttcgttttgttggtttctttcgccctgacgatcttaacggaagacatttaggccgtttattagttcagttatatagaaaatggatttttaaatctggctataaatttgctgccaccttcaggtttgaatatatagacaattcaagatccaaagacaattactgtgaactatacgtatatcagccaatagaagatctaaaaagagaaaactagactcgcatttactaatttaaattaataaatacgagtctagttttcttagcttctgaatatcatatattaacaatataattaacttttataattataattgaaaaattataagggagcaattttatggtattatttttgttattagtttgtggattttgttggtcgattgtttatataaaattaattcatttaggttttagatataaagcttgcggaattccatttattgcattagctcttaattttgcttgggaaagtgtcaattcttatttcgatttaaaaggtaatgtattaaatattacaacttatatcactttaatttggctatgcttagacattttagtcatcttaacttacctattatatgggaagcgctatttcccaaaacatacaaataaagaatacttctggccatggactttgattatatttataatgtcttttgttatccaatatttctttatcatagaattgggtgatttagctaaattctattccgcttttattcaaaacctcataatgtctatatcattcataataatgtttgtcggtagacccgatataaaggggcaaagtttaactatagctattaataagtgtattggtaccttagcagctacaatctcatctagcattattttgcatagcggattaatcattactttaggaattttctgttttatatttgatactgcatatatatactttttaagtcatataaaacgattgcattctgattttcttaaatcatctgcaaaaataatttctaaatcataatttaataaaagataaaggcaacattagcggtgtctttatctttcattaaatatatgttaaattagtaatactaaaatgtaaaacctcaattacaatatgcataattttattagcaatttattgctgtaatataaaacgattctaatatataaatttatgcaccttgttcctttaacctctttcacaaaataaattctaatttactaccaaattttcattctatcttctggtttaacatacatcttatcattctctttaattccatatgttttatagaattcatcaaattgtgctaatactatattgtctctaactttatttggtgaatgcacatcatattgaagcttataatcttcatattcttttgtgccaatttcacgccacatagtagcattactttcaaagaaggccttgtaatctgggttaggcattttctttaaaatatctaaagcacaagccactccaccgatatcagctatattttctcccacagtaagatctccatttacatttttaccatcatctactttgacagtattgtaaaattgtctaactttattagtcttttcttcaaactttttataatcgtctgtactccaccaattatttaaatttccatctgcatcaaatttcgctccagtattatcaaatgcatgacttatttcatgacctataattgttcctattgcacctaagtttttttccttactagaatttacatcataaaactcaccttgtaatattccagctggaactgttatggtattggctgatggattgtaaaaggcattaattgtttgtggtgtgcatgcaaatcttgatttatcaacaggttgatttagcttgcttatagacttttcataagcgaacttacctaagttctgaatattttcccaaagagatccaccgttttcatatgatcttatttctaactttgaataatctccccatttatctggatatccgatttgtacattgagtttgtctaatttttcaatggctctttccttagtagcaccactcatccaatcaagattatttattctctttttataagtttctatcatttcattagtcatatctttaacattttctttaactttatctgagaaatatttttcaatataaattttaccaaaaggctcacctaatgctgaattaaccatcccaatagctttttcatctctagaaatatctccttgtgcgcctaaaagcgcgtttttaaagtcatttgcagccttttcaaaattttctcccaaatactgtgacgctccagttatatttgtaacttcaatataatcttttatcatttgcaagttttcttgtttgtatacatcatttaaggcctgaaaccattttggttgtgtcaaaattattttatttgcattatctactttaaaatttttcataattgtctttattcttaggtttggtgccaaagaatcaagctgatctagagtatatacattatactcttcatctatagcattattattttttgatgtttcttctttcccctttattgatgatgctattgtactttcaaatttaaacaagttgtccactttacttttagcttcttcctttgtatacccacttaatgttaaaactgtattataataattttctgtcaagcttttaattcttgaactattttctgttggctttacatattcatctgaatcccctaaactaagaggtgttggttctatataaagagcattttttgttgcatcttttaaatctacagaacaagaaaattctattaaaggactttcaacttttgattcaggtgtcaatgccgaaagatcatctattgttttaatatttctcaattcttccaacatttcttttatcggttcaattccttgcttattccttgcatcaatatttaaagtatttttgtataaattaattatcttcttttcatcactattctgtgcgtaatttttttcattagctaacaaatcatttattatttgctttttctgttctgttaacaccttgttagtttccataaatgttgaattagatgttttaccaatatcaattttagctgtatttaaccattctctattcactgctgaataaaaatcatcttgcattcttaatgaactaggaacgattgtactatttatatcagctgattctgctgcttttgcataagttccctgacacaataaaaatgaaaatattaatgtacttgctacgactccttttatttttaatttccccatctaaaatccctcttctcttattttgataattttgccaattcacaataattatacatcttatttatttttttacaattctaaaaaacttaatttaaccttaaataaatttatatatttaattcctgagaaaaggatgggatacagatctgggtatgaagacttctatacctctgccttattgaacatatgtaagaaaaatttagcagacgaataaaaaacagcactcagatatatagaaatatctaaaagcactgttttaaattattcacttaaatttttaattaatacttgatttattctttttctatcgcattttaaaattataaattcatacttatcataatttatcttttctttaggttttggatatgacttcaattgagagtaaatccatccaccaatagtatcaatattttcagcttcaatattagtatctaagagttcgttgatatctccgattaaaactttaccatcaactacatagctaccattatcagtctctcttatttcctcttctccgtcatcatcaaattcatcttgaatttcaccaacaatttcttctaaaatatcttcggtagtcacaagccctgctgtaccaccaaactcatctataattattgccatttgagctttttcctttttaaaagttttaaacaattcactaattgataatgattcaggaacaaatttaatttctctaataattccttctatgttatcactgccttcaaatttaagtttgtataagtccttaatatgtatgaatccaattacattatctttactatctctacatacaggatatctagtcagttgttcttctaaagcataatttataatttcatcaaaagtatcttcaataaaaatacatgccatatcagtacgcggtatcataatatctcttactgttttttctgaaaagtcaaatatgttatctacaaaagttaactctgtttgatctattaatccatgtttatagctatcttcaactaaaagctttatttcttcatccgtatgagctgcttcttgttcatcaatttgtgaaattccaaatatctttaaaaccaaattagtactatggttaaaagtccacattatcggataagtcaatctataaaaagctataagcggcaaagctgtatacattgctatattttccgtatttataatcgccaatgatttaggcgccaattcgccaagtacgatatgaagaccagttataattgaaaatcctaaaatcaccgaaattgaatgcaatgttatttccggcaaattaaatagatttattaaaggtcttaacatctctgcaaatgcaggctctccaacccaaccaagtcctaatgatgctaatgttattcctaattgacatgcagataaatatgagttcaaatccttaacaacttttaatgtatgcttcgcatttctgttcccttccattgccaatgtttctatccttgactttcttacctttaccattgcaaattctgttgctacaaaaaaaccattcataaatacaagcaaaattacaataataacatttaatattataatcatatattgatagtttccctcccaagttattgtatgtatactactatataatactattttaaatattaattaacattatagcatatattgtttaataagttagagtataaacaattaataattcattttattttatattctccattctccaattaattaaaccctactatttttcttaataaaacaaaatctgtatacacttatgaggaataactttttatcaagtttgtccatttaagttcatttttatctactctttatctatactttcaacatctgttttcatagcttcaactatatagatatccaacttctgactcaactttaaaattttattatagtccagcctttcactaattattttatttaattcatcccttaattcttcaatttctttctttttatccataccccacctccaataaaataccttttagctatatattgtatttaataccattagcaattacattatataacaaatattgtttactaccaggaaactttcgacttttttcgaaagctatataatgaggtgataagtatgttaaagagaaaacgaagagaattaaatttaactcagtcgaaattggcaaaaaaattgggaatcagcaaaagttatttatctaagttagaaaaacacccctccctttgcaatcccaatattaatttcattttaaaattatcgaaagaattaaacctagatcctacagaaatttttttatattttatagaaagtaaaaattcttttatcaaataaaaattatataactattattatatacatttcttacagagcatatctaataaattgcattaacaaaattgagtatattttttttactaaaagacaacctaaaactattaattatattgagaatctggaggcttcaaatgaaggtattaaaaaaaataataattttcactgctatattaacattatttatcgtcacatcattaaatatagtaaaaaataatatatatgcaaacgcacaaattaaatcagaaaaaactattaaaatagtagtacttctatcttcatttaatgatgcttatatttctttgattaaagataacttagaaagaatccaaaaagaaaacgctaacaatgtagaatttatatttcttgacgggaagaataatacagacatacaaaacgaacttataacttcaacactttcaacagattttgatcttttattagcaaacttagttaatttagatgcaaataatatagactcctttattaacaaggtaaaatccaaaaatattcctgtaattctatttaatatagttccatttgtaacaacttcaataaaatcttatcctaaggctcttgtaatagcaacatcagctgaacaatctggaattttacaaggaaatttaatcgttaatgcatggaaaagcaataaagcagctatggataaaaataaggataatattcttcaatatattatgctaacagacaaaaacaacaacacactaactactgcaagaacaaggtattctatatcaacaattaatgacgccggaataaaaacagaagaactttccagaatatcttcagagggaactaaagaagctgctcaaatgatcatggaatcaacatttctaaagtatggtgataaaattgaagctataattgcaaataatgatactttggctataggagccattaatgccttgcagaaatatggttataatataggtaacaaatcaataccagttgttggcgctgatgcaataccagaggctagagaattaattaaaaaaggttcgatgctaggtactgttatccaagatccatctgcgatggcagaaacactttataaagttggaatgaatttaatttctaatagcccaccccttagtaatacaaactataagttcaacgaaaccggatttgtagtagaaatgccttacagcgaatataaacaatgaatagatttgaaattattaatacactcattcatatgatattaagagtagccaaatggctactcttaaataagttataaatttattatttctcacttttattagtagttgtttctatttcatttaaatccaaattactacttgaagtaagtagtgattcaaatttccttaattcactttttagtttctcattttcttcttgtaacttagaattaatatcattcaattccttaattacttttgcattgccaaatgtaaaatctttgcctagatttaaattctcaagtatattttgttttaattcctcaatatcctctttttttaattccggaaatttagatattaacgtattatcaaacttatctatttttaatttcagaacattctcaattgtacttgaaattccaaaatcctcatcaatcatatcccaaatttctcgtgcttttgaaatataatctggatgttttgataattcctcctccaatccagatttattaaatctgctagtaaggattttctccatcggctttaaaattgcttttaacattatatacttccttcaatattattttataacacatattatgagatagcgaccttaaaatccacttttcttatggcaatataatataaataatttttagtgaatgttaaatcaaaatttcttataaactataccacgacattattattaaggcaaaaaaagatgcggcctaacttagccgcatctatatttataagagattatgagattattaaggttttatataatttgagacatactcttttgtacacttatatattaacataatccgacaaaatattctattgtttttattatatttttataaatttaatatttaagtataatagataacgattttgcagaatatatttaatgcattaatctctattcctctaattaacttaattaaagacgcagccagtattttattggctgcgtttaaaaaattataactgcattaaagcgaggtataaataaatgaaaataaaaaacttcttagcaactctcttaatattttttatctttactataagcaatgctaatgcaacgattccaatagcaaatacttacaaacaaggtatatataaaatttctgaaagcagcaaagaaaattatactgcaaaacttataagtcctaataacattacaagtttaattattatagatcctgatggagatataaaattttttaagagattcgatacagtcaatgaaacgattaacttaggtcctatggttaaaggtgatatagtatcaataataggtactggagaaatagctgctaattttataagcataaattaaaaccactctctcgagtggttttcttacattattttagcattccaaaatctttaaaaggataaaatataaactgagcctttccttctattttagagctatctatatagtgttctttccaataccttgcatctaatgatacaggtctattatctcctaagaaaaaatactttccttctggtacttcaaatgctccattataatcatccttatttttcacataatcttcttccaatttttccccatttacaaatactatcccattctttatatctatcttatcgcctggcaaacctattaatctctttactaaagtttctttgagttcatccgaataaaatacaattacgtttcctctttttagattatcaaagttatgtattcttgttactaaaattttatcatttaaatttatagttggaatcattgatcctgttggcacatatacattaaaaaatacaaactgtcttagtaaaaacgctattactaaagcacaaaatattggtactatccaatctttaataaaattacttttcttcttatctttttcttctattttagtactttcttccaaagcatatcatccttcctagattataattaatatttctgcttttactatatatacaaattaatttagtaaccatttatttaacttaccaataaaataagaattagtcaagtttacttatgttatattaatcatcttaaaagaaaatataaggtactattctaaacaatatatattctttagaatttgtaaccttataaaaaagtataatttctatatcatattaccatcttcaacttaaaatcaaaatttcactcactgatactcacttatctcacttatctcttataaatattactgttcaatgaattttgttagttcttcattaaatttttctttttcatcgtagaataatccatgtccactattagcaaatggtataattctagaattcttaatgatttgcttttgagcttcagccaaagcaaataaacaaacttgatcatgaatgccatgaagaatcaatgttggaacattaattttttctaaatcagaaaataaactttcttcacctaaccaagtattagcaacttctgctgtagcccagcctgctgcctgcaatccaagctgaaagaaccaatttgaaaaactctctgtaatatgcttatagaaaaaaatatctccaaaatctctaagcattttaagtcgatcagtatatgttccttcaattatatcagtaacagcttgtttctgtaacccatggggaaaataagatcttttaataaggcttggtgctgccgctgcacaaagaactaacttagaaactttatcattatcatatcttgacatatatctaatagcgattgctccacctgtagagtgacctagcaatgtaaagttttttaaattaagtacttccacaactcttctaacatcatccgctaatctatcgtagtcatatcccctatatggtttatctgattcgccaaaccctctttgatctatcccaatacacctatatcccattttaggaaggatatcgaactggtattcaaataatttatgacttcctggccaaccatgtaaaaatacaattgtatttcttccttcttcattaatatcttctacataaactttaacatctggttctactttaatatagtaacccatgcaaattgcctccatcaataaactttctttctaaaaacagcttattcttttacagcaaataggtgaattactactattaagtttctaaacctaatagtaacatgcaatttgattaaaatagatatttatgatttattcatatgtgtatttctcatatatcgcttacgccttctataaaaacctctccatcattctttctcactatttcaatgaaaactgccgaaatttcaggatcaaattgtgtcccgctgcatttttcaagttcctctgctgcttcctcataagtttttctagtattatatggtctatttgatgtcatcgcatcgaaactatccacaactgtcagaattcttgctaagtaaggtatttccttgccctttaatttattaggatatccgtttccatcatatctttcatgatgacttataattaaaggtatgatatctttaagtgattctacagactttatgatttcaactccattagcaggatgttgctttaataattcccattcttcatctgttagtctcatctttttcattaatacttctttattaatgttaatcttgccaatatcatgcatgtaggcaccataaattaaaatttctttttctcttttgcttaatttgagtttatctgcaatcattctactatacactacaactctttctacatggccataagtatacctatctttagcattaatgacactaatcaaagtttttatcgaagcgacaagttcaatatctttttcatctatatttcttttgatttcatctaaaattgaggtatacgcctcaaccctattcttattgaaaaattttgctctatacaaagcatcatctgcactttttattaattctatatcatttctcgctttatttggataaactgatacccccatagaaactgtaactttccctttaggctgactttcttccccgtcaaaatgtgtacactctattttttttcttaaattttctgccatctgcattgcttcttcctcatttgcatctggcagtattatcgcaaattcttcgcccccatatcttgctgcaatgccttcttcccctaaattacttctaataatttcaccaatttttctaaggacgtaatcacctttttgatgaccatgagtatcgttatattgcttaaaataatctatatctataaaaatcatggatacaggtttgctattcctatctccattcttaactttctctgctaatgagtcacagaaatatctatgattataaagttcagtaagtccatcaatatttattaactcttctaactttttaatatattctgcttctatctttacatagaatcccaagggccatgcagtcaaaataaatactcctgctaagattaaatcattttcaaaatatgtatttacgattgcattaggctccataaatacatccatcgctaaaataattagagatgaaatacaggaaactataataccttgtttcattccatattgaatcgttgttgttattattataaacaaatacaaaaatttatattggctttcatttactccacatataaatataattatcgaaaacactattataaatgctgctatttcgattttattgataatgtctacatatcttttattaaatctatatttagtcgaaaaaatccatattaaataaatcaaaacagataccattaatggtataaataaacatattactgtataatacatttcaggtacccaaaccggcaaattattatttataaaattttgaaataatattatacctataagtaagagtatagatattttcactacagatactatatcatttatttgtttttgtttattattccttacatttttcatactatctatccctcatactagtcgcgatgagaccaatgcattggtctcatcgttgaattaatcttctcttaagcattttggctcttctggctgataatgtccccaataacaagctgaagttgccattattgaagcaataacagttgctactgttgctatactcattaaaattctatttttcattagtctcacctccctaaaatctaaaaaataaaatctctataatttagcctaattttcccaatacaaaatgtccacttttagttaaagaaaaaacctgccataataaccccatgtaaatacatagcgaatagttcaataatctaaaatcccccacattcatatagaacaaaacattacttattacaataattaaatatatatttaatatattaatagagatttttctaaaccttattctcttttcaatacttttaataggttttaccaaactatctacaggtgccaacttattcacaatataatatgaccatgcaaatataattcctccactcaatacagttacattaagactgatgttaatatatttacatattagcgctatacagatgcttgaggccgtacctacgacagcacatcgttcaggagaccctgaatgggccccccctgaactttttcttaataaactcatagtaaatgatactatgagtgcttcaatagtcacattaaaaatcaatccaaacaccataactaaagctatagaaattcccatatgaataaatgcaaatatcccataatttattactgattttttatcatcatcaaaatttaattctttggcaatataattagaaattttagtacatatactttctatctttaacattttctaaacattcttctttcttaaataataaattatagaaattacagcaaagcatataagcgacggtaatccacctaatatctttgttactacatttgacatcgctacacctaactcatccttgaaaataaaacttaatagtaacatatttagtccttcaataataaataaaactatagttgttatcaatgatgattttatagacaaagccatatctgctttatttatactccacataataataatcattacaaatatatcaagtatggttggcactccataatttataggcagaagtcgtattccatattcgcatactgctaatagtaaactcgaaattatatatctttttgcattgagtcttacattagataacgctatcattgctagtatcaatacaaatgcttctggaattaacctaaatataaattcaaatactgttaatcttaacattttcttttctcctttgattatgaattttccttaatgcactataaatcactataaacacaaatactcttataagtacatcccctacgctaaggatagtgtatcctaagtctataaagtcagttaagatctttaatttagtttgtgaatctcctaatatatgaatatcattcgttccttgaaaattttctaatgtacgacctgtaaagtgcgataatgattgataaaccggcataaatcccgcattagcttttattgcaatatcatttaatacgccgcctaaaatcataaaaaccgatccaattatcgaacttttgtataattcatattttaatatcagtaacaaatatgtaattaaatagatagatgttaatccccctatagttcttataagcacataattgcccaaaaaagtagcaacttgtccaataaacgtaagtatttcaaatccaattagaggataaatagtccatgatttaaacaacggacttattttatatcctctaaattttgctaaaaagaatgcaagtagtactgtttctggcatattacctccgtgattagatttactatttgaatttttatataataattttgtcctaataaaactaataattataaattattatgcatattaatatatattataatacctattttgtacagtttctatatctttgcctacaaaaggataaatttaatatattagttataaaattgctaagacaaacactgcctatataagcttacattaagtttagattaagttctactcatattaaattttctttttaaatatacctattctcatatctatagttataactaaggattcataatcttccaacttctctttattctcaggtgtagacttccaataatgaggtgtcatctttaataagctcaataattcttctttatttaatgttatatcaaatgttacattagcttcttctatataatcattttcttctgcatttgctttataaactttatcatttaaatggacctcagaataaataatattcctaagttgtattaaatgattagttctaggtaaaactctaacaaatattccatcatcttttaaaactctattacactcatcaatatctataggactaaatactgaaataatacaatccactgttttatccccaagtggtatattaaaattgtttccgaccgcccaaacgcaatctttgtttagtttacttgcatattttacagcctctttagaaacatctaagccataataattagcttcaatatttttcttattcatataatcttttaggtttgtcaagtaatacccttcgccacatcctagatctacaatattcaatttgttgctaattttatctgacatcccattaactattatttcatttattttatcagacagtgctttatagtatcctctagataaaaaatctattcttgataaaaccatttcttttgaatcaccaggattcttacttcttttctgattgcttattaacaaatttacatacccttcttttgctatatcatatgtatgtttgttactacatctgtacatcttatttgaaatatccttgactaacttctccttacaaacagggcaaagtagcagggtctcatctaaaatattattcataaacttacaactctctttccatatattatgtattatattttaattgctaaaatcaacatctaaagtaaaaatcttcattagtaatcagtgtttttagactactgtatacttcttctatttctcttggtatatcaacatggactataaatccttttccattaggtccatacccattttcgttatctcttaatcttggtatctctcccattaaaagttccaaatatcttttatcatcccaaatcccattaattccagtattacttaattttaaattcatatcaatcttaggaataaatggagcatagtttattagcttaacattgtcactacatgtatacttagaaaatgaagcaaaagttctaagttgcatagtagggtcctgaattataatcaaagatttatattctatatttaatttgcgtaataattctatggtctttttagcattatctccacaattcgtagatttattttctataataattttatctgagttaacaccataaattttagtcattatatcaaaaaatatgtcagcttccggcctaccatctacttcaatcaaattaaactctgaatttctccttatttcatctcttagtatttgggtaggatgtccaatccccccactaattaaaatcttatcacatatatcattcttccatgcattcacagcacactgtactgtataagggatagaattgcctaataagactaatatatcaactttttttaatccaaattttctttctagttccttaggatttaacgcgctgatatctctaactgctaaaaattcagatatcttattaatacaatattggatttcttcactattcattgttatttcctcctactaaaagcacataataaaaaaattacttccgatatgaattaataaattataacatatttcttccactaactttacctatctattttaccataatattatctttatgttatttatatcatcgttagtaaacgctaatataataatcattaattggataagcactataaaagcataaatatatattatgaaattaaagtttagcaaaaaacacacttataaattcattaagaattctataataaaaacttaactataaagtaaaatatttaaaaaaaataagatagactagccttttaggaatagtctatcttatccgtgggtataaatgggagagggtttctatcttttgtataactatatattagcacatttcaacaataaacgccatatattttaatatatttcctatttatttttcgacatttattctcctttatccagctaatgccttcgtctcttttttgtattattatttctaaattcattagatctatcaatataactggtatgaagcaaagattctgcttttatactattagggtcccctatatagctcttatacatattttcaagattttcattttcgtctgacactctttttattgattttttatcaatattccttagaatatctgctctcaatattttataatcttttcctaacaactcatttgaggatttattataacattttacctgtacagctttagctctgcagacgttattacataatttacagccaacacactcttcttctttaacctctgcccttcctctaacattatattgtatcgcattgacagggcaattttgtatacaagtaccacacgatatacatagattttcattaatttgagactttgcacctattctaggagtacctcctccatttatgcaccctccgttacatgcaactacttcaatgaaataatattccttccatttgttactgattaaaaatttttcgatttcctttagaccatttaccactgcaactttacaatttttatttcctaaaataaccgatgcttcctctatttcctcatatccttctactggttttaatattatattttcagcctcagacatatcgttctttaaataactcattactgttctaaaaattgcttgcattgctccttgactcataccaaaaagagctgctgctccagtatattcccccataaaatcatctggtttttcgtctggtatagcagttatatctatgcctttctcttttaagagatttgcatattcttttacagttaggacaatatcaatatctttgtaaccatctctccccatatcctctttatcagcctcatattttttagcactacatggttgtacagatacaacaactatattggtaggcaaaatattataaacatctgcaaaatatgtttttattcctgctcccatcatctgctgaggagatttcgctgtagatatattatccaatatttctggatgatatatttcagcgtaacgtatgaaagaaggacagaaagacgtaaacataggaagtttttctttattagcaattcttttaatgaattcactactttcctctacaactgtcatatcattcccaaattcagtattaaatactttttgaaaacctaatttctttgcagatggagctattttccctccaacgtaagtacctattggaagattaaattcttctcctagtattgctttgactgctggagaggccgttaaaattaaatatttcccactgcttaaggcttctttaactaaatctacgtcatttcttacatcaatcgcttctgttgggcaggcaagtgtacattgtccacaatatagacatccagaagccccaaatcctccacttttagtatccacggttttccttcccgaatctacttcctttaatatcgccatcttagtttcttgagcacacgtaaaagcacatgcagtacatccaatacattttttcttgtttatttgtataatattatcctcttcaattctattggttttctttgactttcccataaatttctccatattattcatttctatagttataattactttttatcttcttttattattactatatctagtttattaattatttaaatttttcataacaactgaaaactatcatttaaaaataaacataaaatcttaactctgatcgttgcttaaatatttaatgagcaaaaaaagacaggatttaaataaaatgttgctatataatatagaaaaagattaaatgaggtgagtgccttacatgaattatgatgcttgtataaaaaagtccattgaatatatagaaaataacctaaataagaaaatagagctaaaggaacttgcagacaaagcctttttatcccaataccactttcatagggtttttcattcagttgttggagaacctgttgctgaatatatccgtaagaaaagattagagaaagctgcaaatgaactattgactacagaaaataagattatagatatagcgctaaaatatcaatttagtaatcaagagtcatttaccagggcttttaaaaagctttatggaatcccccctaaggaatttaggaaaaacaaaataaatttaacaacaatacattcaagaaagaattctacaacttacctttctatggttgcttagaattcatcaaaaatattttttaaggagtgaatcttatgagctatgtaccaatggttattgaacaaacaagtcgaggcgaacgttcctatgatatctattctagattgctaaaggaaagaatcattatgctaagcgatcaagtcagcgattctaccgcaagtataattacttcacaattactatttcttgaatcagaaaatccagatgctgatattcacttttatataaatagccccggtggttctattacagccggaatggcaatatatgatacaatgcaatatataaagcctgacgtatcaacaatatgtttaggattagctgcaagtatgggctcgtttttacttgcagcaggcgcacctggaaaaagatatgctcttccaaatagtgagattctaatccatcagccatctgtacatggaggttttcaaggtcaagctacagatattaggattcatactgaatggctgctaaaaacaaaaagtaaactaaataaaatatatagtgaaaaaaccaaaaagccaatagaggaaatcgaaagagacatggaacgagattattttatgtctgctgaagaggctttatcttatggaataatagataaaattctttgataaatataaattattattataaatatattaaaaaggttcaaaaatttttgaatcttttttattatgtttatattattcacatcttcattggctataatataaatagtattcttattcttaaccaaaaagcaggtgaaagtatgtattatgtaatatatgatttagaatttaatcaaaaaaatagtgcctctgaaaattcggatgttattaaactttcagaatctaataacgatactaacacaccaattattccttttgaaataattcaaattggcgctataaaactagataataattttcaagaagtatctacattcaattccttagtcaaaccaactctatataaaaccatccatccatatgttgagaatttaactaaaataacctacgataaagtttcttcttgcaaaaactttattaatgttcataaagcttttttagaattcattggaaatgatgatgtactactctgtgtatggggagttggggatattaaagaactctatagaaacttgggattttataatctatctacttcatatatttcaaaatatattgacattcagaagtatgcttcaaaataccttaaagcacctaaaaattctagaattggtttaagaaatgccgttgaaattttaaatataccagtttatggtgaattccatgatgcacttaatgatgcttactatacatctgaaatttttaagcgcatttataacaaatacatgaaacctgaaacttacgttccttcgccatcaaaaagaaatacagaacccaaagaaataattgatactgaagctttattaaaacaatttgaaaaaatgtataatagagaacttactaaagatgaaaaatcaatgattaaagttgcatacatgatgggaaaaaccaaacaatttctgaaataaatgcagctagtagaaaaccttttttaatttaatatagaaaggatactctattactaatttttagagtatccgtgaattcataaatcgtaatattatagaccttttattttatatttatacaatggtcttccaatctttccatactctatgattttctctagttcgccttgtttgctcatataatcaaggtatttccttacagtaacttttgcaatgcctaacttttctgataagtcttcagtagtaaaatactcttctttagtattattaagctcattagcaattgaattataagtatacttattcaaacccttttctagatttggttttgtttcactaccgtttgttttcttatttttattactcaaaataaacttatctaaatcactttgttccatagtctggttatttttaaagctatttaatctttctctaaaaatatttagagattcgttaaacctttcaaatgtaaagggttttatcaaatagtctacaacaccatatctaaaagcatcctttactctttctacactcttatcagcagtaattaatataacatcagataatatttcattttgccttaaccactttagcaaatctatgccattttcattaggaagaaaaatatctaataaaattaaatccacctgcttctgcatcaaaaattcttttgcttcagaaaggtttgcaactgctttttccagtgaaaatccctctatttttttcaaaaacttagaattaatttgtcttaccatcggatcatcttcaacaatcatagttttaatcatatattcaactcctcctcataggtatagatatatcccattcagtaccatcatcaactttaaatttaatagctcctttagcttcatcaatgatctttttcactatatacattccaaatcctcgttccccttctttacttgtgattccaatgttgtaaatagaatttctgatattctctggtatcccacagccattatccttcaccataattttcatttgatcatcttcctcaaagattttcatatatatttcaccagacccatcatttttaactgcatcaatagaattttctattagatttcctacaacagatcctaactcttctgatgtcatatattgtggtaatttaattactcttgagctatcatctattatgaaattgattctagcttcttcacacttactgtatttagatagtattaacgctgctaaagatacattttttattttatcagatattatagtagttatattctttttactttccactattacattaacaaacttaattacttcatcatattcttctagttgtataagtcctgagattgtgtgaagtttattcataaattcatgattttgtgctctaagtgaccatgccattttctttataccagttaactcctcagccatttttctaacttcacttaaatcttcaaatgttacaactaatccaagaatttgttttttaaatcctcttataatactgtatttacacataacgtttactccagggcgtacttttatctcaatattagtcatagatttccctctgtttaaaacttttagagccatactttcgtaagtaaaatcagtaatcggcttccctatatcattttctttcaaatgtaaaattttactagcttgcccgttaaatagcgttatgcatccattattatctaaagctattataccttcctttatattttcaattacagtttctttttgctttaaagccaaggctatttcttctggttcaagtccaaatattgacttctttatattataagaaagagctatagctcccgatatacccaatattaatcccattaatattataggaataaatttatacattttcgtatagacttcgttatcaaatttattatacaacataccaacagcaactgcacctatctgcttattactatcatcataaataggtgcaaatgctcttacagaaataccaagtgtaccgcttcctgttgatatatattgctctcctgtgcttaataccctatcttcatctccaccagcaaatctttcgcctattttacttttatctgggtgagaatatcttataccattcatatccataattactataaactctacatttgtctttatacgggccttctctatctcactatttaacagatcaatcggaattgccttatttcctttcaaatattctttaacttcataggttgatgcaaatgaatccgctatattcaacatatttttgtctatttgatctcttaataactttttcatttcgataaaagaaagtattgttatacttccaattgaaattacaaggatagctattacaagagatattatttttccttttagcttcattttatcccctctatctaattctaaattttagtttacttacattatatataaataattccttattaccaaatagtacaacttctttagtaatacgtttacttactgtttgtcaaagcaatttcccacaaaaagttaagagcgtatccctaggaatccgctcttaattcatgatttattaaagccagtaaacaatactcaataattatagtaatgctaaacgctatctttccaaatactttctaatctttagtatatatagaagtctatttatattctttaacttcttcttgtccgtttaaaactcttagtgcaccttgagctaaagcaagcatttcatcttcacctggataaacagttattggagcaataaattccactttttcttttatgatgtctaccatcattttttcgtaggcaatgcctccagttaaaattatcgcatctacttttccgcataaaaccgcagctgctgcacctatatcttttgctacttgatatcccatggcttcataaactaactttgccttcatgtctccttctgatgcaagctgtctaactattctcccatcgtttgtatcaagatatgctacaaagccgccttttccagttatcttcttcaatatttcttctaaagtatattttccgctaaaacacattctagctaaatcaccagatggtataccaccacttctttctggtgaaaatgcgcattctccatcaagagcattatttacatcaattattcttccatttttatgtgctcctaccgaaacaccgcctcccatatgagcaactataacatttatatcttcatagttcttcatattttcttgcgcatacctcttagccactgccttttgatttaatgcatgaaatatactttttcttggaagttctggcactcctgaaagtcttgctatatcttccatttcatctacaactactggatctactataaaagcaggtttattaatagacctcgcaatttcattggcaattatagcaccaagattagatgcatgctctccttgaacattttcttttaaatcttttaacatattatcgtttacactgtaggtaccactaactataggctttaaaaggccacctcttccaactattgcatccatttcagttatatttattttattgtcttctagtatttttaatataacatctgttctaaagctttgttgatcaactacgtacttaaactttcctatctcttctgatgaatgtctaagtgtttcctcaaaaacttccttttcaccttcatatactgctattttagttgatgtggaacctgggtttataattaataatttatgactcacacattttcctcccctacgttatatttaattatagtatttgcatctattgttattattatcaacacagatacaaaacctgtttttaaattatactctgtaggtatcagctttagcaagtatttttcaatattaaaattaattttattaattcatactatagctcttaacccaatactaataattatttattgtactactgcttctctactcaatttcttttctttatttgctctaagcattttaaacacataagaaacaatgaatggacaaataatagcagatactacgcatgccgctgcaacttgtgctgttgctattgttgctattgcagccaatgttggatctgccgctgcaacagctgctggtgtggctacggcatttcctgctgttgatcctgttgcaagtccaattataggttcttctctaaataattttaaaagtatatatgctcctattccagtaaaggcagctatcactcctaataatataccaggacctccagcttttacaattgtatcaagattcattcctgcacctaatgggaatgagaagaatggaattaataacaacttactgcttccaagaaactttctcatatcagggtcggcgtttcctaaaatcattcctattcctattggaattaacactgcaacaagcgacataaatggaatttgagcaagccctgatgcacctaatgcaaccaaagtgaaaaatggaccatcttttaaagataataaagcataagcacctacatctgtttcatccccatattgcgaagctagagatgcatataacccaccgttgcaatttgttagtgctgaaagaatcgctagtggtgataaacctaatacaccagctggtccaaaaacttttcctacaattataccgataccagcacccactataaattttccagatattaatagcgcacctttttttagtgctttaggtgctaatttgaaattaatttgtgagccaattaaaaacataaagcaagccagaattgttgatgatgccgtcgaactaaatagtgctgttgtatatccaccaattttaagaaattgcggacaaaaagtattaactagtactcctaaaaaaagcggaacaagcatcataccacctggtattttatcaagtgttttcttaattgggatttgcatatatatacctcctaaaatcttgtttttttatttttaaacatttacatatttttcataataaatttttatataaacaactctaatttataatcttgtgggatacaattatttataattatgttttacttataatttgtacatgtcacaaatgcattaattctgatttcttaccttttagcaacatgtacaaattgaattatcttattttcttgcgaccccactttttcttgccgcatttgcaattgcttctgctacctttgtagcaacatttttatctaaagcacttggaattacattattttcatttaaatcttcatctttaatgtatccagctatggcatatgctgcagcaagtttcatttcctcatttatttcttttgctctaacatctaaggcacctctaaaaatacctgggaaagctagaacattgttcacttgatttggaaaatctgaacgtcctgttcctataactcttgctccagctgcttttgcttcatctggcataatttccggtgttggatttgccattgcaaagattattgcatctttattcattgctctaaccatttcaggcttcaatattcctggagcagatactccaacaaatacatcggcaccaactaaagcatctgcaaggttgccttttatattatctggatttgttatttccgctaaagcatctttagcatcatcaattttttccatgcctctatataagatacctactttatcgcaagcaattaagttttttactcctgatgataataaaagcttagctattgcagttcctgcagcccccgctccatttactactacttttatatcttcaagcttcttatctactactttaagtgcatttataacaccagcaagaacaactattgcagttccatgttggtcatcatggaatactggaatgtcgattaattttttgagtttttcttcaacttcaaaacatcttggcgctccaatatcttctaagtttattccaccaaatgttggcgctatcaatctaactgtattaactatctcatcaacatcgttagaatctactaatatagggaaagcatcaacatctgcaaattctttaaataaaattgactttccttccattacaggcattcctgccattggccctatatctcctagtcctaacactgcacttccatctgttactactgctaccagatttccttttgatgtatatttgtagacgttttcttggtcttcatgaatttttctacatggttctgcaactcctggtgtgtatgcaagacttaaatcatctcttgtttcaaccttaaccttagatgtgattgaaatctttccttgtttttcttcatgtaattttaaactttcttcaaaataattcatttaaaacatcccctctatatttaaacatttacatttgatatttaatattttgctgttgtttggtgtaactagataatatcattttgtctgaaaatttaaaatattaagtaactttaatttatatttagtaaattaagaatactttgtgttttttttaacgagtattttaattgccctgaataactttttcacatagtatcaataaatatctttttagacatattagcttatgtactatacaaatataaaaaaaatatatcatagaaataaaaaaaacaaaatgaagatcctattcttttgaacacgatctccattttgcattttcataagccattatttaacttcagtttatatgtgtaattcctcccaagaaaaataatatgaatatatgggcaggataataaaaataaaataaatattttaatccacgtccctttttttcattataaagcatcattagcggtatagcgaaaatcataatccactgattgtaaccataaaatatattcttaaatgaaaaactcgcaaatggaaaaaacgatactgaaaaaattgcataaacaatcatcattttttttctgtcatttcttaaataaaaaaatattattccgagagcaacaaatgaaacacttccttcacaaagcaatggacagggtaaaaaggatataataattccagctatgttttttgaaaatattgaataagtacttattggtaatacaacttcaaacattatcgcaaaaaaaataatataaattttcctatacaaatctttgttttcatctcttaaatattcaattagtaatatatttaatgctatcaaaaagaatgtctcgaatatattattactcactggaaaatatgatggatcatcaactgatatcttccatgaaataaatcttcctaaagacattactattgaaaataaatataatcttttaacataagtttttctattccttgtataaaaaaagccttctgccattgtaaagaaaaaaagtggagctgataatctcccaagccaattaaaccaaattggaattccagtcgatgctaagaattcatgcatatgatccattgtcattaatattaatgcgattatcttcaaagaaaatccactaaaccccttttgaataatattattatttgctatatacatactgtatctcctagctatcattaaaatttcatacgcaagttcattaacatttattaataactatttgtttagatatgttccataaacttatttatgttattatctatttctacttctgaaaatgcaataattgttgttgttagtgaatattctgatatatcatttataaactcttctatctcttctaaattctttacagataattttactaagaaacacccatcccctgctatcctatatccccattcacttcgtttatgatttttaataaaatttttaaatttgttatattctccgttcttcattgtaatcttcattatacaatcaattgataatcccagctttttcttatttattctaattgtatagccttctataataccactatcttcaagcttgttcactctctctgtaacggaaggaggtgataaatttatgcgtttagataattcccttattgacaacctactatttttttgcaactctgataatattgctatatctatttcatcaaatttcatctgtaacactcctagtatgttttttatttcaaatataattttatcattagtattatatgtcatttggaatgtaaataaaactataactcctatataatattaattgttaatattatataaaaggagatttattatggcaagaatcaatttttcaaaagaaggaaatacaccatttcaaaaactattaggacacaataaagatattatgttaaagtggtccgatttagagaatcttcttttctctaccaatacattcacttctgaattaaaagaacaggtaagacgcactttggcatttaataatggctgtgaatattgtatggctaaaggtaagccattaaataacataaacgattcaaaaattttagcagctaccaaatttgcaaactcattttcaaaaaattctgcagttagtgatgaggatttcatccatttaaataatgaattttctgaaaaagaaatttcagagcttattgctctaatatgctttataacagcttctcaaaaatttggggctgctcttaatttacaaccaagttgttcaattaatatttaataaaaatacctactaaaagtaaatcattttcttttagtaggtatttttatatatcatgaagttaaattttatatttctctaaatcatttttaaaggtttttgtaatacctttaaaatcagatatattatctataagtttttttatctcatttgtataatttattacactagcacttacttcttccgatgatgctgaattttcttccgcaatggctgctaacgactctatactatcatatacatcagatatagaatcagcttcaatattcaacttgcttatagtctcaatcatagaagttgctacactctgcactgattgattagcttcatagctaatatttcgtacaacgtctaagttattggtttctttttctaacacatcatattgaacatctatgtgatccactaagaaacctatttctttaacaaattgagctaaattagagttaatatcaagtactgcctctttggactgttcagcaagttttcttattgattctgcaacaacagcaaaccccttcccttgctctcctgccctagcagcttctatggatgcattcaacgctaataaattagtttgttctgctattcctgatactatagatacaatattatttatatctttagcccttccttcaagctgtgtgcccttctctttaacttcattaaaactctgtaaagatttcaaaatatttttacttgcattttcaacattttcatagctattattaatcttaagcatggcatcttcaagttctgatttattttcattctcgttttcaactatattccttaaggcctcgatgtttccattaagtgcttgtacggctttatctgtattttgagcttgtgtaacagctccattcgcaacctgttcaacaacgccacttatttctgttgaagtatgattcatcgaatcagaaatcttgtttatagtatttacaaaagtattcatttcatctgtaacacctttaaatccaacgaaatctgcctgaattacttttttatgttccttaagtaaatcataaatttcttcaaagaaatcattagtggtgatttttccatcaatattgtattcatttttaattattcgttctatttcttcttttatttttcctataggtgacatcattaaagaaacacctacaaatgtagctaaaccagatactaggctccctattaaaacctttgtaatatcatttattcctaacattatcaaaaaaactatagctgatattataaatgaaaatactcctgtctttgccccaaaactttttataatacccaaagaaaaaactctattaaaaaagtattttttattgtaatatacatctctttcaaaagtaagttttaatttaagctcactgcttgttcttgatatttcttttatatctactttctcgttaaagtgttcgcaagtcccttgaagcatacctaaaaaatagtcaaacattcctctagaagaattatagctaaagatagcttccctactagatattggttctatagataccaaaggtggcttcgctcctgcaaacttttttgtcatcactacatgtacatcaaacatggactttaaaaatgaatatacattgtcatgtttgaaaaatgccggataatcatgactaaaagcttttatattatcttgtccaatttttctccaaagagctcctacctctatattttgagatttagctatgtatgatattattttcttaacttctccatcgtctacattttcaataggtgaaaatatttttgtttttccccaacctatataatccattgcttcattaacaattgagtctccaaacaactttctatttgtcttcatccatgttgatacaacggtccctttcataaacacattacctccttttctataacagtatttcattccatttatcatatttcacgttattctataatataattatacacttatttgctttagtgagtaaatatattactagttaatatatattattatttaatatctccatatctttattttcaataactatcgcatcattttattgacacaaaagaaatagtatggtaaatctaaaataattgaaataaattaattctatacagtttaattacatttataaaattgattagatattggtattaacaacataatttaaacattagatgttttcttattagatttattgttacttatctaaagtagtgaggtgattcagcattgatattttctaatcttaatataaataaagatgaacctatttatattcaaattgaaagacatataaaacaaggcattaaaaacggtgaattaaaaaaagatagcaaacttccatctacaagggaagtaagtaaatttttaaatataagtagaaattctgtaatttcagcctatgaagaattagaaagcataggagtaataacaacaaaaagaggggtaggtacttttatctccatagaaagtgaaaatgaaagctatgaatataatgtagatttttctaaaatgattaataattatggaactaccttaaagaagtttgatatcataaaaagtgaattaccgtataagaagggaatgatatcattcaaatccatttctcctgaaagtcatctctttaatcttgatgattttaaaagatctcttttagatgcttggacttacgaagaagccaatctattaaattacggttatgctaaaggatataagccgctaatagattattttttagattatatgagagataaaagagttgatactaataacaaagatattttagtaactaatggatttaccgaagcctttgatatagtaattagttcgctaacaaataatggtgatattattttatgtgaagaaccaacacataatacagctttaaaaattatgaaagcctatggactaaagataattcaagtaaaaatggataaagaaggcctagatttagtatctcttgaaaatgctttaagcaaatataatccaaagttcggatatttgatcccgtcttacaataatccaactggaatcgtaactaaaactgaaagaagaaaggaaatatataaactttttagaaaatattctgttcctataatagaagatggctttaatgaagaattactctactcaagctccccaattgatccaatagcatcactatgcggaactggtaatggagtcatatatataggaagtctttctaaaatactgttccccggtcttagaataggatggatattcgcagatgataatcttatagaaactttagaaagtgtaaaacgtggaagaaatattcattcttcttttttagatcaaagcgcatttttctattacctaaaaagtggtgccttcagcagatatgttaaaaatgtaagaaaatattatagagataaatacaatcttgtactagatatggttgaaaaatatattccatatgaatatataactggtgagggtggccttcatgtattcataaagctaaagaacaacataaatgcaagaactcttctggaactctgctataaagataatgtattatttatgcctggtgatattttttatgaaaattccaatgacaatatagaatttcatactaaaacagatgataacaagcctattacacatagaaagaaaagcttaaaaggttatgatacttttagaattggatttggtcgagtaagtgatgaagatataaaaaaaggtattgaaataataggaaaaaatataagacttttagataattaatatctaattaagataaaaaaatcattgccacaaaattatggccaatgatttttttacttaacacccattataagaatttttattatatattttttaatgcctgcaaagcagctatatttagtaaactccaaggtttattaaaatgtggttggaagaagaaatctgtcattgcaagttcttctatagtcattttattttgaattactactgataatgtgttcataaattgtgttaaatctaaattcgaaattatttgacctccaagtattcttctactgtctttatcataaactaattttaataatgcttcttcgtaagtaggcataaactctggtctataattatctgtaacagaaactgctcctacattaaatgatgttgtattttttgcaacttcttcagttaatcctgtagatgcaatacatttttcatatatcttaattcctgatgtaccttgtgttcccatatactttaatttaggttcaactatattatgagcaattaaagttcccattctaactgcatttgttgctaaaggtatatatcgtgtatcatcagccggattgaacttaacaacacagcaatctcctgctgcaaatacatcttttctacttgtttgcatatattcatcaatcataattgcaccattttgaagcgtctccaatttaccttttacaagagcagtgcttggtgcaaatccaatgcataatataactaaatctgcctcatattcattattatcagtcactacatgtgaaactttatcattctctcccttgaacaatttaactttttcccctaaaactaggtttattccatgatctctaaattccttttctgcaatatcagtaaattctttgtccaagtacttagacattattctctcttcagcatctattaatgtaacatttttattctgaattttgaaagcttctgcaagttccacgccaatgtatccgccaccaattacaactacattctttgcatcactacgtctagcttcaatttcttttgcatgattatagttcttgcataataaaatattttgtaaatttccgccttcaaacttaggtattattggccaagaccctaatgttaaaactagcttttcataactatcttcaaatatttcaccattttctaaattcttaactttaacaattttattatcaaagtcaatatctaaaacgtcatgtttcatctttgttttaactcctaaagagctcaaattgtctggtgaattataaaataatttttctgtttcagtaactattccgcctatacttaacgcaattccacaagatagaaatgatatattatcgtttctttcataaactacgacttcactatctgggtataattcctttaaattaacaatagcagctgttcctgcatgtgtgcatccaattacaataaccttcatatcatatcctcctgaaatcttttgataatttttacttataaataataattattaactaataatattatatatctttattcaaaaaaaataaagaatttttcttcaaaaatacaattattctctgatatctattttgcaattaaatctctgcattctgtaattagctattacttagtgtgataaaagttttattatgtagatttatcattgaaacatataaatattattaattatctgtttatgatatattttatacttcccattgaataatatacttaatgcacttaaaacccttattctatctttttaaagttcaatttttccattacaagatccaatttctttatatcaataggctttgtcgcatatacttcacaaccactattaaagatacttttgactaagtccgcatcatttagagctgttgtcattattattttaacttttttattattctcaatatttttttgcttttctatttctcgaatagtctttagaaccttcactccatctacctttggcatcattatatctaagcacaccaaatcataaggttcgccttcatctaatgcaattaaataggcatctaatccttccattccatcaagtgtgatatcacactcaccatacttagacataaatttaaacaaaagctttctacttgaaagatcatcttccactattaaaattttcactgttaagcccccttataaaatatatagtataaaacttataaactatttataattttctcgtagttatttttaattcccaactcatctttctttcttgccgcaagttcaattttaaatgctaaaatcttaatattattcaaactgttttcttcacaatattcttttatttcatgagctatattttcaatcttaatgtaatcttctagtgttttttcttcaataaaatatttctccatgctatataaccattttaacaacgtctccttaatctctttatcaactataataaaactattattatatgtagtgtttcttaagaatagttgaatggtgctttttgcctctaagtcgatgttctttagagtcctttctaaaatttctttaagtttatttatatctattggttttgaaatatagtcatccatgccttgtgataaaaatctttctcgatctcccttcaaagcataggctgtcatcgctacaataggaatatgccctcctgtttttatttcattttttctaattatcctaacagtttcacttccatctaattcaggcaattgtacatccattaaaattaaatcaaatctgtaattttcaataaatttcaaagcttcaactccatttgatgcaatctttatattaatatatcccagctctttcaacacttttttaatcactatctgattgatcttatcatcttctactacgagaattttttcactcttagaattttcatcatttattttttgataatctaattctccaatatcatccattgccttttctaatttaatggcaaagtaaaatttacttccaactcctttttcactctctacttctatattcccacccattaattctacaagttttttggagatagaaagtccaagtcccgttcctccatattttcttgttatagatccatcaacctgactaaaactcttaaaaaggtgttgcatctcatttctgctaattccaatccctacatcttcgaccacaaactgaatttcatattcatttttacttttgtttatctttcttacttttataattacaaatccagattctgtgaattttacagcattagaaactaaattgtttaatacttgctcaagcctatatacatctccaactaaaacttgtggaatattctcatcaatcgtatagtgaagttgtatatacttttcattagcctttggcaagttagtatatattacatttttaataagaacttgtatattaaaattcacattctcaatcaagactttctctgcttcaatttttgacaaatctaaaatattatttattagtgataataacgaatgagcacaactttttacaatactcagattttctttctgctcttctgtaagattagttgaaagcgtcaaatctgtcatacctattattccattcaatggtgttcttatttcgtgactcatatttgctagaaactcacttttagctctattggctgcctctgctgcttctttaagtttgaaaagttcttcttttgtcagtgctcggtcaaacttatacacattttctctttcattccccacaatattccccaacctttccctttagatatattaactcctgttaatactatccttattttagaggaatagaccgcttatcttatctcattctatataattaaggtaggaagcaaaacaaaaatttctcttaattttctcttcctacctttatctttgtagattaatatttaccaaattcactatcacttagttttattctttttttatttgaagtaattgccacttctttatcttgcgagttgtctcccatatcatacgattgtctcaatatatagttcttactatttttgcttactcttcctctcgagctatcatttttaagtttaaaactagaaactaaatctttaagcagttctgattgacttgaaagttcctcactagccgctgcactttcttccgctgttgctgagtttgtttgtacaacttgtgatacttgctctattcctaaatttacttgtgatattccagtagcctgttcatctgaagacgctgctatttctgatacgagagtcgctgctttagataccccatcaactatttcgtataaagcttttgctgtgttattagcaatttcagttccattttccgatttctttatagacccttcaataagcgcggttgtttctttcgctgcatttgcactcctagctgctagattcctaacttcttcagcaactactgcaaagccttttccatgttgtcctgcccttgcggcctcaactgctgcatttagcgcaagtatattggtctgaaatgctatttcatctattacctttataatttttgaaatattggctgaagattcatttatttcactcatagatttaagcatttcattcatatgcctacttccttgttctgcatttacttttacttcaagagctaactccttagcctgattcgcattaaaagcattttccttagtttgtgctgcaatttcggttattgacgatgtcaattgttctatcgcacttgcttgctctgtagctccttgtgataataactgactaccgtctgaaacctggctcgcacctgtataaacttgttctgacacattatttatttcactaagaactgaatttaatgagtctattattgtatttagagaaattgatatgctattaaaattaccatgaaactcttttacattttcaatattgagattaccttgtgaaatttgtcctattatatcagaaatctctccaacaacacgttttaatccatcttcggtctcattaacagctttagctaaaattccaaactcccctttataattttcacttactggaacatcaaggttccctttagatatttcactcataacactcgtaacttccttaattggttctaccatagctccaatcagttgatttataccctctacaacctgtttaaagtctccactgtgttttgtttcatctgctcttatatccaatttcccttctaccgcagcatttgatagcattttagcatcgaatataagattatctatcgcactcttaacatcttttaaactattagatattccttcaaattgtctgctaacttcatcagtaaattgatctgcttctttaatttttaagtcaaaattagtatttccacatgccaaaagctttagatttccctcaagtctcttaacttcaccctttgtataatcgcttaccctaataataggtgttaaatcagttacgacttccacatatcctacattctcaccatttttattctttaaataagacgtatcttgcttattgctcatgccacaccattcaaagaaactttctgattttcccttatgaagctgttttataccacatttttcagtattacatatattagcccctgcatgactacacgccaacccgtaaccagattttcgatctctaatgacaccttgattaatcattaaattttcaaatgacttgttcatatatgtccaattcatatcattgtctgtaacatgaattgggaaaggtatagcatctataatagcctcataccaaacagccttatctactacagtatctaaagttccatttactccatctattacttttctgaaatctccttcatgttttcctgcatcagctcttctttcaaactttccttctattgccgaatttgataacatatttacatctgttactagcatccttacattttctaccaccttatttaatgcaggagatatttcatctttttcatctttcgcaattatattaatatccatgttacctttagctattttattcatagcccctataacatcattctgtaatgtgttagaaaacgagtccataactttagccatttgtcctatttcatcgttagttgatatgtctactcgttcaccaagatgccctttactcatttcaccaagaatagttaatactttatttattggtctactaattaatcctgatattataattccagatactaatgcaataactattcctatagaaattactacaagcattataataattgcactactcgcagcttttgaattagtgtcagccttcactttaccttctgcctcttttagctcaataagtttggtagctgaattatcaatattactagagaatattcccgcatcaccattcatgatacttacagcctctgtattcttattttgtagcgccaaatcaataaatttatctctaagtggtctgtatttatccatatttacttttaaattattatattcattaactaattcctgatctttaagagtgagcttaagatcttccatagctttatctatttcttcatcatttttaagtattatagtcttactttcattatttttatatgtatcagtttcaattaacaaagttctgcataatactttatttttttgtaaatttacttgtatagtactggcaaaactaatagcttttgtgttgtcttcgtatagatcactatctaatttactgattttttgtaaattaaaaatccccaccgatcctacaattcccattaatataacaattcctaaaaacgccgttaaaattttaccccttatctttaaattcaaaaaccacttcatattctttacctctcatcttctttaaattttatctgcacgtaatttaatttaaacttaatacaatcctatatttttttgtaattattaaacttctcctttatttaattcttctatttcgtcatcttctaaaagcctattacaatctataagaagtcttacttcattctgaatctttccaataccctttatataactatttgaattatatctctccaaatttacctttggaggaggagaaatattactttcatcaatatttgcaacctctataactttatctattatcaaaccaatatctatattttcaatttcaactacaataatgcatgtcctatcatcatattctttctcctcttttttcaatttaatcctaacatccattactggtattatttttcctcttaggtttattacacctttaatatacttaggtaattccggcacctctgttatcggctcgactcctattatttctattacatatttaatatcaattccatagcactcttggccaatcgaaaaaatcaggtatttgtccttttgagtatcttcttgattttcaattgttacatctagtaaatctgacattctaatcctcccataacgcaattttataagttaacaatttcagatatatctaatattaagcttatagttgcatctcctagtaatgaacaaccacttattgctttaaccttttttatatattctggaagtgccttaataacaacttgttgctctccaataagctcatctgcaaaaatacattttactttaccttgatcttcaaccataattacaataccatcttctatatttactacattagtttttatattatagaactcatgaagctttagtatagaataacattctcctcttattaatatcatttcattattatctatatctcttataatatcttcctttttgataatgaatgattgccttattgaagtaacaggaatagtaaaagctgattttcctacctttattgtcataccatcaatgatcgcaagagttaatggaatttttatagaagttgttgtttcttcaccaggtatactatcaactgttacaatccccctaattttttcaatctcctttgtaaccacatccattccaactccacgtcctgagaattctgtaacgttttccttagttgaaaatccaggtagaaaaatcattgaatatatatctctatcagtcaaatcgttttcctttacttttagtagtccattatcttttgccttttttaatatcttatctttattaaggcctttaccattatcttttatgataatccaaacttctccaccagtgtttttagcctcaatagttatttttccaattgaaggtttcccatttgatagcctctcttctttggtttctattccatggtccattgaatttcttactatatgcattaatggatcacctatatgttcaattatatttttatctacttctgtctcttgtcctattatttcaagctccacttccttattcaactttttacacatatccctaactattctattcattttagttaatgtcggggcaagtgataccattcttatcgacataacaacatcttgaagatcagaaagtctttttctatgctgtctcgctgccttgttaaaactatccaattgcaattcagatatttctggattcttagttaccattgcttctgaaataactaactcccccactaaatccattaatttgtctaattttttcacatctacgctaattaaactttgtttatacgataagcttttagacgccactttctcactgccatttgtatcattaactatattactaattgatttgataatatcttcttgtggcttttcattcttttcactaaattgctcactgaattcaatttcgctataaaatttgtttatatcaacattattcaaaaaagcattttccatcaaaagtgttctaatatcctcaatactttgatttgtcttgaaaaatattttaaatccctgcttctttataatttcacacgtatcattattttcaataatatcctcaggataataatatgaaacttcagaaatttctttaagctgatgcacaacagtaaagcatcttatattctccatatcacattcttcatcaaaaaacaaagtagcactaaataaattaaggctcgaatttaccctatcagtgcttaagtaatatttttgttccacatcttcctcacttactaattcatcagacccgccatttcctgaatcttctgaattttcatcgcatgttttaaggagttttaaaaaccccttaactttttctataaataaagtaaaatctccatctgcttctttatcattatttattttttctgtttctatttttattaaatcgcttccttctaaaactaaatctgtaagctttgaataatctattttctcaggctttgattctctaataaaataaaataaatcttctatagtatgagaaagattagaaatgttatcaaacatcatcatcccagaagaacctttgattgtgtgcattattctaaatatttcgtttatagcttctgtttctagtctctcattcttttcactgtcaataatgagttgctgaagttgttctatcatatccaatgtttcaaatataaacatttctagcatcggttctctagtatccatgcttgtcctccttagtaaacacttttaaaacttgcttaatgctttaacaagataatcttctttaaatggttttactacgaaacctttagcaccttgaattacagcttccctaatttttgtttcttgccccatagcacttaacataattactttagcctttgaatcaaatttcattatttcagttaatgcctcaatgccatccatatcaggcatcgtaatatccattgttacaatttcagggtttagcattttatacatttcaacagctttacggccattttctgcttccccaacaacttcataaccatttttttcaagcattgtttttaaagataacctcataaatgcagcatcgtcaactacaagtattcttttcataaataataccctcccgtttcatcataactttattaagataataatatttcaatctatattactacataattcttccaatctatttaaataataaccttttataaattatattaaaaataattgtaatcatattttatttgcaaacgtttataggtgaaatacttgcataaattggttgtattatgtaaacaactatctgattataatttaaatgatttatctttaaaagtcaatgcttgtattattctgtctgtttgttctaaaaattaagtatatttgtatattcttactatacctatgtttcatatttacaatatttttttagcataatattactttttatcaaatcaaatataaagtgtgaaataagcctgtataaataataaaacaactatccaattgctctctaattggatagttgtttatattggtcttataactctcaactaattttacttatattttaattctaaataaatttatatatatatgctataattcacaatgcacatttcacaattcataattacggctgaaattcttgaaatatttttagaattgtgatgaagaattatttttgcaacgtatatatatgttgcaattcacaatgcacatttcacaattcacaattacagctataattcttgaaatatttttagaattgtgatgaagaattatttttgcaacgtatatatatgttgcaattcacaatgcacatttcacaattcacaattacagctataattcttgtaatatttttagaattatgatgaagaattatttttgcaatatatatatattgcaaaatatataatttatattagcactgctaaaattactagtgacacgatttcaacatcttattcaattagtaattatcctgctatattaatttaaactgttttaatcctttataaataccatcattctcaatattatctgttttatattttacaatatcaagaatctcaggactactgtttcccattgcaactccatatttaacatatttcaacatatctatatcatttaaactatcaccaaatgcatatgtattttcaatatcaatttctaaacgctttataatctcctctattccctttaccttagaaaatccttttggtactaattcaataaattctgaactatggcatatgcagtcaaaatctttttctattattgaatatgcttctttaaaattactattctcatatgttctacatgtaattttattgaaactatgttcatttcctgttattggctttattttttccctatatttatttttaaacatcattattgaagatcttttatcatctataaattcctcttcatccatatataaataatcttgcccttctagaatacaaaatactttattattttttaaaacacttattgcattatcagctatttgcttttccaaatctatgttataaactacgtttccatcatattctacataacaaccacaagatgcgagtattccatcaaacccaatatcaattagatcttgtgaaatcattgctcttgcccttccagttgatataaaagcaagatgaccattctcccttagctgcctaatactttctattgtactctttggcacaccaacttcacgattatatagtgtcccatctatatcaaaaaaaactgccttcttttccattcttacctccttaaaaaacaattacattcacaactatatcatacattaataacaaaagaagtaaaaggtaatatatattatttactttaaatatataataatgagagctaaattttccttaaaatatgttgcaatttaatttcaaatgtataaattaatactattaagaaagataaggtggtatctgagtggatataaagaaattaataaatgaaatgaccttagaagaaaaagcatctctctgttccggaaaaaacctttgggaaactaaagaaattggaagattcggaattccttcaataacttttgcgaatggtccctatggattatcaaaaaaaaactgtgattcttatgatcctgttccagctacatgttttcctacgcctactgccttggccgcaacttgggatgttaatcttgcttattctgtcggaaaagctattggtgaagaatgcttagctgaaaatgttaatattctctttggtcctgctgtaaatattcaacgttctccattaagtggaagaaattttcaatatttttcagaagatccagttctaagtggtgaaattggtgcagcttttataaatggaatccaaagtgaaggtatcggagcatgtgttaaatattacattggaaataaccaggaatcacatagacaaaatattaataacataattgatgaacaaactttaaatgaaatttatttatcaaactttgaacgggtaataaaaaattctaatcccttcgctgtaatggttgcttacaataaaataaatggaataccttgtaccgaaaatgactatttgttaattgatattttaagaaataaatggaattttaacggattagttttatcagacttatatgcagtaaattcaataataaattcattacaggctggattagacttagaatttccaaactcacctaataatacaaaacaaattatagaagctgtacttagtggcactttagattcatcaatccttgataatgctattgaagatatattaaatactatatctaaagttattaaacctgtgaaagaatgtgaatgcaatatttatgacaaagaaaaacataatgatttagcaagagaagttgctgaagatagcattgtccttttgaaaaataaacgtaatcttttacctttaaaaaaagatagattaaaaaataggaaattagctataattggagaatatgcaaaagaaaccagatgtcagggtgatggtaattctaatgtcatacctataatgtctgaaaatgcctatgatgagataataaaactcgtcggaagttcagtcaaaatatattatgaaaaaggttataatatctctaaaaattcagaagatgataataatacacttcttgcagaggcaagaaaaactgcacgtaccgcagatatagttatattatttgtaggaactccagaatattatgataaagaatatactgacaaggtaaatctagatctccccactgatcaagtgaaattaattaaggaaataggtaaagtccagaaaaatttaattgtagtacttagcaatggatctccagttactatatcatcttgggccaaatatgctgattctattttagaaacatggcttccaggacaagcaagtggaggtgctcttgcagaaatcctatttggcatcgctaatccatctggtaaattaccaactactttccctatacaattgtcagacactccaacatatttagattatatagattccgaaaataatttacagtataaagaagggctttttgtaggctatagatattatgataaaaaaaatatggatgttgaatttccttttggattcggattgtcctatactacttttaaatatagcagcttaactcttgataaagatatattaactgataatgatacattggaaattaaacttaaagtaaaaaataccggaaaatattttggtaaagaaattgtgcagttatatataaaaaatactgatattaatattttaagacctgaaaaagaattaaaagcctttacaaaagtatctctttttccagatgaagaaaaagaggtgaattttttgattgatacaaaagatttttctcactatgatataaacacaaataactgggtaattgaaagcggtccttatgaaattttaattggtaaatcttctagagatattcctttatctaaaaacatttatgttcagtcaccatatctatctaaaactaattatactagagatacactcgcacaagagtttctcattaatccaaaaactaagatagttgtagaacctttattaagcagcgccgctcaatcaataacttctgatacaaatgcgcaagaaaaacttataaattactttaaaaacattcctataggaagattcactacattaagtaatggaacattcaccgaaaaaatgctgaatgatcttttatattctgcaaatgaagcttaattatagaatatcttcatttataattcaaaataaaattacaacaatatagctgaaaactatagattagtgtattcacattaaaaagaacatgttttatataagtatttatcaacttagtaccaaaacatgttctttattttcattattatatttatataacagtttttatagattcagcaatgttttctgctaatttttgctgactcactgtgtccgagcaccttttcgcctcttcctcgttagttataaatcctgcttccacaattattgatggcatatttgtgctttttatgaatagtctgctatcctttgcacctctatcattaaaattaaaattcttaacaatatttttatcaataactgttgctacgttcttacttatcgttaacttgttaggagataccccacctttaaaactttgactttgctctgccgaactataataaacttctaccccttttgcgtctggagcatcctttacagcattatggtgtatacttacaaataaacttgcatttgctgtattggcaattgtaattctatctttaagactctgattggtccctatcgtttgtacttccttaggatatctagtcattacaacattatatcctcttttctctaattccgtttttaacttagatgcaacctgcatatttaaatctacttctttatacgttatgcctttgattgtagatacagctcctagatcaccaccgtagttatgaccaggatcaaccactattgtctttttctttttatcaaggttagctatagcggtcattgcctggttgcttaaagtgctttgtgttaatgttgatgcttgtacacgtattgccggagccaaacttgacactattgcaaaaccaagtacgaaagtaactaatttcaccttaaaattatccaactttctcatccccctccatagtaaatattaccagaattgtttacataattaaagaagaatttgaaaattttaactttaatccattaagaaagaagattactacattcatatagcttattgttcaaaagaaccgacagttgatgtaaactcttctgaattaagctttttttgataataattggttccccatacacccgctagaatcatcactgatcctatcacatggtataattggaagttttcatgtaatacaagtacaccagctgcaatagatactatcgttgatatatttgcaaatacggctgatctagatgcttccattttagaaagcgtataattagctaaaaaatatgctacaactgaagataatattccaagatataatatagatactataaagtttatacttcttaatggtataaaatattctgataagtttccatttattacgtggttagtaattgaaacaatattaaaaaatatagctccaacaaacatcataaagtatgtcacttcaattgctgtaaattgttgtgatatttttcttgctattatattaaataatgcagctgaaaatacagctcctcctagaaggataattcctaatagagtactccctcctgaatcattagaattttccataagaattatcagcaccacaccagataccgaaagtattatgcttataacttgcttaacagatggtttttcttttaataaatatacagctaaaactgtcacaactataggtataagcgcaatcataagcccacctaaagacgaagatgttttcttaattccataagtttcaaatataaagtagactatgggctctataacagccaaaataataagccatttcataggcttatttttataatttacctttattatttttaaaaatatcaaaattgtcattattagcaaagctgctaagaatctaaacgaaagtaattctattggcgtagctacacttaatgcttgtttcgaaaacaagaagcttaatccaaaaataaaattagttattatagcagtaaagtatggaattatatgtgatttatttttcatatttatgtcatttccttccttgtacatagatattaaaatatgaacttaagaggtcaagaacccaaaagttattatagatcccttaaatatataaatttccaagtaagtatactataaaaaaataccatctacaacaatttatatagatatatctaaaaagcactttgttatttttaatattagataaaatggtattttgacaatttaatgtaaaaccttaaagtaaaatataaattaatccaatttttatgaataattctagtaattttgaaaaaaatataataatgagcatgaattttataggagtgaaatgtatatgaaggttggaattcccaatggactattaaattacaaatattctgcttttcttgaaaagttcttttctgaacttggtgcagatattgttagatcaccagacacaaacaaaacaatactagatgaaggcgtaaaaaattgtgtaaatgaagcatgtttgcctattaaaatttttcacggtcatgtaaatgcaataaaagataaatgtgatttaatggttatccctagaatcatgcaattaagtgaacatgaatttatctgtccaaaattttgtggcttacctgaaatgatcataaatagcattcccaatatgccaaaagttactatggttcctatttatgcaacgtcaaaagaaaaattatataaatggatagtttcaactggaagcttaataacaacaaacaaaaaaagaattcgggatgcttatgataaagctttaatagcacaagatgaatatgaaataggaattaaaagcgatggatataaattaaatatagctctaattggccatccttacaatatttatgataaatttgtgaatatgaacttagtgaaaaaattaaataaattaggtgttggtattataacggaagaatttatagacgaagcctctattgctgacaaaacaactgaattatttaaaagacctttctggacatttgcaaaaaatgcttatggggcatctacatacttagtagaaaataaaaaaattaacggtatagtatacatatcttcgtttgcttgtggtattgattctgttgttatagatcttataaaacaaaaagtaaaagattttcctttcttagtattaaaagttgatgaacatactggagaatctggatttgacacaagaatagaagcctttgtcgacatgttagaaaggaagtaatgttatgaaaattatgacgcctcatttaggaaatacatatctggttactaaggcagtgttcgatactcttggtatagactatataattccagaattcaatagtaaaaaatcattagaaataggatctatgtattctccagatgatatgtgcctcccatttaaacttatgatgggaaattacatacagggaattgaacaaggtgcagatacaataataattactggaagctgcggaccttgcagatatggagaatattgcgaactccaaataaacacgctaaaaaaattgggacataatttgaatttcattgtattagataaaccgtcagaaataggcccaaaagaatttctaaatagaatatcttctatctcatctagcagcaataagaatatgccgcaaaagctaaatgcattacgtataggatttaaagttctaaatctaatagataaaatagaggcaaaggcacattacttcgcaggatatgaaaaaaataaaaatgaatgtaaaaaactcttaagcaagtgtaaaattgatgccgaaaatagtagtagtcctaatgagatgataaaaatactaaacaaatatgataaaaaactagattccctagagatatgtagtgataggaatccaataaaagtagcaataataggagaaatctatacaataatcgagccattttcaaacctttttattgaggataaacttatggaatatggggtttcaactcaaagaaaactcactccaagttggtgggctaaaaattctattatgtcagttgttggaatgaattctttagacatacgaaaagcttctaaagaataccttccattatatattggaggacacgcaagagaatgcattggagaagcagtaatggctgcacatgatggatttgatggtgcaattcaaatatttcctatgggatgtatgccagaaattgtttgcaaagctgtgcttccttccatatctaaagataagaattttcctattttaactcttgtggttgacgaaatgacgggtgaagcagggtatattacaagaatagaagcattccttgatctattagaaaggagaaaacaaaaatgtattatttaggtgttgatgttggctcagtaagtactgacattgttcttttagataataatctgaatgtcgtagataaactatatctaagaacaaaaggaaagccaataaatgcaattcaagaaggttttaaaatcttaaaagagaaatataagaacgaacaaattaaagctgttggcactacaggtagtggaaggcaaattgcatcatctatccttggagcagatgcagtaaaaaacgagataacagctcacgcatgtgctgcacttgctatagataaggatgttaagacaattttggaaataggaggacaggattcaaaaataataatattaaaagatggagttgccatagactttgcgatgaacaacgtctgtgcggctggaactggatctttcctcgataggcaagctgaaagattaggaatcccaatagaagagtttggagattatgctttaagatcaacaactccactaagaatagctggaagatgtgcagtttttgccgagtctgatatgatacacaaacaacagcttggttataatgagcctgatattataaacggcttatgtgaagcccttgttagaaattatctcaatgatattgggaaaggaaaagaaatatgccctaaaatattctttcaaggtggtgtagcagctaacaaaggtatgaaggcatcttttgaaaaagctttaggatgtgaagtatacattcctgaacattataatgttatgggcgccataggtgccgcaattattgctaaagaaactgttgacaagaccggtgctactaactttagaggctttgatattgctgattctagttttatatcaactagctttgagtgtgaaggctgctctaataggtgcgaagttgtaagaatagaagatgatagtataataataggatgctttggagaccgctgtggaaaatggaccaataccattaatgaaaatattactaaaggtgcttaatcataaaaacataattgtttcttacataattaaggataaaaaatacagactaagtaattgattttaattacttagtctgtattgcgatataatattaatctcttttatatttttttcttatataaaaataaactggaagacctattaaagttattcctattccatatattgcatttaatgaatctgttataaaagtacttattaatatgtacagcccaccaactattccgatcaatggaacaattggatataaaggaactttgtatgaagtttttaattctttatgtttacgtctcaatataaaaatcccacatacgcacataacaaaaaatatccacattacaaacacagccaagtttgtaagtttgtcaaaagatccacttaatacatataaacttgctagtaatacttcaaaagcaaatgtatttataggagtctcaaatttttcattgattttcccaaaaaatttaggaaaagggaaaagattatcctgagccatagcaaaaggaattctaacacctgtcattagatacccatttagcgctccaaaaatagaaatcattatgcctaccgcgattaaagccgctcccatatttccaaacaatattaccgctgcatctgaagctggcttggaagaaagtactacatcgttaactggcattatatttattatcgctacattaattaatatatacactattattattgctattaatcccattattattgactttgggagatctttttctggatttttaagctccccagccatatttcctacgctaatccatccgtcataggcccataaagtaccaagtattgcagctccaaatcctgctgctcctgatgtatttgatgagaataccgtagtcgagaaatcatgagctgtaccatttattaatccaaatataacaataaaaattatcggaacaagcttaccaattgtagaaattacttgtaccttcccgccaagtcttgatgatagaacatttaaagccattacaaaaaatagaatgcatatagcgaatatcttctgcagcattggtgttagatctggaataaaataagttgcttgagtaacaaaaactattgataatgcagctgccacccctggcacatagattaaagtctgcatccaaccaaacaaaaatgcccatttttcactatataattccttaatataaacaaagactccacctgtcttaggaattgctacagcaatttcagcaactgttaaagctgaagctatagttatacatccaccaatcagccaagccattattcccagagttggtgtccctgcatttttaaatactgttgacgccttaaagaaaattcctgaccctataactacccctataactatagtaatagcttcaataagtcctatttctttttttaaacctttaggaataacattttttttattcttttgagttgactcattcatgctaatcatctcctgactcaattttaaatttttatatataatattaaacaaaacactttttctattgtataattcgtaatgaatttcgtcaacaaaaaaccataattatattattttgcaaaaatataggcctcatcattttcgagtatagcttttaaattatctttttcatttccaagtgagtccaaatcttcttttttaataaataataatgttttatcttcattatctttcaaaaatccttctatgccaccttctaatggagtcaaatctgcataaagttcgctatccagccaatagctttgctcaaaatgatttacatatattttttctccgcgatattctggtaagtttccgatttcctgaataagctcttgactcaagtcctcttttggatttgaaattctagttactataacttcttcacttttatatagtgataatataatcatagcaaccaatactatttgtgtagcaaaatttctattacgctcttttaatataaaacttgatgcatatcctatccatattgctgcggcaggatatatcggtaaaacataccatgaaattttcgtttttgaaatagtatataatacaaacggaataaccatcgacagccatattatcaaattgcaatttattagtttcctgtctgtaatatatctatgcgctatagtcaaatatgtcatgctaacagctacaaatacaagattccagtaaaaatatgaccattgcaaatgttcaatgtagtaacactttcctccaatatgtccttctaaaggtcttgatgttcttgccatcaaatcaaattctatcatggtcttaaaaaaagctattccatcattggcatatctcaagattgcccatataagaatcggaaaagatgcactcaatacaaatgtcaaaatttgttttaatgttaatttaaataaatttttactaaatattaaatatagtattcctataaaaaagatattacctgcatgaaaacttttagttaaaaaggctgctgaaaatgataatccaaatacatatatccatttaatactcctttccattaaaattaaagacattaccgatattgtaaaaaataaaacgtatatggcatctgcatctccggttcttgcacaatgctctgtaataaatggtattgttgttgttagaacagttgtcgcaatcagagatgtcaatctcccatatatattcaaactaaaaattgctacaagtactatagttattattgctgcaaatgcagaaaatacccttagccccaaagcattaaatcctgcaaatttatatccaatagctattgcccaaaagcttattggcggttttaaattccaataatcatttttataagcatatgtatttactatataattgctattttttatcatctcataagcgctaacaccatgtcgtgcctcatcccagctgtatataggaatgacacctaaattgtaaaatatattaaaggaggcaactaacaatatagctattaatataatgtaataacatttttcaacaagccctataatattatcaattaactttgttctaaacatgctcatactttgcctccctgtaatatacttaatattttaatttcataaaatcatttactatattaaccttagcttgaaaaatatatacattcttaaaaatatgaatcagacttttccataatttacacttacaaggagcacaatgtcctcagatttcattacaatataaactactagaggataaaaaaagtaactttcagtctagaaccaaaagttacttttatagtcaactattgcattattactgctaaaattaaatttttccctttaattaatatttatcaaccacagtgcctaagacagcatgttttataataggattattctcgattgcctttagttcttttggtcttccaaccactacagctccaattattctaatatcattctcatcaatatttttgatataccgagtctcccctatatcctttaactgcttaatcgctgccctaaagttttgtattctaccgtctgtatcacttctaaactctcctgctccatcaatggattttatcccaataacatcaaatgctggattattaacttcaatgatatgtttcttttcctcatctgaattattatctacccaataaaatgttattagattactatccaacatactatttacttcttcataggtatagtatttatcaaaagacaaagccatttctaccattttattatcatccatttcatctaaaaaatgaaaatcatttattatattttctttaccttccgatatttcatcttctgtacgtttatttttatctgtttcatattcatatatatttcttccataattgacatacggatataaaaaatgtaattctcttaatccatatgcagtactataccttttatttatatcatcatttaaagggatgttacttattgtccgtccaccttgatcaactttttcaaacttattatcaaatatacttctattattagtttttaatccagcaaaacaaatctttttttattaaatcacatatactatccttaatgtttcatcccccctttactgaacacactaaaaataatgattagtatttattctataaacaattgtttttcattttttaatggtaccacatacatataacttttaggcatatgaaaaagtgaacatgtatctaatatatttttgaaaattatgtttttacaaatataaaaactataaaaaacagaggcactataccgtatataatgcctctgtttgcttacaatcttctatattcctcttgttttatttgattggtttttaaataatagttaatttgattaagcaatttttctttatcttctggtaaacttcctcttaaagaaacataatttgatgcatgattacatctaaatataactgattcattgacattaatatgttgtattaatatccctatctcatttaatacctctttatcgcttagaagtttaaattctttccttaatattttattatataaatccgtttcttcttcaaccataagagttaatacgcctaaataatttggagccatagcgcttattaattggcctgttttaattgcatgaatatcgctcttttcaataccgccaactccagctataactgttactgataataatatctcagcatttttaaccattctagctgcattaattacctcgttactgcttactcctttatttatatcttttaaaacctcatcacttccactttcaacccccatatatatcatatataagcctaaatctttaagttctttcaactcttgatgagttttacctaatattgatttgggtgtcccgtaaagagttaccctcctacattcagaaaatgtatttcttataagcgctaatatttcttttaaattttccgttggaattattaatgcatcgccatctgccaaaaatattttttctacatgcgaatacatttctctaaagtaatttacatctgttttgatatcttccaaagattttattgtaaatttcttagatttatacatattacaaaaattacatttattatgagaacaccctaaagttacttgtattataagactattactttcacttggaggtctatatagtggataatcgtacattatcaaaccatctcccctgttatcctttaattaatatagtattttttaattctaacactatctatatatatttttctacttcattaaatcatctataagcatttattcttaaattggtgatattctaatatatatttatctgaagtatatttacttacttgcattttatataatagcatcaaactcataaatataaccttctatagattttactacagaaggttatatttatgaagtgcgttttctaatactaatatttatataacataactatactctgagaaccagatccaatagtccagaaaattacatagtcccctctcttaactttaccttcctttatcgattcatacaatgctatgaaagggctagtagttccagtatatccatatttattacctatatatatactcttatcttctcctatatctaaaagttgtcttatattttttatatttataaacgcaaactgagaaaagcagaacattttaatgtcttcattttctaagccatttttcttcagcatctttttagcaatctctgctgccggataaacacatgccccaccatcaaatggcaaccatttcaaataaagctcacctacatcatttgatttgaagaaattagagaatcctttacttggatacataatattatgactttcctctgtgtttatataatattctgcatcaactattccacactcttcttcaactttttccaaaattattgcacatgcagcatgtccataatttccatagcaaagttcattattgggatcagctaacgaatcgacatcatcgcaaccaataatcaatgctcttttagctcgctttgacgattctaaataatttgatatattctctaaggcaacagtcataccagcacaattggcattcatatcaaaacacattacatttcttcccgcatttaattccttatgtattaaaatagatgttgctggtgctatatattcagataatatagatgaatatactagcacatctatgtcactacctgtcaagttagctttatctaatgctgattttgctacttttactgctagagataaagttgtctcctgttcattaaacataaagcgtttatctctacccattacatctactaataaatgttctacatccttatcttgtttttcaaaatgttttaaataaatatcatttgaaacaactttagatgcatgacaaatatcaatgcaacttaatcttattcccataataatctcctagctaatgtaattaaatttaatattataaattatgtattgttttaaattatttcaattcccaatccagtgttcctacttattcttgataattgcatctttaaagttatattactaccaacatttgctataacctttacaaacttgcaagccttgtacatttgaaaacatccttctaacattggtaacatctcttgtcttgaaacgtttaactctcttgcgtcaaaatttaatacatattctgaagtttgtataggagatagttcttttctaaaatcttcaacaaaactattagcatcgtctggttcaaacattccccatatccttatgttaatctccttttttgctttgtccaaagacaactgatactttttcatttactacacctaacctttctttatttaaattcttatcatatacacatatttcaatgattttctattaaaataaaaaggtacctattaattattaataggcaccaaaaataaacaaatgactaatgtttatataactacattttggcaacctggcaatcattgaaaataaatttctttagacccatagctttgcggccctgcctttcggcaagtgtgctattatcaatgcatatgatatgcataattttacacttatttttgataaatttcaatatttatactaatatttttaccattaatggcattaaaactaattttagtaagttatatttataatctctacctattttgaaaagattctttaaattctttcttaataactaagaaatcttctaaatcattcaaaaactgaaatagcaacgctctgttttcaaattcgtttcgattcttaggtaaatccattttttcataatcttttctaagtaaatttagtttatttataagctctacacaatcattatcttcctttagattcattgcaacttcatttgtaaattctgataatattctagtttgatcataagtcatataaaatcttgaaaaatgcctcttcattcttttcattgtatctagctgtattattctcatctctatataactcaaataataatcattttttttaaataaacgattattatttattatctgtgccataaatttagacttattaactaattcctcaacattcactgatatttgtttttcataaattggtacagcctgagtaacaaggcttactgccatatctgataatatagctctataatagtcttctattctttctttgtttttttcaaattgttcttccaatgatgcggtatatagattaaacatcattgctactccaattcctattacagttaattgtgcttcatttataatccatgaaatatttatatttgtgcttgtaagtaaatgtgttgataatacagatccaactaccattccttcctctatttttaaaattattgttgtttgtataaatataattaaaaacaatccgaatatgattgggttatttccaagtaataaatatagcataaacgacaaaagaatggctaatgcagaagcaattattcttctccctgcaactaataaagattctttttttgtatcttgaatacttaggattgcaataattcctgaagtcactccaaattgtaaaccaacataatttgatataataattgctattgtagctgataatgccattttaagagttttagattgtaaatattttatcatttttactttctcctaccatgcttaaattcttattcattatatactcttcacttttacatgtagcctgcatttcatagatatcttaactaaataactccctttgcacacgtgttcaagatttataatgaaatatatgcctcctttatttagattataagagacatgtatttcattacctagaaactttttttaacttcttattttcatacattttgtaatcagctttccttaataaaccttctaaattatccacttcattcaacttatagctagttaatccaaaacttatttctagtttatatgttttaccttctaaatcttctattatttttaatcttttttgtattttatcaataatttgattcacttgtccactacctattttaggaaaaataataataaattcgtctccgccatgtctaaataccaagttattttctcctatgttttctttgatgcaattggcaactgtttttatataccaatcaccttcatcatgtccaaatttatcgtttactaactttagaccatcaatatcaataaaacatatagaaaaatctccactttcaattttcgctttcatataattgtcttcaaggatactcaatccatatcttctattaaaaatcccagtaagttcatcaatactagccaatttctccaaatcttctttttccttcttctgatttgttatatcagcaattgccaataatatagtactttttttaccgaaatataatttaatagatgatataagcattgctatatttttttctgcttcagttgtaataatcatctcttgattttcaagtctttcattaaattttatttttttaatccaatcatcattattttcaactttggaaaatataatatttcttatatttaattttttatcctttccaaataacttgcttttaaaatccttcccctgcttatttataaggattacatcttctgtatcataatccaccaaaaacatagctccaggcgctacttcaaatagtttatgaaaattctttcggctttcgttaatatctttaaaagccttaattatgctcttttctgccggagcaaatatgaataaaatttcgaataatattagcatcaatgttatagctaataaaataacttcaatattctttatcattaaaattttttctttggcatctaggtcatactgaaaaactatatcatccattcctttaagaaacaacttttcattatcttgaattatatgcattttacttaaaaattcacttttattataattactgctctttaccatatctataatatcatatgcactattaatcattgcttcatgtggtttctttatatctaaaaacatatcttcaatttttttattgcttattttagaaatcccctcttcaatattccctctttgcaaatcagtattagatttcctccatatttctaatgctgaaactaattcatctatatacaaatcttccgtttccttattttctgacaaataaatagcatatacatcttttgaaattttttgactaagcattctttgccttcctgcaatgtttattattctagaatagctcatttcattatttatattatattgaactattatctggcttagtaataatgcaaaaataattatgcacaatgctaatatatatcttcttcttatcctttttataacgctagtatatctaactgaattcttctccattattttctcctaagctactaatattaaataatctatttttaaacaagtccatcttacttcttatctatatataatttactaattatttttactgtacattgtctgccttctctgatttctaacttcaacattttatttaaatatgttctgttttaacaagaaaattataacatattctttcattaaaatatcgaatttttagacttaatgagagtaaatatattgatacatataattattaatataaaatgtgacattgtagaatttttcctactataatactaaaattatttttaaataaacctatcattcaatatttgaaaataacaattatatactataatctctaatagccatttagagattatttataaaattatctacatatgttaaactaattttataaaaatttagggaggattaaattgttgaagatatacgaacaaatttcatacgacataaaacaaaaaataatccttgatcaaatgtctcaaggtgctaaactaccatcactcacctccctctgcaaggaatacaaatgcagtaaaggaactgtgattaaagcctacaataacctatgtaatgaacatatagtttactcttcacctcagagtggattttacgttgctgataaccttgtacgatttggcacaaatcaagctaatatttatgatctatcaactggtaactctttggttagcaatattccaataaaggatattcagcattgcttaaactcagctctggagctccacagcaacatgtctctaaacatggatttagaaggccttccttctttacgtgaactgttaactgatttacttatgagagatgatatatattctaaaagtaaaaatttaattctatcccaaggtattctgcaagtattaactcttttttcaaagatggaatttccaaatggcaatgatactatacttatcgaagatccttcttatacttattatataaactttttaaagtatgagaatatgaaagttagaactataaaaagagacgagaatggaattaatttatatgaacttgaagaaatatttaaaaaccaaagtattaagttcttttacacgattcctagaaatcataaccctttaggcacttattattcattaaatcaaagaaaagcaataatgaagcttgcccatacttacaatgtatatgttatcgaagatgattatttttcagatttaagtaccttgtcaagatattcacctatttattattattcggattttagaaattgtatatatcttagaagcttttctaagacaataccttatataagaattggtgtagctataattcctgatgatttaattaataactttaaggaatggatgagatactcatattatttttcatattacatgccatcattggtgtctcaagcaacacttgagtcatatattaaaagttctatctataataagcatgtaaatatcctttcaaataatttaaaagatattttaaagttgcttagaaaaactacttctaattgggatcctaatttagttaagaccataggaggaaattcaggttattattcaactataaaattggcgccaaatatagattgtaataagttattatttaatttgaaatcaagaaacgttattcttacaagcaattcatcttcatattacaatttagaaaactttgataatagtttacgacttagtattgcaagaattaattccacagatttaaaattagttttgaatattatttatgaagaaataataaaattatcacaaatacaataataaaagatttaagggttatattcgctcccttaaatcttttattatattaagcaaattgtggtaaataatctttatgtgcctctagtaattcatctaataatatttttgccatcttctctgatggaattaatggatttatagttaacgcaagaagtgctttatgataatccccttcaactgctgcttcaaccactaaacgttcaaaggattttattgtttgaaccaatccattcacacttactggtaatttccccatagcaataggtttaggcccatccttagttataatacatgaaatctcaactgctgagtcattctctattccttcaatagctccattgtttttagtattaactggttgaatatcccctttgttattataaatagagttaattagtctgcaagctgcatctgaataatatgctccacctcttttttctaattgtggcggcttaatatctaaattttcatctttatatagttcaaataaatcattttctagtttcttaactacttctgctctagtttctcccttagaaaattcctttaattcttcttcaagcatatctgctgtttgaaaataatacctatgatatgggcatggcatcattctaagcgctttaataaattctggattccactctaggtcttgaatattttttacaattgaacctaatttcccatccgctaatgagtccactactttatcagtaattttttcaccatctaaataaatttctttaccaaataccatgtgatttaggcctatgaaatccatagtaatcctgttatgatctacttcaagcatgtccgctactgctttttccattccaattggaacattacataatccaataatctttttattctttccatatctaagaagagcttctgttaccattcctgcaggatttgtaaaatttacaagccatgcatttggacatagctctgacatatctttatctatatctaaaattacaggtattgttcttagtgctttaaacatacctccagcaccattggtttcttgtcctattacaccatgacttaatggtattctttcatcctgaatcctagcatctaacagaccaactcttaattgtgtagttacaaaatccgcatcctttaatgcttctcttctgtttaaagtcaaatgaatttccataggtacaccagcttttttaaccattcttttagctaatttccctacgatatttaatttttcttttccgctttcaatatcaactagccataattcccttaccggaagttcattatatctttttataaacccttccactaattctggagtatagctcgatcccccaccaattgttactattttaattcctttttccatcagatatcctcctatatattataaaatataagcataatcatttttaaattttgatttaataatttaagtatttgtatacttattttttattctttaagtaatttatttagatactcttataggaaatttcctcttctatactttatataaaaattgtattttctcttattttcttaaaattctaacagatctgttttctatatcgtaactcaatataattccctattcaataatataaaaacacaactgtgctagtacagttgtgtttttattaaatccagaagcactttaatagcaaaatactatttatcaatatatttaataatatctttaccaaaaaccttaactactattcccaaataattgtaacctttaaatgttttgcttcatatatgagaatcatttttaaattttagttatatacctctaaaatttattaattcaatgtttttttcgttaataaactgtattacttctttattagttaatgtttctaattcctttactcttgggtatgcatatgaactactactaataatcttagaatcaagataccctggatggcacataatttctaaagaatctacattaatattatcttccaaaatgtttattaacattttgggttcaatcatagaaatattataaaaactatcaacaaacttagttgttgttttaatactttcatacttttcttctctaattgccttaatatgcctaactggtatattatactcctttgctaactcagcaactacctcaaaaacactctcaatagaatgtacatgatgatgtgtatctatatgtgttggaactatcccaagagataaaaacttttcaaattgttttctaaattcccttcgtatatcttcaatacacgctgactcaacaatattatcatattttaaaaaattcccttcattatcaactaaggttttcacgttctttgataaaggtctgcctgcggtaagaactaggtgaattcctacacctaatttaggattttcttttgccaaattaaccgcatgttccgttgtctccatattacacattaatgtggtagatgttactattccatttttgaatccttcaattatacctaaattaattgcttttgaaataccaaaatcatctgcattcattattaatctcatatctttctctactccttatatttaatgttttagtctaatagaaatatatttataataccataataatccacattatttttatcagcaatagctctagataataatcacattatacgtatctcttattttaagtcaggatatatttcatattataaacctaagacatatcccactgcatatatatgctaaactagtattacaatataatattcaaggattcatcaattattttactttttttctcttcactaatcatatcaagatattccttaagcttttcatgccactccttctcactttcagttccataatccacatccataactgaatcatttggaatatatttaagtagcaatgatatttcaaaatcatctaagaccttaaatatctcaataaattcataatcaaatatgcaatcagagccaagaacatctactaaatccctaagactatgaatttcttcccttataatttgtatcttattctctactttatcacactctctaatttcttcagttatatccttaaatctgctgttctctaaactttctccatcttcatatctaattaaattttcatttgcatttttaaatgttataaatgtattttccaatttattaatttcaatattcttcttaatatttggcataatcttgtaaatagttttatttatataattaataaaatttatatcatttatagtaaactccttgaaaatatcttcaactatcatagatattacttcattaaattcctcttctttcaattttcctaatttatttttaagataacgtttttcaatatctgttatatctagagttattccttctttccctaatagcatacatcctaaataattagtcagaactaattcaaagatatttattaatatatgatctgaatttttatcaaaacttttaagcaaattttcaatttcatgactatcaaagtgggaacaaaattgattttcaaagtctatttttcttaaatattcgtttatatattctattcctactaaatccatctcatctatagctagtggataatctatagacccctgagtttcatgagctgcgaatctactatcgtattctataaaaaataatggaattccataatttatagtatctatatacgcataattacctgtctttaatttatttttttgcacgttctttaatagttctttactttcttctattttaatctttaaaactttttccccttcagaaaataaatatttcattgtattttcttttattaacgtaatccgttcctttattgatgttttatcttttagaaagctccccatagtataataaattgataacattatttgctctgcaacttcaactcttactgaatagctttcagcttttgtataataatttactgtttctcttaaaatatctaatatttgaacttgaatattttctagttctttatcatttaatatataatttgaatgaagtacttgtagtaacgattgaaaataatattccttacttaataaattttcaatggtattatttctgtcagcaatataattatccattataactcttcatctccatccacatttaaataatcagaaaccccatatttaatattatgagctatagtatccaaatacttatatctaagtagctctaaagatccttggcattcattatcaaaataatctttcattaaattaattaattcaatgtcacctatttcttccatagtttcatttttataataataaaatgtttctataagctcctctatagtttcaatataattgtattgagaaatatatggcgaatcgcaaaaggttgatattatttgctttattatccctccgccaaattcaactctgccattcttacttaaagcttcgcttcttatctcaactatctctttaacattttcttcactaagctttaatccatattccaatgtctcctcattacactgaagaatatcttgaaaagtttgtttacttattatagaatcagaaatagacataagataatttttcataaataacaccatccaaactttttttaattattgacttttctttttaaatatgttatgattattatatatagataaactaagtaatcttctaacaattaattgtatcatcggctatccggaaagtcaatgatgtttttttatgcccattttgtataaatagtaacttttatacattaatataaaatccttaataattaaaaagactgttaaatatctagtaaattttgatatttaacagccttttttaattattagcttcaaatttgacaattctgattttttcaatagatacccaaattctgaacacttaacatcctaaaaaaatgtctgtcttcatttatacaggttaatctctcatcaagtttttacttagcaatctatttagataacacaattatataacccaatcaccattcttaaatactgggatcttttctccatcagcggtttcacctattatttcaagttcctctgatcctaccataaaatctacatgagttaatgaatcattagctccattttttataagatcttcttctgacatagtatctccatcttttaagcaagttggatatgcttttccaaaagcaaaatggcatgatgcattttcatcaaataatgtattaaagaaaattagtcctgaatttgatataggtgagttatatccaactaaggcaacctctcccaaatatctagcaccttcatctgtatctaataatccttttaatatttcttctcctttttctgcagtaaagtcaactatcttaccatctttcaatgtcaacttaaagttatcaattaaatttcctccatagttcaatggctttttactagtaacatagccgtttactccctctctctttgggagggtgaatacttcttctgtcggtatattagcaacaaagttaataccatctttagaattctcttcaccacttaaccatagatgtccttctggaagttctacagttaggtctgtgccttctgatttataataaagatatttaaaattcttttcatttaaataatcttttctattttttaatttttctaaatgttcattccatgcttcaataggtgattccctatcagctcttacgatactaaaaattgagtcccaaagattttctactgcatctgcttctgataaatcagggaatacttttcttgcccatccctttgtaggtattgaaacaacacaccattgaacttcattactcatcatagcagcactaacatctttcatagctctatttgctgtttttgctaaagtggaaatcttattaggatctactccgcttaatagctctggatctctagcagaaatacttataaatgcagttttctcctttataagttgttcccttgataatacagcatgtttgggctccctttcaaaactctccataggagctttattgtattttatcaaggcaagttcttcatcattgtaatcaactataacattaatagcaccagcttcataagcttcttctgctatcattctagcaaactctgcacattctattggtgaatttataagcaattgttgcttatcttgtaagttgatccccttcttaacaacaagctctgcatactttcttaatgtatctatattcattttgctttcctccacatttttccttaaattttattatcataattatagcatatcttactctataagtttttatttaaaacctgcagaatatactttcatttatatctatttcgataaatctaatataaaaatataacatttattaaaatagaaactcagatttcattagaaattatctgtttaataaaatatataagctttataacaattattcgtatttaaaaagcccgatctaatataaatcgggccttgattaataaaatgtaattacttttgcttatgttatttttatagaaaatctttcataaattccttgatcttatctattttaacttcactttgaacaagtgattctccattttttaaaaagctaactttgtcatgaaacgtaggtttctcttctttatataaaattcctaaaggaatcttatctccccactccattgatttttcaatagccttcaatttattgcttggatcgtattcttttccaagtttataaactcttttattataccattggaatgtattaactttattaaatgacacacatggctgtaaaatatcaacaagagcgtatcctttatgattaatagcttcaatcataactttcttcaaatgctccttatccccgctaaatgctctagcaacaaaaccagcaccaagcgttattgcaagcgctactggattcataggaatgttatttgacccatttggctgaacatctgttacatgtccgatgtcagttgtaggtgatgcttgcccttttgttaacccatatatttggttatcgtgaacaaaatgtgttatatctacattacgcctaatattatgaataaagtgatttcctccttctccataggaatccccttctcctgtatttactattacagttaatcttttatttacaatctttgctgcaactgcaggtggtaatgatcttccatgaagtccacaaaatccattagtatttatatattgaggtgttttagcagcttggcctattccaccaacaataagcacttcgtgtggagccttacctaaatctataagtgcttgctttagagcatcaagaatattatgatccccacatcctggacaccaagctgtttctgatgttagaaatatttcattattcattattgctcacctccaactagcttactgtatatttcttgagatgaaataggtcttccatcatattttaagatactgttattgcattcaatacctgtatattctctaataagtcctgatagttgtcctgtcgcattttgctctatgtttattatattttttacttttttcgcatacttcctaagatttttctcaggcaaaggccagacatccccaaatactaatgagcagtatttattattatttcccgaacgtccattaagaagttttatagcttccttaaccggactatataatgatccccatgctaaaagtaaagtatctgcattttcttcaccgatgaattcaggttctaaaagttcttcttttaaatattccattttccttagtctcttatcattcattttatttcttacttcacctgattcagtaatatgtccatattcatcatgttcatcactatctaccaatactgttaatcctggtattttacctggcgttatacgtggcgaaacacctgtctttgttaattcataacgcttataatctttagcatttatatattcatcatcttttaaatacctttctattttaatcttatcaaaattaaaaggctttacagttcttatactatcagctaaaaactgatctccaagtaaaataactggcatttgatacttatcagcaagattaaatgctcttatagtttgataaaatgcatcttcaggttcccttaatgctattaccattttaggtatttcccctggtgatgaggatataacaaatttcaaatctgcttgttctgttcttgttggcaaacctgtagtaggcccaggtctttgtatttctgctattacaagaggtacctcaagcattcccgataagcctacagcctctaccattagcgcaaatcctcctccagacgatcctgtcattgctctaacacctgcataagaggctccaatagccatatttattgaagcaatttcatcttcagcctgttcaactacaatttctgcttcattcatctttgaagcaagataattcattatacttgtagatggtgtcattggataagcggaataaaatttacatcctgctgcaatagccccaagagcaatagcatcatttcctccaattaaaatactctcatcattgttcttaggttgaatttgatactttggtgcaactagcttgtatccttcttcaaatgcattgaaatttttactggcgatttcctctttgaacttttctgttaatacttccttaatgccacttaaatccaaattaaataactttacaaaagcacccaaagctatgctaccatatacttttgaatttccaatgctcttagctaaagctttaagagtaagaccaaagaatcttttatcctcaagcttaatttgctcgtcagcaattataaacccatcttcctttaatctgccgatgtgaagatcaattgtttctttgtctaaagcgattatcccatcgatatcatcccaatgggaatttatttgctcatttccaaagcgtatttgaaaaaaattatgcccgcctcttacccttgacatatagtcttgtatagtaaatatttcaaagccttttctttttaaaactttctctaatatagaggaaatggtctccattcctaatccagctgctcctccaattaaaatattataaatcataaaattcctcccttctaaaaacacttataaattgcatgctgataatattttattaatgtttctcattattatgactagataaatacatataatctacttatttttcatataacaaaatctacttataatcatatgttaatattaatactaatttattaataaggtgattattatcaagaaatattctaatttagatatagataatcttgagtttttaggatctggtacgcaaggaaaggtttataaaatagattcacaaaaatgtataaagatttttaagaaaaagcaaatatgttcagatgaaatagaaactctagttatggcacaaatggatttgcattttcctagactttatgcctttggtgaaacttatataatacgcgaatatattgatggagtagaacttgataaatacttatcatctaatccactatctgagaacattttccaaaaaattatagaactatatgaagcgatggattcagtaggctataacagattagatgctgcaccatttcatatttttataacctcattagatgaaattaagttaattgatacagctagagctatgaaaaagcggactatatatcctgctttaatcattgaatgtttatccgatttaggatacaaaaaagattttttaaattttgtcaaatacaataaacccgaactctataaaaaatggttaagaagtaaaaaataaattattaataaatattttataatattttttgaggagagtagaaatgagatttatagtctttggtgattctaaaggtaaagaaaaaggaataaacgaaaaagttctaaatacgctaatgaaagaaacatgcaaattggatcctactccaaaattcatcgtaatttgcggagattctgttgccggcagtaataaagaagatgtttttaattttcaactcaaaagactaagaggaatagtagaaaagtatcaccctaatattcccttacttccagtagtcggtaatcatgaagtgaatatagaacctatagatgatagattcgaaaagatacttgatcaaatttattgcgacttaaatccatgtgatttccttgaaggttataatagaacagcttattacaaagattttgaagatactaggcttataatccttaatgccttccattacggttcaactcataaaatcagtgagtaccagcttaagtggttcgaaaatactgcttctaaatataaaaaaaacaaactagtttttgttcattctccggcttatcctactggagctcatctcgggcattgcctcgatttataccctaaatatagagatgccttttggagaattgtagataagtgcaatatagatatagttttctctggacatgagcataactattcaagaagaatcatagacgattcctttagcaacgggaattcttgctatgaaagaaaagttaatcaagtaatcactggtggtggtggcgaaaagcttagagataaatataaaagtaagcaaggaatagtagtcgctcctatagctgtataccactatttagttgtagatatagatgctgattacattaaagtatgtgcaattagcttaaaaggtaagaaattagatgaatttattatagttaaaacaaatttctagcgggtaaattgagatatcatgggaaattatacatctgtgtagagaatagtctgcaaaactttatgaagatgattaaatgcattattaagccaagtgagcatagactatttctttataccagaagataatattactatgtatttcccaggacatactggtgaagctaaaactaattcgacatttgaagatttaagcatttcatcacatgcttccattccctttgcaatacttttatattcaagtaatccaataagaccttctcattgctgtctcttcccctttcatagatttaataatgcatatattatttaactataactatactttcatctgttatttcttttataattccatctatgcttgcatgaatcttagctcctagcttcccacctgaaatgtctcctataaaatcacctttttgaactttatctccaacttcatctataggttcagcttttgcacctatatgttgtgatcttaatattgtaactttttgagaaaaaatattaattccataatatgataaatattttccattaaacaatgaagtatgttttccaatagtaatctgctaggtaaacatagtgacaaagtataaagggaaatatattatcataactgactagattatcttatattaaatgaatctaccataacacacctacgttttctgcagaaagaccttgctgttgttaaaccttcaccagtagggcctgcaatagtaaatgttgtagttccttccccaccaacacctattccagcataagatggtgcatttttgacaaaaatagttgtttctaaaagtcttgccattttagtgagcttgtcaacattctttgaatgcattatagctgtatgtctatttccatgctcagcaatgtaagcacattcaatagcctcatctacatcttttgttcttacaataggtagaataggcatcatcatttcttccaaaacgaaatgatgatttttctctacttccattataattactttaatattctcgtctactgaaataccaagcttatttaagatatatggtgcactctttcctacaaaagaaaccttaggtccgccattttcatttgtaactaaatctaaaagtttttgaattaagtttctatctttaatttcataagctccattcagtttcatgtaatgtattaaataatcacatatttgatcaaccgcaaagacttctttttcagctatacatggaacattattatcaaagctgcatccattaacaatatcaatagcggctttttctatatcagcagtttcatcaacaacaacaggaggatttccagcacctgctccaatagctttttttcctgtggacataaccttagtaacaatagcaggtccaccagttgctacgagcattcggatttttggatgctccatcataatatttgtattttcaatagaaggttccttaactgttgctataagattatcaggagcccctgcctcttctaatgctttatttaacatagttactaattttattgaaacattttttgctcttggatgtgggctaaacactactgtatttccaccagcaaccatagaaatagaattacaaatgatagtttcagtaggatttgtagtaggagtaatagctccaattactccaaatggacaatattcaactagagtaagtccattatcccctgtcatagcctctgtagttaaatcttctgttcctggtgttttttcggctgctactctatttttaattaatttgtgttcatatttaccgatttctgtttcttcaacagacattcttgaaatcaattctaaattttcttttttcagaatagtagcttttatagtatccacatatttttgtctgtccgtcatcgaagcatttaataattgtttttgtgctacaaatgaagcttcaactgccgcatccatagtttcaaaaatgccgtaattttttatagaatcaaatttatccaaatttaataagtttttatttttcacttcctctattgcttgtctaactagtttttcaactaaaactacatctacatccattaatatacacctctttttttattttcatcctctattacaattcattgcaatgcctaaaggcgttactaataaaggctcattaaactttattgttttaatacctatttctttttcaaaaacgtcgttaaattcctcaaaggatgaagcccctccaacaacgtaaatttctgatacgtcataaccgtttaaatatctctttactattgatgccattttttgaactacaggtttaataatcggaaatatatctttatcttttttcggatctttctttaattcttctgcttccttaattgatattccataatatcccgcaagtacaagtgtcatatgtgtacccccagttgcttcatcagcagtaaaaattacttgtccatccttcaatatactaattcctgttgttccacctccaacatcaacaactgcaccgtccttaatgtttatcaccctagctgccgctgttggttcatccacaacatttataacttcaaatcctgctgcttctacaacattggatatacactttacattaccggaaataattcctggtggtacagcagttgctgctgttagaagctctctaccaattatttcttcaacctcagcttttaaacttttaactatatttatagcacctacaaaatctactacaattccatctttaacaacagtagaagggtaagtagctcctgcaataggattattattagaatctacaactgatacaacaatattggccgttcctaggtctactcccgttttaagctctccttcaaatgaattacttctattttcagcaatcaaattggagaattctgttaatatgtcactatttattaacattcttatctctcctatcataattaatttgtaactaactgcttacttcccatgcaggataacaaagtcatcattttttaaagcacaagcattagcttcatcaacatccacatgcatttcaagagaagacttatcagaaacccttattaaaacattacctaagataccatgtctttcgcccatagtttccacttcaacaatttccttatctttcactcccattttctcagcatattcaggtgtcatatgaatatgtcttaaagcaatgattgtcccgtttggaattttcacactccctttaggtcctataatttcaagtcctggagtattttctagttgtcctgattctttaattggaggttttacccccaacctaaaactatctgtcattgaaacttcaacctgactttcacttcttataggccctaaaatacgaacattttcaaattcacctttaggacctctaatagttacagtttcattagctgcaaattgtcctggttgtttcaaatcgatttttttagttaagctatatcctagaccatatagaatatctaaatccttttgacttaggtgcacatgcctatttgatacgccaataggaattttataattctctaatgctttgattttatctacaactattttagtaattaactttactacattttcgctatgcattttatcaactcactctctagatatcctataaaaactctataaagtttttggtaatatcttttctgtatcaatatgtggtcttggaataacatgttgcgaaatcacttcaccaacatttcttgcagctgcaactccagcatctacagccgcttttactgctccaacatccccgcgaaccattacagttacaagccctgatccaattttttcatatccaacaagcataacattcgctgcctttgtcattgcatcagctgcttctattgcactaactaagccttttgtttcaaccattcctaaagcttcattattcataataaattcctccttattttttaacatataaatctaaatgaacatcgcattaataataaacattgaaataaatattactgtagctggtgggtctatataagtatcacaataactgttaataacttttcctgcaattaaccaagctattgcacaggcaattcctacgcaaacacctataaatatatttcctgtcataaccgtagccgctgcagctggtaaagtgatatgatgtgttaccggaactccaaaaccagtctgcaagaaaatcaatgaagttgcactaattccaaagcaaacaataggatacatagacataactttaggtgatacacctgaattaaccattgatatagcaatgccgcttacaacaattccaactgttaatccaagcacaatatgattaactaatgtttttgtatcaggaagccaatctcttttgcctgccccagtatacttaccaactggacctgtcttaccaaatactaatctcgaaatcatcaaaacggtgaaaacagaaatagcaggaaggtctgttttaaagttcaatactgcaccataaacatagtgacataaaaaacctataactccgaataaacctccaacgagtattactgtataatcattaattgaatataatggtgttaatacatcgtttgcattgctcaatgtttttcttttattcccagcaaatgctgctgccgctactcctgctgcaaatgcaatatgaggacctaaaaaagaaccaaaagtaatatttccaatcgttggttcagcaatacctgctaatcctaaaattcctccaacaactgctaaaattcccgttaaaataaaagcaggtattgatccaagaagtgctcctaaagctcctccaccaaatgctgctattaatgcatagatattcataacatcaaactccttaaatactatttaaaattttccaaaacacattgcattgccttctttctcaagatttccactttatcagttttttcccatttaaaatttttattttcacgcccaaaatgaccataggcggctgtattaaaaaattgtggtttctttaaatcaagttgctctaaaatattagcaaccgaaaaagaaaaagtctctttaattatttttcttatatctttaatatctactttctcagttccaaatgtattaatagttattgcttctggttcagcttctccaattacatagcttaaggataattcaaccttatcagccagctttgcagcaaccatattttttgccacataccttgccatatatgctgctgatctatctacttttgtggggtcttttcctgaaaaggctccaccaccatgtcttccaattccaccataagtatctaccataatttttcgtcccgttaaacccgtatcgcctgcaggaccacctataacaaatcttccggtaggattaatatgtatcttcgtatcatatttaatccacctgctatcaataacattacgaataacctcatattcaataacatttttcatataatcatagtcaatatctggatcatgttgaattgaaattactatgcttgaaatgttaattggattcccattactatcatatttcattgtaatctgagatttaccatcaggacgaatccaaggaattccttcactttttctaagtttggataacctcattgtaagtttattggctaaatcacacgttaatggcatataattatcagtctcattaaaggcatacccgtacataattccttgatcaccagctcctaatatttctttagtaatcttcctgttttcttctattttgtcaacacctaaagcaatatctggagactgtttattgatatttgtaaacactaggcaggtcttataatcaaaaccatattcttctttcgtataaccaatattttttacaacctctcttgcaacatcaacaatattcacctttgcatttgaagtaacctctcctgctatcataattgtattctttgagaccatggtttccactgcgacccttgaattattgtcctgtgctaaatatgcatctaaaattccatccgatatctgatcgcaaattttatcaggatgtccttcagttacagattctgatgtaacaaaatattcgctcatgttttatcacctaccttgattttctgattctacaacatttttttatatttatagaccgttgtattttcatacttcttaaacactttgctaaaataactgctctcattatatccaagtttaaatgcaacatccgtaatacttaaatcagtaaaacaaaaataacttttcgccatactaatctttctcatgtgcaaatattccataacacttatgttaaactgccttttaaaaattctacttaaatagccttggcttactgaacaattattaattatctcatttaacccaatctcttcttcaatatgattttcaatataactaaacacatcatttaatattgaatacttttttatgctattttgttgaaaaacataattcataactttgaataaccaaaattcgaaaaatcttttctcattgcctaaatgttcttccatcggaaatagctcattaagcttttggggctttttgtttagcagttggacagaattaataagattttctcctatttgcataaattcttctcttagtaactttgtatcagactttttagaagaacacatctcatctattatattaggaatttcataatacatttttttgtaatttttttctttaatcattaaaagtagactatcatacttattcccttctatctcacttttaacattctgattctcatctttataattactcaataatttttctatttgagaaaaggatacaggttttgatatatactctttaactttagtttttaaagcttcaattgcaaaatcaaaactgttataagatgatacaataaaaatagtggtacttggattaatggtgtatatctttttactagactctatccctgattcacccggcatcatgatgtccataaaaacaatatctattttattatttttacatatctcaactgcctgctcaccgctaccaacagaatataagacctcaaatccttcaactttagatatcataacctttaaagatgctctcattagtggttcatcatctgcaattaatactccatacatatctagacattcctttcttcgaattttattggaaatcttataatactccttgtaccttctccttcagtattttcaataaaggtatcatacttttcaccaaataatgttatgagcttttctcttgcattggaaatgcttatctgaatagattctccctcataaccacctttatatatcttgaatttcttagctattgcctcatcactaaatccagatccattgtcagaaatacatataacaacatctttaccttcataataagaagttaccgctacttttccaccattattctttgttgcaattccataaaaaacagcatattccacaaatggcataataatatggcttgggattctttgataatgcattttttcattcatgttaattgaatattgaagcaaatttccatacttaactttctgaatcttcaaatatttttcaatattttcgaattcatctgataaatttgtatagctcttttgactacctaaactctgctttaaataatctgcaaacattacaatcatttcatttgtcttaggtgaatcttcaatggctgctaaattagaaatcgaattcaaaacattgattaaaaaatgtgggtttaattgagctctgagatttataagttcattttttttcaatgcattttctatttcaagttcttttttagaattatttaattcctcaacttccttttttaatgagtttttttgcatcaatctatatgcttctttctctcccaattgatttataataagagaaattaattccgcaacactcataaatttttcataatcatataattgaacagactcaaacaaacttaacatatgcttatcttccctataattttgggaatgttttattacattttcaagtttacttactcctgaaggtgcatctaagcatctcacttgtccaccaataaagccacctaggtaatggcctctaacgattataggtattgcaatttcaagtaatccgcaagggcaaaaatatacacaattcttttgcgtaactgctgcctgaattccaccaaaagcatcggaagacttacagacacattctgctttcttattttttctaatctcgctacaaaattctgtgaaagaagtcattttggtaattggttcacctttataatcaacagtaacaaatgcaaggcctgttgctctagatatcttttcctggatatcttctaatgtttctttgccgaataaattgattatattaaatttattaattaaattctcatcaatctgcgtattgctgtcaacgatttcaccttttgttctatcatggaattcatgcatttaacccactccttcatacatcacaagaatatatttttctaaatatattctatcatactaagattaggttagtacactaattgaagcagtcgttccataccaaattttgtaatatctcttctatttgcttgtgtacatccatcctttattgcattttcagctataattgattttacattgtcaaattcatttttatctacaccacactcatttaagttttgaggcatattcataatcttcgtcagtgttttaatatatgtttttaaaacttcaactgcaaattcatcactttgtgctttttccaccataccagttttataaactaatttagcgtatttctttaaaatctcatgatcttcacagttataatctattacaatatttaccaaaattgaattggcaagtccgtgtggaatatgaaatctacctcctaattgatgagcaatgctatgatttataccaagacccgctatattaaaagccatacctgccaaattagatgcttcatgcatttttttccttgctgcgatgtcattaccttgtttatagcactgtactaaagattcaatgaccaattcaacagctttttcagctaatgcatctgaatatacatttgcatcttttgcaacatatgcttctattgcgtgagttaaaacgtctattcctgtatttgcagtaatgtctgctggaacagaaactgttagattggcatctaagatcgcttcatctggcagcatcacatcatcaaaaataatatgctttgtttttgtctcagtatcagtaactactgtcgctgacgttacctcagatccagttccacttgtagttggaattgctataaaattaactttatcaataaagttttgctgttttgcgaaataaataattcccttcgctgtatctatagcagagcctccaccatacgcaataactatgctaggattatttttcttaataagagcaacaccttttccaattacatttagtggcgggtctggaataacctcatcaaaaacagaaacattattactgtcattaataaaactcaatagaccttttacgctgccgtttttcacaagaaattgatcacataccacacagatgtctgtatttttaaatttctctaggcgcttcagagaattttctcctgaatatatttttgttttaatatacacacttttcaaaacttcctctcctttcctacctaattgaaaaaccatttgttagggaacatcgtcttcttcttgcaaaatgccttgctgtagtagtgccttctcctgtgattgtagcaattgtaaagctggtatcaccttcaccattacatccaattcctacgagtgaagcaccatttttaacaaatactgccgtctgcattacttttgctgctacatttaatctttcaattgattgagaatgaattgttgctgtgtgcctgaatccttgttctatttcaagtgctgtatccaaagctatttcaaaattctttactcttattaatggtacaagtggcataagcatttcaactgttgcaaatggatgctgctttatagtattaactacaataagcttaatatctctttcgcatacaattcctgcagcctttaaaatctcatttgcacttttaccttcaagagtcttatttaaagtcatgtcgcttgttaatgtagctactgtgagtttaagcatttcctcatcattatctacgtaatataccttatttctaacaagctcttctactaataaatcagcaatacttgaaacagccactatgcttttttctgaaatgcacattatattattatcaaaagaagctccccttacaatatctcttgcagcctttttaatgtcaccagtttcatcaacaatagtcgtaggattaccaggtccagctccaataacttttttgccagatgccattgcttgccgcaatacattattaccacctgtcgtaaccaccattgaaatatctggatgagtcataatttcattagtacaagtaattgaattttcatttaaggttacaactaaattatctattccacatctttctcttattgcaatactgattatctccgtaacatattttgacacttttattgctcttggatgtgggcaatgaacaactccatttcctgctgccagcatccctattgtattactaattaatgtggcacatggattagtacatggatgtatagcgcagataacaccataagatgatagttcatataatgtcatcccattatcccctgttctcacttcagtaattaagtcttctattcctggtgtttttttaatcgctagaataagtttctcaattttgtcatgcacattccccattccagtctcttcaactgtcatataagctatttcctcaaccctagataaaagcttttccttaatagaatcaataatctcttgtctttcattcaaagtaaatttgctatattgattatatgcacctaccgctgctaaaactgcatcgttcactgaagaaaaaacaccactttttaattcttcgttattaaaaaatttataatttatatccatgttaacctcctctcttgattatggaataaatgcatttttagacatcaattgtatctatgattccaataatagccatatcaatagcaaccttttgtttctctacgcgtacagctgaccctttacaaagtaatacataatcccctatacctgctccaacataatctgctgcaacttcttcgttgccaataaaattttcttttacatctattctctttacaatcattagcttatacccaactaatgaatcatcttttctcgtagctacaacattaccaacaacttttgccatatacatactaatcacagtcctttcctttaacagcttaaaaagtgctatctattattttcctttttttctactgctagtttttctagttctcttttcttctgactgagattgagaaatttctatatcagattgcttaagttgaataccatcttcttcaggttgattgatgtcttcattattttcaactactgcctcttcactttgagaagtatttccttcctgtttatcttccaacttttcaacttcctcagttaaagcctcttctaatacaactacgtgattttctaaatcttctttgttttcaacagtattattttcctcaataatattattttcttcacttacattactttcttcaattatattattctctgtgatagaagaagtatcttcttcctttttaggctgacaaaaagcgctttctatattattagaaggtcttggaattactttagatgaaacaaatgcgttgttttcaatagcaacttgtcttcctgctgtaactgcagctgttaccgctccaacatctcctgaaacttttatcgtcatgtacccggatcccttagtattttcaaggtcaattatattaacattagccgttttcgccatagcatctgcagctaaaatagcagttgataaacctattgtttcaactaaacctaatgcttctttcatcttgtcacctcactttaatctttattaatgtgtgcatctttttacaattttcatagaatacgagtaatctcgcattctatgaaaatctttattatactaaacgatacctttgaatatactctaacttcttctaataatttgaatgtttaaattttttgccttatccttagctaactcagttattatatctcctgaatataagaataattttttatcattcttatatctctctatttcctgaacagtaattattcttttgccatctttattatttaaaacctcatcatattctgtactttcatagaccacggaactattttcactaaatttattttcatattcttcaatttgaaaaatatcctttgttatttcaatattaaattccaacaaagtcttgtaataatttaatatcttattaatataactaggtggctctttgccagtaaatttttcaagtcctgaactgagtaaaataattctttgtcccttttccatacttttaaaaatccatctactttcaaaaatatcatcaatacataatgctgttttaactacgatttctctaggaactactggaaataccgtgagatattctgatgattcatcaaagtcagcattctttctacttattacggatttacatacactaaattttttcaaattacttaggtgaaaatcattatatattccatctggtaatactgcataaacttcatattcgtttcgcttatctaattcttcaaatagagatgaatacttgttattccactcttcagtaaatatcacatacagtttctttcggggaataaataaattctgtatagagctttcggcttgaagcaattgtatggctttaatcactaattctcttagtcttttctcatctatttccacgttatccctcctaagctctaaaagcaattactgtaatattttctttttgcataactatctcattataatttaaaatcttgttatacgaatttaggaagaatcttttcagtgtccatatgaggacgtggaataacatgaatagaaacaacttctccaactaatctagcagatgcagcccctgcatcagttgctgcttttacagcgccaacgtcaccacgaaccataactgttactagacctgagcctatcttttcatatcctattaaattaacatttgccgctttaaccatagcatctgctgcttctattgcagcaactaaccctttagtttcaaccattcctaatgcatctgaattcatattaaatacctccttaaattttaggtaaacttttgtttttttatatttaactttatatagaaaatattgaatttaatatattatattgataatgaaactcgactcacatgcgtccgctgagtactcacagagtaatcgaccatcatcaaatcatagcaccctacatagaaagttcgaatattcagatctttctatggaagctgattcctagcgtcatcagctaagttcgagaaaccaaatacaagatttggactctcacttatgcttaaatataaggtgttgtagttgatttaggttcatcacctaacgcaccaagtaattttttacctacttcaattgatgctcttacagcttgtcttacagctcccgaatcaccactgaaagttaatataacctcatttgagaaacttgttccgtttcctggtgaacagtaacctacaacatcaacattagcagcttttacagcaacatcagctaaaactgttccaattgcagctggtcctgcacaaaccattccaaaagctctgcctaatggcgttccaaaagctttttctaaacaataacttgctctagctgtgtattgaaattctaaatgtcctgcatcatttgcatacacatctccaaaatatttatctaagcttgaaagtgcaatttcaactgcacgtctagcatctgaaacatcatcagctcctatataaattaaacttccatgacctgctccgcctttagtatctctaggtaattcaacagaaataacttctgtatttgtagctttaacagcatcatcaacagccataatttgaggtccagctccagttcttccgcctatgataccgattgaacggtactttcctaatttcatagtttctgtaagtagtggatctacacttgcaattactagtccaatagtatctcctattgcagtacctacaaattcagtaacacctattcctccactagtatttttgcttatattttgagaatcattattttgatttttaacagatattccaagttcgctagaaacctgtttcattaccttttcaatcaattgttgatccattttgactcctccattctaaaattatatctttaaccaccaataatacatttaatcccctgatcctcaataatcttttttaagacttcaatctcatcttcttttaatgaccgtgagtctttcataagataatctcttccaaggagttcatatttattttcaccataagtatggtatggtaacaaatgaatcgtatcaatgttattcaaagttttagtaaacctacataattccaaaatatcttgaattgaagaattaaagtctggtattaatggtactctaactaccatttttgatatttcagaaattctctttgcattatttagaattatttcgttagaaactcctgtgtattttctgtgcaattcaagatttgtactcttaatatccataagcactaaatctatatatggaaatactttttcaatagtttctgaatttgcataacctgtagtttcaatagctgtatgccaaccttgtgctttacatgccttaaaaagttcttttgaaaaatctgactgtaatagtggttctcctcctgataaagtgattccaccaccagatcgtctataatttatagcatcttttttgagttcttttataacttgttcaatcgtcatttttttaccttttaagactaaagagcttgttggacaaacattgctacattcaccacatgctgtgcaaatttctctatttataaaacctttattattaacactaattgcatctattttgcaggctgaaatacatcttccacaatgaatacaattcgcagattgatacattatgacaggtttaattttctgtgattcaggattgctacaccataagcatgataaaggacatccttttaaaaaaactattgtacgaattcctgggccatcatgtatagagaatctctgtatatcaaatactgttccttccatactataattaattgtatccatcatgcacatctcccctaaccttataaagtgtaactttttcaaataaaacttataagggctaaaattttggcctacttattatgttcaaataagtttaaagtgaatgttcagtacgatttataatatcatcttgtacttcctttgctaatacagtaaattgagcactatagcctgcaacacgaacaaccaggtctttataattttctgggtgcttttgagcatctaataataattgcttatcaattacattaaattgaacatgcatacctttatgatcaaagtaacttcttattacagaagcaaagttttgtaatcctgtatctccagcaactgcagatggtaagaatttttgattataaagtgtaccatttgatgctacaaagtgatctaacttagcaacagaatttgctgctgcagttggacctgcacaatctttccctgctctaggagatacaccatcagcaagaggagtcttagctaatctaccatctggtaatgctccaacatctttaccaaataatacatttgcagatactgggtaaactccagcttggaattgtcctccacgtgggttagtatatttttcaacttcgaagcagtatatttgtgcacatttacgagcaaccatatcaacttcatctatatcattaccaaagcaaggagtactttcaagaagtcttcttatattatcaaaatctcctgaaactgttgttttaggtgaagtaaattctgaagagattctgctttgaatttcagatatatcaattgatccagaattacttaatattctcttaactgcttcatatatctgcatttcagtaacatccgcactgttatttcttgtactaactgcattaacgccagtatgtccaaagtttgcatctaatgctgcttttaattgatccattgcaatagttttatcttcaaatacatgtttttgaattgcatatacggaatctcctgtatctgctataccaaaagcttgtggtcctgtaaagttataaattgctccaccttcttgaactgatttacctcttcctatacaatcatcaaccattgctgataagaatggtaatggcgctctttcagcatgagcataatcaacacagttatctgcttcaacaaggtagtaaacaaagtattccatttgcttcttaaatgctgcatagaaatcatcgatactcttaaatgttgttatatctcctgtgataggacctaattgcttattccctactttaccattatttaatgtaatttctaataccttagctacattaaagaatgctgcatcatgccatccttctgtcttgtttggacattgaggttcaacgcagccgataatacaataattacgtgcatctctaagagtaacacctctattaactaatgcaggaattataacttcatcattgtacatagcaggtacgccaagtcctaatcttgcaacttcgcaagctcttaataagaattcgtctggagttccctgccatacacgtatagagaatgaaggtgctggtaatttaacatgagctgttgcttccatgcacatgtaagatacttcatttgtagcatcaagaccttcttcgttttgtcctccaacacataggttttggaatacagcataacctgcaaaagcttgagctgaaatttcatcacgagttttattaatatcatttagcttaatccaaatacaatcaactaactcttgagcaaattcttttgaaatatttttatcttctttaaggcaaggatacatatattgatcgaaacgtcctggtgaaattgagtgtccattagattcaatttgaaccattatttgaataaaccagaatgattggcaagcttcatagaagtttgttgcaccattttcaggtactctttcacagttagcagctatttgtaacaattctgcttttctagttgggttcaattctacagctgccatatctctagctttttgggcatatctatgtgcaaaatttattgctgcactataagaaattactacagcattataaaattgttgtttctttatataatctgggtcttttttgtccattttactcattgcttcaatgacttcagcaataatccctttaaacccttttcttaaaatctttccataatcaacacaaatgtgtcctacaccaccatagaaataatttcctacagtaaatactccatttgccatacagtcttttgcttcttgagacatgtaagaatcagcaagtgcacttgtagttttaccttcccaatatttaaatgcttcacttaattctgccgctgtttcttttggaatttggaatggatctgcaacccttgctcccattgtgtcaaattctttagctacccaatcataagaaaattctggacaaatttcagtagaacgtggatttttagtaattgcaccaactactaattcatcttcacgaatagtaataggtagattgttaaatattttttccacggctttagcacgtcttaatataggagatagaccttctgtttccttatatgattctgttacaagaaccgctctttctgattctacatacggaattgcatccacaatcattctttttaatctttcaaccctctcagttggttttgaaaaccctttagatatcatttataattccctcctcaaaaaaatcgtaaaaatttatttcgtgcaagttcattatatattagaggtatgaaatcgttgtaatacaattcaaactaaaatattgtaaaattaaaactataattgaatcttcacattgagagcatttaaaaaatctttcaagatggctgtatttcctggccaggctggtgcagttattaagttaccatctactactgtttcatctggatttttatctataaagactcctccagccataactacttctggcttaacagcaggataggcagttaactttcttcctttaattatatcagctgctgttaatatttgaattccatgacatatagcagctactggtttttttaattccataaagtattttacaatatcaataacgtgtgtattaagtctaaggtattctggtgctcttccccctgttatatataatccatcatattcttctaattttaaataattaaaagacatatttaatagaaagttatgtccaagcttttcagtataagtttgatgtccttcgaaatcatgtattgaagtctttatatattccccggcattcttttctggacaaactacattaactttaaaacctaacatttccaaggcttgatatggtaccatgacttcataatcttcagtaaaatcgccagctaacatcaaaatttttctcatattcaaatctctccttaaataaaatttgcactttttaaacctttacatgtaattttaagaccttttctatatgctacttttcccaaggcagtatatcgtcatcttcttttaaataatccaaaagatttggtattccttctcctgtatatgaacttatatgaaatatttttttacaaccggcaaggctaagccatgcttctgctaaatctgctcttgcattcttattatctatctgagtcacaattccaactacttctctagtcgctcctgctgcaatattagggctataaagagaatattcttcaagtgaactcattagaagcccaattacatcggcttcataggaatatagtattaacgctcgtgctagttttttattttcagcgtattcgccaggagtatctataataacatcaaaattatttatatattgggttttatgatatgtaatctcttttccttttaaagcttgagttaaagtagttttaccacagcctgtccttccaactaacataatctttctcataaaaccacctatgcctttgttagattacaaacattaaaccctagtgtattttttgcatagtttaagatagactctaaagcaattgccacatctgaaattgttcctgtaataatcaaagttccgctaaatctatcaataaaaccaatctctattgccgacgcttttattgctatatctgcagctattatagaagtttcacttggagtaacagtgagaataccaatagctgccctgttataatcaattttagggtctaaccctagcttcttataaataattgagtctgggctcgcaattacatgagccattgtaatttgttttcctggaacggtttcttgaattattctcattaaatcagttttatttatctgcaaatcatttaacttcatttttttcaccctctcgaagaaattgtaattttaaatacatttttttgataccactctgtttataatgttagcatatccctaaggactattaataataattttgtaactaaaaataagtaaatttaagtatagtctgaactttacttattatacaattgtaaattacctgtatcaaaattagttaaattatataatattattggagtaatttaacttaaatacattatataaataatatttataggagcgattatatgataaatgaagatttaataaaaaagttatcgagtgatctaattagttctataaagacgcctaagctaacactaaaaatggcaaaagaaattcttgaaaaagcagaaagaaaagctgagtcaataaatgttccagtagttatagcattagttgatgatggtggaaatcttatcgcccagcatagaatggataattcaatcttaataagtattaaagtttcctttaataaagcatatactgcacttgctttaaaaatgtctactgaaagatttaatgaactagtgcttcctggcaaacctctttatggcttagaaaatactggacatggcgaactttgtattttaggtggaggaataccaatagttagtaacggaaatatcattggtgctattggtgttagtggtggaagcattgatgaagatattcagatagctcaagccgcacttaaataatttaataaaatgtggtataatttctatatagggaaggagtgagattatatggataagtttgtaattgcaataacaagaacttgtggaagcggtgggacaacaataggaaaaatgttatctaaagatttgggtataaatatgtatgatcgcgaattattacgtttggcttcagatgacagtggtataaatgaagctctatttgctaatgcagacgaaggtgtaaaaaatagtttgctatataaggtttcaaagaaagtatataacggtgaattaatcccacctgaaagtaatgattttacttcaaatgacaatttgttcaattatcaggctaaggtgttacgtgaattagccgataaagaatcttatgttgtgatagggcgttgtgctgattatatcttaaaggataaaccaaatatatttaaaatttttattcatgcatcagaggattactgtattaagcatgaaatggatatccttggtgcttctgaaaaagaagcaattaaggaaattaagaaattaaataagtatagaagtgactactactattaccacactggcaataaatgggaggacgtaaaaaactatgatctgtctctagataccagcaagttcggcttcgagaaatgtgtaaaatatattaaggagtatgtaaagttacgtatggaattataaatcttccgacgtctttaaaaacatcttcaatataaaatcaaatttgccaactaaataataagtcaaagcactattatcgttattttttaacaaataacatagaatattaatagtatagtaattaatttataaaagccccatggtgaattatcttacaccatgaggctcttcttatctattattacataagcgcgaataatcctacaaatgctaaggcaataaaatacattggtacaggaatatcttttgatttacctgtaaataattttattaacacataagaaacaaatccaaatgctaacccatctgtaattgaatatgttaaaagagttaatatcaatgttaagaatacaggcattccttcagtgaaatctgagaaattaacctttgatattggttccatcattactgcacctaaaactattagaacaggcgctgtagcaaaacctggtatagcagttaaaattggtgaaaagaataatgacaagaagaataatccagatattgtaagaccagcaagtcctgttcttccgccttcagcaataccagctgctgactcaacaaatgctacaggtgtagatgttcctaaacatgcacctactacagatccaatagcatcagctgttaaaactttatctgcatttttaacattacctttttcgtctaagtatccagcttttgaagctaaaccaattagagttcctatactatcgaagacatctataaataacatagaaagaattgctggtattataccaattaccattgcactcttaaaatcgaattgcataaatattggagcaactgatggtggcatagatattattcctgtaggtaccttagcaactccaaaaatcattcctaatacatatacagaaaacattccaataatgaatgaaccttttacatttttataatataatactgatattataataacacctagaccagctaaaagtactgttggatcttttaaatttcctatcccaactaatgtagcttgattagcaacaatcatcttagcatcttgaagacctataaatgttataaagaaaccaataccaatactaattgcatattttaatgttggcggaacactatcaataatcacttgtctaattttaaatatgttaagcgccataaatataaatccttcgattaatgaagctgccaaagctgtttgccaagagaacttcattcccaaacaaattgtgaatgtgaaaagagcatttaaccccatacctggtgccataccaaatggataattagcaataagtgccataattacagtaccaataaaagaagccaatgcagttgcagtaaatacagctgatatatccatacctgattgacttaagatactaggatttactactaagatatacgccatagttaaaaaggttgttaaccctgctaacatttctgtcttaacagttgttttattttttgataagtgaaatattttttctaacataccgttctcctccgttgtttttaccgatttttttaatacattgtccaatatagattcctcctatttttgagctacacaaattaacactgctactccaaaataatacatctgttagtaggatgcactaacgttgaaaaaaatataaaagataataacaagaatttaaagatttcttgtaaaatataagcccctttgtttttttacaaaggggcttataagtaacaagtacctataaacacccatagtcagacaatttacggtagtccggtagaaacgcttgaaccttattttcaagcatatacgggtaaaatttcattatttatatatgacatactaataaattactttttgaatttccatacaatcatcgaatgttaaagcatagaataaataaaatgtaatatattcagtgcgtaatatatagctctttattttacatacttaatgctacaatactttggactataaatcaatagtaaattaaatattttatgtattttttttatttttatttatctaatgttcgtgtttttatatgttttgggcaaaaaaaatctaataatatagctataattcctcgtatgtaaaattattccgaatgttagtttttaatcaatcttattatttatatttattattctattaactttttatattctcctgtttactattaatcccaaataaacattatttttgacttaccttttaaattcttaatagcaaaaggattggtaattatagtatttactaccaatccttctacaatcaaatattcacatccgtatttctatgatattggagccataaggatttttcctgttcccctatatacgttaactaatccctctcctgagactgcggatccaattaaacttttactagacttttcaactctaaactctaaagaattagaccaagcaattgcaaaatttccatcaatccgtacctcatcattatctaatataaattctatcaattcgcttcttggaacaggactttctaacacggctatcccttcaccttttagacacaaattaaatagtccttcattcccaagcattgccgaagaaatgtttgtcctcgcaactatcttttgctgaaccttagattcacaagctaagaaaagtccatcatctaaaaccatccctccccattccgaaacttcctcaagcaaaatatgcctatatgttggttctaacattaataaaccatttccctgatattttggtttaatagcagactcttttgttacctttgatgatatagcttttccaaaaaaatcaccaattcccttaatatcagcggccatactcacagttcctgctgtccactgcattactccggaacttattgtgtaagcattaccattcaactcaattaaaacctgtctttttctaacattcatctctgaagcaaaatatgctgccattgcagttgtagtacttacgctcaaatcttttttatattcaagaaccttaacgcctcctcttgattctacaacttcaatatttttattttcaaaaagattcttacactttaccatcacaaactctctcctttattctttaactatatatttattatatagtctatgttaattaattacattattatgtatacaaataataatatagatttttccataggcatcaaacaattaattaagcttcttccacttataaaacgtaatattcagaaatacagtttgtagcttacttttttaaatataatgcaatttcaacaagcacctttatttagaaaatactaaaaactatatttactatttaattatatttactcaaactcaaataaaagcaacataaataaatcagataataaattaagccttataattaagatttaacttgctatctgatttatctttattactgtttaaataaacaatctccatttttctattttatagactctctatactccttaaaagccttagctatactagggttactttctataaattgtacaaaatcctgaaagcattttgatgtttctttacttacagtatgttctatcttttctgtttcatctaatatttctttatcaggaatatcaagtatccttagaaaattctcaataatatgatgcctgttaagaagtgcggcgccgagttttttaccactttcttcaagtattataattccatatttttcatatttcacaagtctttcctctgataatttctgtaccatccttgtggcagaaggaggttgaacattaagtgcatttgaaagttcattaattcttaaataccctttattcaatgacaatctatatatcatctcaaggtaatcttccatggacgctgttagcttgctgtcttctttcttcatatattcgttaaaagtatagaaatcatttttggccatatacttactcgctccccgtaataatctacttaataaattatatgctttgatggcgaaaaagttactttactgtaacatttagaatattattgcataacttataatataaaataatttagactaggctaagaaagttaactgataataactatcttaattacatataagattaaaaaaattagacacataaaaaataaagtaagaaaggtgatgtattttcttggagaacgaaagaggtttaagaagcactgatgtatctgttactggatttgttccatttaaaaaagacaggagtgctcgtattggtaagtttagtcaattgttaaaatatttaggtccagcttttattgtaagtgtagcatatatagatcctggaaactttgcaactaatattagtggaggatctgaatttggttatgcgttaatttgggtaattttatttagtaacttaatggctatctttttacagataatgtctgcaaaattaggaatagctacaggccacaaccttccagaaatgtgtgctaaagtattttctaaaaaaacaaattgggtattttggattgttgcagaaataggtgcaatggcaactgacttagcagaatttctaggtggaactttgggactatatttattgttccatataccaatgatatatgctggatttattacaggaataataacattcttcatttgctatatggaaaaatacggacaaaaagctatagaaataataatatcagttcttgttgcgataatctgtattgcctatacaatagaattatttcttgccaaacctgattggtttcaagtaggcattcatacaataattccatcactgccaaatagtcaggcattattaatcgcagtaggaatgcttggtgcaacagttatgcctcacgtaatataccttcattcacatttggttcagcatagaggaactgatacatccattgaaggaaaactaagacatttaaaaatggaaaaaattgatgtaacaatagctatgaatattgcctttatagtgaatgctgcaatggttattgtatctgctgctgtattcaataaaaatggattaattgttgatacaatggagcaagcccatgcatcattacaacctttactaggttcattatctagtggagcttttggaatagcgttacttgcctcaggtttgtcatcatctgctgtgggtactatggcaggtcaaacaattatgaagggttttgttaatttaagtataccaattaatattagaagacttataactatgatgcccgcattggctataattgcacttggaataaatccaatgaatgcccttgttttaagccaagtggcacttagcttcatattgccatttccgataatacaaatgctaactatagctaggcgtaaggatttaatgggtattatggcaaatcgcaattgggtaagaattttaggtattatcatcgcggctataatcatatcactaaatatggttctcttatatttaacatttactggccaagcttaatagtaatattttaggagtgttttgtgattaagtctattaacatgttaaaagataaaaactcttcttttcggtattccagagccttagaagagttttcctcccactattaatttaatctacacatttttgcacggacatcttgtaaaatacaacttaaatatctttatgtatttaatagatattagtaattaaacgtaatttcgcttaaaaattcttaatcaccacacaaattcacaaccatatattaaatataagtaataattaagaaggaatgacatctatgatattaattttatctgctttattatttagtttatcttctaacttagataatttagttataggtattgcatatggaataaaaaaaataagaatagacacaactgcaaatcttatagtagcacttgtaacttctaccggaacatttttatctatgttacttggaatatatgtatctaaatttttaccaagctttttatcaaatagcttaggtgctggaattattataattctaggattatactttgtaattcaaagtatttttaaacttataaataataaaaaaataaaagaactcgctttaaagaatactaatgatatgattgaatatgcagaaaaatcagatttagataagtcaggagatatagataaaaaagaagcctttttggtagcttttgcattaacatttaataactttggtacaggagttgctgcaagcgtgacaggcgttaatatagaacttacagtcatattaacatttatattaagtatttgtacacttaaacttggcgaaagagctggaaaccatatcttaggcgaatttttaggtaagtttgctccgttaatttcaggactcttacttataagcctcggagtcatagaattatttaactaatagatttaggttaatatggtttactaaaatcgtaacataataaattgaagaacaattataaattttaggaatgaaagtatttctataaacagaaatgctttcattctcaatttgttatataaaaaatcacttataaaaaatattaaatatcatattttataatttaagtcttttattgtagtctttaataattccaatagatttttttaattctgccttttcactttcaattaagtgatattcaacaagttccttcactccttgattatttaaaaccgctggaacacctgcatatgtgtcgctttcaccatactctccattaagcatagccgatacaggaataactttattttcatcacgtaatattgcttttacaatctgaacagtagttgctgcaataccaaaagtagttgcacctttagcatttacaatacgatatgctattttcttaatatcttccgttactgaatttaaattaaagccttttaatctcattttattgtcattgattatatctaaaaactttttacccccaactgtaatttgactccatggaattatctgcgaatctccatgttctcccatgcacaaagcatgaacactttgtggatcaacactcataacatcagctaaatgatatttcaaacgtgctgaatctagagctgttcctgttccaataactttgcttgctggtaaacctgaaagtttatgcacatagtatgacataacatctacaggatttgttatcacaactattatgcctgaaaatccacttttcatgatgttcggcactatattattcattattcctgcagctttttctaacatatctaatcttgtttgacctgtaatataaggtaacgcagctgcaatcacaactatatctgcatcagtgcattcttcgtattccccatttttcaccctcatcttacttccgctatatccaagagaatgctgtaaatccgttgcttcggcccatgatttttctttatttatatcaatcaatattaaatcatcacaagcatgattcattaccatgtcaaatgctaccgctgccccaacagaacccgttccaactattactactttacttcttccaattgccatatatatccccctatactaattttgctataaattattatatcaaaaatcaagctcattatcatctaaccaattccactttggcgtaaaaacttattccttaatccaatagctgcttccatctttttttctttctataaatccatactctattaaagctcttcttatggttgcgtaatcctcatacaccctctttagaatcctatttatctctttttcagaatattgctttccttttgaaaaatttcttgatatctcttctaatacaataatctttttcttttctctagctggataactctttaaaccaccattttcattcatatcttaaaacttacttgtattttctaatactttcagatttgagattccattattataaccctaaaataaaagcctatctctttgcatctgaatgctaatcttatttctgcattcctcataatcattagattttatctttttaaacttgtagtaatcaaaactctctatagtatctttaggcgcgaaattaaagattgctataatccaagctttagcattctgttttaacttaacaaataagtttcctattctatttttattcttcatatttatcttacctctactaattccaaatttcattccgtattttttataattcctttccttgaatactccctaaattctgtttcatgatatcccatttaactcactccttctttaatatttttaaagttttgaaacagcttgtttaacaataaactagcaccacaataacagtttactcttaccacaaatttaataatatgtaaaaaatgattataattaaactttcttaatttcagctccttaatttagaatcaacaaaaaaactgctgaaaataatttttaacgcaatatccaactataattatctagatattgagtcatatattatttacaacagtttctttataggatacttgaaccctgcaaatccttttatattatagatatgaactttgtttttacttaaccttgctttttagcactctacgtgctgattctaatttttcattatttaacttaaatataatttttcttatgctatcatctgaaagattatatgcctctgcaatatcaaaaactctttcgccttttattaatttttctgataaatttatctatccctaataaatttgttaactctttcaaatgttggcatagcttcttgagctcctagtgcggttgttgaaatagcgcctactgcatttccaaatattacgcattctttaagttctttttcttttgctagagcaaaagcaaatcctgcattaaaagaatctcccgctgctgttgtatctattgcatcaacagtaaatcccggaactctagtacatttatctttcttaataattgcagccccatcactacctaactttgcaactataacttttacccccttatcaaataatgtttgtgccgcttctgcaaaattttcttcactatttatctttcttccaattaaagtctccaactccgtttcattaggtgttaaataatccacatatttaaaaatttcatcaggaagatctaccgctggtgctggatcaagtattactgtcttaccttgtttttttagttttttcatagttgcaattactgtttctaatggaatttctaattgaaataagaatatatctgctctctcaatcaaactccatttgctttcaatataatttatatcaacttctgcattagctcctggaacaacaattatattattctctccattattacttacttgtatcactgctactccagaggacatacctttttcaatacttacaccatcatacttaacattattatttcttaaaacttctaaatatcttgttccatatatgtctccccctatttttcctaccataagcacatctgatcccaatctacctagtgctattgcttgattcccaccttttcctcctggaaatgtattaaattctttccccatgatagtctgtcctgccaaaggaaaattttctactgtagttactaaatccatatttaaacttccaattacacatagacttttcatataatacgctcctcttcctatatcaaattaaaacgaaatatatttctaatttaaatctagtgttattatatcataatttctattcctaaaaacttcactaactcagtacatatttcaacattccaataatcttgtattactcctattaaaatttctaaagttcgcttaaaccctaaacttagaaacaacgtttgataactcacttgaaatgttagccaaagtagtagcagatgcaaagaattcttcttgggttgctagctgttcttccactattgcagatatatctgtacttccttctagtgatttatttgaaatttcacatatattcttagatattttttcaattgcacttatttcattaaccattactaaaatttctcctgaaatattttttatttcaccgtcaacatcattgtttgactccacaatattcttaaatgctccttcaacttctaaaactttctccgagccactcattacctcattaaccgcaatggacatacttttaatcaatacattaatataattttgaatctgagttaaaattttagatatctctacagtagatgttgcagaacttgttgctagtttacgaatttcatctgatacaactgcaaatccttttccatattcacctgctctagctgcctcaatagcagcatttagagccaacaactccgtactagctgtaattttagaaatagtatctagtatcgtttctatttgcgatgaattctcttttaaaatgccagttaccgattgaatattcataacctgctccttaatagtgttcatttgatttaacatggatctaactttctcatttccaccttcagctattttaagagatttattggccgaagataaaacattatttgacttttcttttattgtgctattcattttaataagtctattaactgcttcttcagtcctttttgcttcactaaattgatactgcgaaccatcgacagcatcttgagtagatactgcaatctgattaactgctttgacactttccttcgccctatccttgatcatagtagaagattcatataaatccttactattattaataatccccttaatcatagttcttagattttttgtcatttcgttaaaagaacttgccaacaaagatacttcatcattagaatttactttatattcctctacctgtaagtttccattagcaatatcatcagctaatagtacaattttattcaatgattttcctaactttatcgaaaagaaaatagcaaaaattatgctaaaaaaacctatggatactatgaagacaataattaatactcctgtaaaattagattttttagccaaatctgatctagctctattttgttgatctaattctactgacatatattcctgcatgctattttgaattagcttagaaaacctgttcataagtttatttttttccaccatttcagtggcattcttactttcaaaaagttttatattttcctctgaatacgactctaacattctgcttacggcatcaaaagatttcagtgccttctctccagatagattatctttaataaactcttgatttttattaatatttataaacttatcatctataatttttttattctccgctgttgggtttaatatatattttgatatatcctgaggaattgagtttattaaaattattatatcattcgccataacgtttttttcaatcataatattttcttgtaccaagtaaaacctcatagtcatataagatgttactcccactgtagatattaaaaatactattaatgagaagcttataataagctttgattttattgttaagggaattctttctggaactgagcttatttttttcatcttgaagtttctccttcctcttatgtcattgattctgtaaaattttcagatctaatattaacttctaattaatatctatatattatttaattggtgctccaaaagtatattcataccattgatcaggtgtttgggttttcaatccaaatatagtatctccgtcttttgtcaccataggtatattaggtgtaataatatcatgtggcattgaaccatttttagtgattatattaagtaaagttctcattccaatatcagatattaaaggcgtgtatggtgtattcacttcaaacaatccatcttttacggatgtaattgcctttttagaatcatcaattgataaaaacatcatctttttagcatcctttctgctatttaatctattagcattctttgatgcatcataagcagcaatagcttcatgatcacctgttccaaatacaacatcaatagaaggatattcatttaatgctaattgcatattggcaagtgcttctgctgtattatcatcatcatgatatgattttaatatatgaatatcagggaaataacttagtaccttaaggaaatgaccagttctattagcatcagcagtgcttcccgaaggctttctaagaagaactacatttgcatttaggctaccttcttttgcaagtttccaaattaaatacataccacattgagcaccatttgctggaaaattcccagtaactctactcgtggtctcctcgagtcctgtcattctatcaacgcttacaactggtatacctgcctcaattgcccttttcactggtgcaatagttgtttctgattcaaccataggccaagttaaaattccatccactttctgcaaaacaaaactatcaataatatctgccattctatcgttgtcccattgagcatctttaacatcaacttcgacatttggatgtctttctgcttcccattgagccgcatcagctaaactaacattccatggctgatcaaatccatggatagcaacaccaattctatactttttatttgagtctccaacttgtcctgattttaaggctacataatttgaaaatggtaatttcaaatccagctcactaaatgctccttttatcttagttccatctccatttgtccatttataatttccgtaaggctttcccgtaggatatgtactcatataagtttcaaatttttcattcttatatatatcagtaatctctttattggcatctgaaagaggtaaattaataaaaaattctaatatatcactatcagataatcctttggatttaagactttcaaaaaaatccaatgcctcttgtccctttaaacttcttacctgctcgtacaacggcaccaaatctactgatttctcatttgttacagtttgtgttggaacttcttcgatataatctttttgcctatcttcttttggttcgttgtcaataattactttacctgcttgggaacaagctgataaaatacttccaaccaaaattattactacaatgcaacttaatttgcgtaatctaaaatttaatattcccattttgactttcctccttagtaggatctaatcatattaataattcaatccttttaatacactataactatatagacatcacatttgttaaatttataacaaacacaagtccatctttctccaaaaacgtttacacaacttgcattcctccctcacaaactatcttttttaatgcaaacttattgtaatgttatattcactattatattaaaatgctcctataatttctataattctacaataatttcaaaaatcctttattttatacttcttaataaatgttatttttacagtataatattacttcggaaatttaaggtaaagtatatataataattattcttacacaccatctttaaaaataaaaagccctcaacatacattgagggcttcacttatattaattaaatgctaaaaattattattttcaaaatatatatattttcatacttcttcaaaacttaatataagattttaaatctcgtacaaaacttatattcctaaataccaacattctaaatttataaaataaacttactactattattttagcaagttctcacataacttaaaattatgttgatcatcttaggtattttgacattttaaaacatacgctggtggtatatttaacactaccctttctagacttatatcttcgaaataacttcctatatatccctttttaagcaatgtatattgaaatgttatgaataatccattcttttttaatatatcttttgtttttttcaatattctatttgacatattctttggcaaactagcaaatggtaatcctgatacaacatagtctacttctttaatattgtattcttttaaatatttatctacattttcagctgagtcatttactattataacattattatattcaccatacttttcctctagttctctgcagaattcttcattatattctacgagcattaacatcgtatgatcctttatttttttcattagtctatcagtaaacactcctgttccaggaccatactccacaatacattttgcatggtcaaaatcaatatcatgcgccattttttcagcaagctttttagaactaggcgctacagctccaacagtccttggtgacttaaaatattccattaagaactttatccacataataatacaaccctctctatattttcttaattagaatacatattttattgaacttaaacaaactaaataaaatatatattctattattaacaaaagagactacctctcgatttttaaaaactagagataatctaaaatattttataaatttctttctaactattttcttatttaattacaacacttctgtgtagacatcatgcacagttttaaaagtacgcaatctgttaacgaattttatatatctaaaaatgtttagatgatgaatctctaacacagtgtaaaagtcaaaaaactattttggaatccaattttttcaacctctaaattataacataataaggaaataaattcaatgttttacataaactaattaggtaaaagtttattattttaattttattaagctctgataatttaaaaattataaataatcatgcctattctttacaaaacaaatatattgatcattatttacaatctaatttcaactccaaatgtaatcttagtacatttcttagattataatatatgtttaactttttgctttatgtcttcttaaaaaggaatatatatcataaatatctataggggataattcaatatctatgcctcctaaacttgtcattgaagaaactttactaaaacttttaatctaagtttcaaataaatctattttcttttccatatgctgtagaattatccccttgtacttatattataagttcctcttgattagtataaatagaaagttctattcaaaacttaatatggatatatagttattaatacatccaatgcaaactaaaggcataaatctgtattgtaaaatagctacctcaaaacagatatctatcctctattttgaaatagctaacacaaaatatataattataaattttcttttatgagattaatcctcttcacatattcttcatcacttaaatattttttctgaggattcatttcaaatacaccaccccatgaatatccatctttatacttaggaactaaatgaaagtgaagatgtggaagcgtatctgaatatgctccataatttattttatcaggtgaaaaagtttttttaatcatagccgctactctagtgacatctttcatatataattctaattccttatcatccaattcaaataattctttcacatgtttatcataagcaacaatgcatcttcctttatggctttgttctttgaacaaataaagagttgacacttcaagcttacatatttcaatcattaaattatcaagtttttcatccttatcacaataaagacaattatttttattactcatatttcggtctcctaacctaattttttatatgcatatattaataacattcttatatttaatagtacaattaattatttaagatatacctttatattcttacagacaatatagaagctatcaaaataatattttagtacagttgaaattaaaattagctgccttaaaatagcaatttactttctatcttaagacaactataatatctaaattgaaacgtatctagagattatgattattttgagctattttaatatgttaatattctattagtcaaaagaattaatttacactgctgtttctttccaaacattttcatatttatatccagtaagattttcaacaattgcctttgtttctggagttacttcttcttttgatccattgttttttaaacgttcaacttcatctactaatataccatgtgtccttttattaagtttgaaagttacagcacaaattaacgcaattacaagtaaagatatacacccaacagctaaaagagtagctatagttgatacaacttgtggtgattgagtcgcttgtcctttaacaaacccactttcttgcaatacaacacctataacaaatgtagctattgccacactactttttctagtaaatgtcataactgctgcaaaaagaccttctcttctttgccttgtaaccatttcatcaacatcaggaatgaatgggaatacattccatggagtaaactctagtaagcttcttcctacttgataaattgtaccaattacaaatagtagggcaatatttgatcctaagttacctacataaagtccataaaacgctaataaacatacaatcataatagaataagccatcttatataagttacctggtccaactttaatcattaagaatccgcctaatattgttacaggaataccaatgatgctaagtgaaagtacattcgcagcagtagtagatgaaacacctaaattaaatacacagaaatatataaatactgaattaaataaatctttagccgtaaatgaacatatataaattgctaaatgttgtctaaacgctctaatcttaaatgtagaaacatagtcaccagcaacctttacaatagtcattaattgttcaccaaaactcttacttgtagaactatttaacaactcttgttccatttcaggtgtaaggtctctttcccatgttactttatgtgatataagtatacatatcgcatatataatagcaaaaactaatccattaataaaatatgcttgtgggctcttatcaccaaagaaagctattaatcttcctggaacaaaagtagctaaaaatgtacctgttgccgaaataaacattcttgatgccgataatttagttctgtcagtaaaatcttttgtcatttcagcaggtaatgtttcccatggaattaataccattgctgcaattatttcaaatagtaaataagtaactaaatagaatgcataacttcttcctgttacccatagtaatacgtaatctgccattaatggagctcctattaataagaagaaacgacgtctaccaaaaagttttccaagtttagttttatagaaattatcagatatactaccgataaataaactagcaactgcatctactatacgagctatagctataatagaagcaccttctatcggtgttaatcctgcaaatgttgtatagaaaaatagtaagaaagctccaataatggtgaatgctccaccacccattaaatcaactagtccataaccaacacctctagctatcgtgatttttctattattatttgacatatatttttcctcactttcatcaattaagtgtttccgaattatttttcatcaaatccaaaatattcttttgcattgctatagcatataccttgaacaattcttttaagtaatttatcatttttaggtacttctccgttttctacccattctccaattaaattacaagcaattcttctaaagtattcatgcctagtatatgataagaaacttctagaatcagttaacattccaacaaagcgtcctaacaatccaaggtttcctaatgccttcatttgttcaatcattccatccttattatcattgaaccaccaagctgcaccgaattgcatttttcctggaattccatccccttgaaaatttccaatcatagttccaagaacatagttatcctttggatttaatgtatataaaattgtttttggaagagaattttctttgtctacagaatctaaaagcctagaaagcggataagctatactttcatcattaattgaatcaaatcctgtattaggtcctatttctttaaacatttttgtattattacttctaagagctgcaatatgaagctgcatagtccatcctaactcatggtaaagcttaaatacatgtcttaacgtataggttttatattttttctcttcatcagcacttatagtctttccatctaaagcctttgcaaatatagctgcagcttcttcttttgaggcatctgcataaactacaacaccatctataccatgatcagctattctgcatccaactgaatggaaaaatcttattcttgaatcaagagcttttagaaattcatcataattgtctatagatatttcagacactttttctaactcttttacccaagaaacaaaaccatctaaatttatttcaattcctttatctggtctaagagtaggtaaaacatttacattaaagctagtatcttctttaatttttatatgatattctaatgtatctatcggatcatctgttgtacatatagtttcaacatttgattttataattaaatctctaacattaaaaccttctccgtttaataattcattggctctcttccaaatttcaggagcagtatcttcatcaagtggttcgtatattccaaagaatctttgaagttctaaatgagtccaatgataaagaggatttcctatagccataggtatcgtttgcgaccaagctaagaatttgtcataatcgcttccatctcctgtaatgtatttttcatctatcccattacctctcatagctctccatttataatgatctccatataaccatgcttcagttatattattgaattttttattttcatatatttcctttggatcaatatgacagtggtaatcaataataggcaagtttttagcataattatgatataaatctatagctgtttgattagatagtaaaaaattctcatccatgaaatttttcatattcatcatcctactctctcaaataaatattttatatttgcaaagcattgaatatttgggttaataacacatagtatataaatccacacacattattgtaatttggatccactcaatactttactataacgttttcttcacctttatatattaaccttattacatttgaaattattcatcttattaatctagctaacttaacacccttacttaaatgatatcaataaaagttttattttcttttgtatacctcttgatattttcgtaaggttgttaactagcattatttatgttataatttactccatattaattttcttaaacattctttatcattctttgtttgtattattgggcagataataaatgaagaatgataaaaatgtttatttttatactcgattttcttatataattatttgcaatttaaatacttttccaaagttgatctaacagcgccaacacctgaaattaattcattgaaataaccttcaattttctcacctaaacctacagtgtaaagatttactccaaaaatttcttcatttattagtattggttttaaactatcctttgctgattctttagtacctagttttatatcagatacatattttcttagttcatctaataaaggatctggacttaattccataacattaccattatcatctaatcccattagatatctacaccagcctgctataactagaggaatatatttaagttctttagcgtctaaatcttctctattattataagctttaattgtttctccaaatcttattccaactttttgagatgtatccgaagcaattctttgtggcgtatcaggtatatatggatttggaagtctaacttcaactacctctttaataaagtcttcaggttttaatattcctggattaacaacaactggcattccttcttcgtatccaatcttttctactaatttctttaaagctggatccttcatctcatctgcaattaaattaaatccaagtaagcatccataaactgctaaagatgtatgtagtggatttaaacaagtagttaccttcattgtttcaactctttcaacagtttctctatctgttaaaaatactcctgcttcctctaaaggcatacgtccatttgggaaattatcttctattacaagatattgaggtccttctgcatttacgaaaggtgcaatataagtgtttttggtagttgtcacaatttcagtactatcaaaaccaatttttcccaatgtctctttaacactttgtgatggtctaggtgtaattttatctatcatactccaaggaaaagatacctttttagtatcgttgatatattctagaaaacctttatcaactaatccattttctatccatttctttatcattgtttccatagcattgtgaagtttttcaccattcttagaacaattatccatacttacaaaagctattggaagttgtccattttgatatcttacatatgctagggatgcaactttagctataatacttacaggatgttctaagccatctgttgtatcttgttcagataaattcttcacactataacctttttctgttattgtaaaacttgctatttgtaaagatggatttgaaaatatttcttttaacctattccaatctttttcccttaagtaatcgccagctaagctttcacctatacttcctaccacttttttctctaagctaccatcaggtttcataattactagtaaactcaaattatcataaggagaataaatttcatctataatttcatagtcatacccttctacagcaacaataccagattctgctttacctgtatttaaaagttcctgttgtaatattgctataaatcctctgaatatgtttcctgctccaaaatgaatccatgtaggattttccttagttgatgctgacatcttatcataatcaaactttggaatctcaattccagcttttttccataaatcagtatttttgatactttccttacttagtactattttggcgttattcatttttttcacctctttaaaactattgctaataaagtcaatactattaattatcttttgtatcttaagattctatgaactaaaattcttagttatctctttcaagagaatcccatattccccataaatacataattccaagtgctctatcgtaaagtccataacctggtctacacttctcattccaaatatgtcttccatggtctggtcttacatatccagtaaatccaacttcgtgataagctttaactatatcacatatatctaatgaaccatcacaagttctatgagatgtttcaataaaatcaccattttcataaatctttacatttctgatatgcgcaaacgcaattctgttaccaaattctcttatcatagctggaacattattattaggatctgaacctatagctccactgcaaagagttaagcaattatacggattatcaacaagttttaataatcttgctaaatcgtctctgttcttaacgattcttggtaatccaaatattggccaaggtggatcatccggatgcactgccatcttaatatcattaatttcagctacaggaataatttgttctaagaaatattttaaattgttccataaatcttcttctgttacattcttgtatgcttcgaaaagctgtgttaaattctttaatctttctggttcccagcctggcattgtaagatctggattagatgcaattttgttaactaattccattggatctatatctttaatctttgctttttcataaaaaagagctgttgatccatcttctgctttcttgtatagatctgttctaagccagtcaaatacaggcatgaaattatagcagattactttaactccaaccttagctaacttttctattgtctttttataattttctatatacttgtctcttgttggtaaacctaatttaatgtcctcatgtacattaacactttcaacaacatccatattaaatccatatttgtcagctgatttttttacttcaagaatcttttccattggccattcttcacctgctgccatatcatgaagagcccaaacaattccccctactccaggaatttgctttatttgttcaagtgttacggtatcattaccttctccgtaccatctaaaacccattttcatagtaatatcactcctgtcctcttattgtccttccttccaatatactgattgtcacagaacaatcatatactaggtcctttaatttgtattttcttatatctataagcctcacccccttaaatttaaaaataattaacattatatcttgaatctgtttgagttcttcaattattccttaaaatagttaggataagcttcttttatctttttcttatcgaaggtaaccatgttcaaatgttccttcataaatccttctgctatatctatatttttatcttttatcgcattgaaaatttctttatgttgaaggtatatgttatcccagctagaattagttactaatctaagcatacgaattcgttgaaactctgtacttccatcattaatactattccatattcttcttttgttacttccttcaaagattatcttgtgaaattcctcatctgcttcaaataatttcttatagtcatgattctcaatatacattttctgaagtttcaaattcatttctaaggctaataaactttcttgtgaaaattctttacaagcctccttcaccacagctctttctaaatgctcacgtaaaaatcttccttcttcaactgcagataaatcaattaaagaaacaaccgttcctttttgaggataaatattaactagcccctcttgagctaacctaacaagtgcttctcttactggagttctactcacactatacttttccgaaagttccttttcagaaatgctagtaccaggctcaagatataaattaataatttcatctctaagtttataatatatagttttacttgttgtatttttatttacctctaaagccatttttatattctcccttactttcaagacctaccatacttgtatggtagatgtacttatattttatcataagtattttaaaaaatctattattgatcgatgctgccatacttgtatggtagttatattttaataataatcataaccgtttacaatgtcaagataaatatttaattttttttttgaaatgcattcacttacaatatagttagcaataatgagaaaatagcagaaaaatgcagtataattgtacgtatttcatatatacgttgattttttagaccttgagtataatattggttagatatattatcaatatggaaattattatgtttgaaaggggaaaattatgctgaaaaatattaaaattatcaatagtattattttgatggttatcttatcaacggttgtatcgttatctatcgcaataattggttataataacatgaaaacgattaacttaaattcatcatcaatgtacacaattgcattaacaagaattattaaaactgaggaaattagacaaaccttcttaaatattcggttaaatgtcaataggctttctatatcagaatttaatgatgatgatgtagcagctatagataatgactactctgccataaacaaaatggtagaagattacgaaaacctatcgcttagcactatagagacaaacaatttatccgaatttaagaaggactcctcagcttactatgagcaaattaagaatcttgaaaaaggcaataaattatatggtatagatttagaaaaatttaatcaattgggagttgaaatgcaactttttcttgataatttagtaacttatagttcaaatactgctaatactctacataatgacaatatgagtttatacattagaagcactaaaatcttttttatcactttcttcattggttttattcttcagatacttgtttcctcctctataatcttagttataagaaagtctataaaagaaataatgtccgatttggataatgttgctcgaggtgactttagtttcgaaataaacactgacttaaaaaacgaatttggcagaatgaaaaaatcactcaaagtaacaatttcaaacatttcttcaatgctcgaagaagtgcgaaattcagcaaatgttgtaaatatacaagcaactaatttattaggagcttcagatgaaatgtcttcttctgcacaagaaattaatgccgctgttcaagaagtcgctaatgctgccactgaacaatctagtgacttaatgaatgtaaaaacttcattggataatttcgctgattcactagatcaaataaccgcgtcaattaatgatgtaaactcaaatatacataatattagttcaatggccgaagatagtaactctaaattagaatttttatttaattctattaaagatgtaaacgaatcttttgacactgtaagaaataaagttgttcaattagataaccatgtagaacaagtaaataacataactactattataaattcaattgctgatcaaactgacttattagcattaaacgctgcaattgagtctgctcgtgcaggagaagtagggcgtggattctctgtagttgcagaggaaatcagaaaactcgcggaacaatctaaagtatctgccagtaatataagtggcttgattaccaatattaataatgaagcccaaatagcagttaagaccactgatttaggtaaagatagcttaaataatcaatcagtccttattgaagattctataaaatcttttgctttaatatttaaggctataaatactatattgcctagagttgataatataaataaatctattgaaaatataaatattgaaaaagatctaataatctcaaaaacattagatatttctggagtatcagaagaaaatgcagcttcatctgaagaaatagcagcctcagtacaacaaataaattcatcttttaatgatgtagcaacttcagctcaaactttatcaaatttaacaacctctatgatgaacgaagtaagtaaatttaaattataattgtggttataaatagcttaagatgtattttgcaattttaaactagagagcattatatataaactaaaatggaggataattatgaaaaatttaaaatttttaaatgttgcacttgtaatagtttttatgacgactatattaacaggctgcgattcaaaaaatgtttccaaatcaacgcagcctattactttaaatataatagatgtttcaggaagtatgcaattagtcggagattccatagatcaatttaaagctgcaaaccctgatttaataggagatgtcgtagtaaaaaaatctaccgcattagaggttccatctttattaaaagctcaaattttatctgaagatatgcaaacaaatttgatttttactggaattgatggtctttccacatgtattgatagagatgttatagaaaatattatgcctgcatatagctgcagatttcctgatttagaaagtaattatagttctggtgctaaagccacttatgatttagtaaaaggttatggtataacttatgtgtattcgcctagcggaccattcttcacttataacccggatgttgtacaaaatgtgcctaaaacgcctgatgaacttttagcttttgcaaaaactaatcctggtaaattcacatatgcaaggcctgctgcttcaggaccaggaagaatttttcttcaaggcttaccatatattcttggagacaaagatcctaaagaccccaaaacttggtacaagacttgggcttatcttaaggaattaaaccaatacatagattattatcctgcaaagactggtactacattcacagaattgaaggacggaaaaagatctattatagcaagtcagttaggatgggatatgaatcagaggatcataggtggtattccacagacatatcaaggattcgtatttaacaatactacactagtttcagatgctcagtatatggcaattccaaaaggacttagcgatgaacaaaaaaatgtagttttaaaactaatggcatggcttatgacaccaaaaatgcaagcgataacatacgatagcggttatttttatcctggaccttctgtaaaaaatgtttcacttgatatggctccaaaagaaagtcaagataaaataaagccagctataagacaatcttatgaagattctattaagacacttccgagttccacgcaattagatacaactaaattcatggaagctttaaatatgtgggatcaattatttggaactaaagtgaaaagataataatgaagttaagaaacgtgctatattgctgaatcaaacaatatagcacgtttttatatcctaaatctataattaataattacttactttgctttatatcctcatctagtaaatgataaggataagtagatacaattatgttatcattcttcaataaggtttctctaataaagaaacttgtatgattatgtaaaacctcaccaaatcgttcattagtaacaaattgaggtacaaccactgttatcttctcatctttagctgttgaatttgcaatcaattctatattctttaacaaaggagtaaccaccgctctatatggagaatattttgcaacaagtaatatatctgtatctaactcactccatctagattttaatttttccatagcttccttgtctggtgaaatattaagagcaataacattatcgcttacactttgagcatattgcaacgcacctattgttgctttatttaagctagcaattggaactatcacaatatgagtatatttctttcttaaattcacctttttcagatttaattgactaatacttaaaccacaagccactttatcgtagtgtttttttattcttagctgaattacaattatgattggaattaaaattgcaactataaatgcaccttcactaaatttttcaattaaaattattatcgttgttaataaagtaacaacggaaccaataccgttgattattgcacgttttacccaaccattacctttttcttttctccaatgattcaccattccaaattgccctagcgtaaaagatataaatacgcctatagcatatagtggaatcaacctatgagtgtcggccttaaatacaataactaagatacaagctatacatgataatgcaacgattccaaaagaaaaactaagtcgtttacctctaatagtgaattgtcgtggtgcaaaaccatccttcccaactatatacattagcattggaaatcctgtatatgctgtattgcatgccataagtaaaattacagcagtgctaaattgaattatatagtacattatgctattcccgaaaatagcaaatgctatttgtgaaacaactgtaggaccatttgctattggtacagctgtatagaatatagcaagtaccgaagttcctccaaatatgaaaaatattaaggctgctaataatatcataacagtctttgcacttttttggctcggttcctgaaaattcggaacggaattacttactgcctctactccagttaaggcagaacatcctgatgaaaaagctcttaaaataagaaatatcgatacattttctgtagtatttgctgggatagaatacattggttctggatgaatatttaatataaagtacttaaacaaaccataaagtatcataaaagccatgctaaaaataaaaatatacgtaggtatggcaaaaatttttgaagattcacttatacctcttaaatttaaaatagtcaaaactataattattattaaaacaaacatgactttatattctgtcaaattgctaaatgcagaaataatagcatctgcacctgcactggcgctaactgcgacagtaagtatataactaattattaaacctgcaccagctgctaagccagatttttttcctatgttttcattggctactttgtaagctcctccaccttgaggataagctctaataatctgaatataagaaattgttaatatcattaataatcctataatcataaaagaggtccatgttaaccactgatatgctgctacacctagaactattaaaacaaaaagaatctcttgggcagcataggctacagatgatattgcatcacttgccataattgctaatccaaaaggaatattatacttttcatggcttccttgttcatttgataaaggttctcctaataaaacatctaaaaactttgtaagcatctattttccccctatattatcatacgaaaaatattgtatgtaataatgaaatcaaaagcaatattctaattattgcacatgttgaagaaaaatgtagaaatcactgcatgaatacgaatacatgtgtaattatgactaatttcttcttttaatgaattattttcaactttattattacaccacatttcaatttaatttccacacattagccctaattaagcacttgacttataataattataaatatagccttatgattgcattatatattaagaaatttagattaatataattaaagttttcctaatttaactcaaaattattacaaatttcaaatctttgatttgtattttgaaacagtgattctataaatacctcaattctatttcatgaaaactaataaatttaaatatacaagctaatcttactagaatgtacttctataattttgtaattttacggaataattgttagtaaaataataatgatattacttttaatctttttgcttttacttattattttgatataatcaaattgtaaagctaatatataagaggaggattttatggcacaaaaccatatatgtgaattatgcagtagaaatgtttctagcattactaaacatcacttaattcccttagaaaaaggcggagaaaaatttaaaacgctctctttatgttcaacctgtcatagacaaattcatgctcttttcacaaatcgtgaattagcaacacactatcgcagtcttgaatcattaaagaaagatataaagataattaaatttcttaaatttatcgagaatattcctggtgattcttatttagacataaaaaaatcaagacatgtccgaaaaagttgttaggagaatatctaaatattttatgtgaaaaaataatggcaataatcttactaagattattgcctaaaattatataatttatcaactctaaatttgtataataataagttataatcccattataataattttattatatattaatttattctaaaatacataggctgtaatgctaatccacttttttctgataaaaatatgttgcccttacactgaaatcctgcctttttataaaaattaattgtatctaatcttgcatttaaatataaacatctaaattcaaattctttagccttaattttatgtctttttaacatttcaatgccaatgcctttacctacatatttttcactaacaactatattggtcattttaccattcatattataattagtcattctcgaatatgcaaccacaatgccctcatctaatgctaccaaatgtatgctattataatccaattcatcatagtcgtatttatgaattttattataaggtttaaaaagtattttaaaccttaattcagatacttctttaaactctttactttcacaatttataaatttatatgtaatattattcatattttttccccagcttctatattattataattatattatacactatattcataataattgaatatttattcataactttatttattattgtatattttattcaataactatagcgctaggtccatgttgatttagaaatactaataaatatatttttttatcttgaacaaattttattatattaaattataaaaatataaaactaccaactaagcacttatctatcaacctagttagtagttataaaacaaaccatacttttctattaattttatgtaaaaacaaagattacgatctatcttcccattttctctttgccttcattacgttttcttcgcttagttttgtttcctccactatatctcccattccgcaacctttatcaagcatctcttttgctttttccatagctttttcatgctcaccttttcttaatttttccattaaagttcctcctcttttgaataatactaactctaaatctagtattacccgtggacacttttttattcagcttttataatagcttattcataactcttttcatatatctaacctttattttatttctttatttccatcttctctgcaaaatttatattaatatatagtttagaatttcatcctcatctataatttttttagcaaaaattctattttcctctacatgaatgtacgtatatctattaggttttattgatggagcaatatcaatagcttttttataatctttctttttcatttttaaagtttttgcatgctcgaaaaagtttgtttcttttaatatcttcgatattctttcaaatctatgatcttgtactttcgccataatatatgttgcaattccaacctgtattccatgaagctgaggcatttctaaaaatttatctaatgcatgagatattagatgttctgaaccagaagccggcgagctattacctgctatttccatagaaataccattcaatattaatgaatccactaattccttcaggaacaaatcatccttaatatttttaaactcagttcttataaaactattgactgctttcttagaaatcatagtagcaaaatcgtcaatgattatccttccgttttcttcttcaaatttccaatcatacaacgcggtgatatttgatactaaatctcctatccccgaatatataaatttttctggtgcactcttaatgacatcaatatctacaattattccataaggagttttagctggaagagacattctcctgccattaactaaaagagaagcacctgcacttgagaaaccatcattagaagttgaggttggaatactaataaaaggtaattttctcaaaaaactcatatacttaacagcatctattgcctttcctccaccaactccgattagagcctctacgtcatttgatatttcaaatgcttttacactaattttttcgaaatttatatctgatattgtttctattcttgaaatacctatattagcttcttttaaagaattacgtatggactctccaaataattcttctaaaccctcaccaaagcatattaaaacatttttaaacatggctttcttaatcaagttacctacattatttatatttccttttcctacctctaaaatagaaggaatagctattctatgagttgacgtcttcatgcatttcactcctcaaaagtattttcaattaattaaaatatctatttttatgtcttaaaattagctttccctaggtagaaaataaaaaacatttattattttaaatcattaactactttgtttatcttatctaccttatccaaagcctctgtccataattcctttgaaggaattattttttctactgttgtatatgcttctcttataattggtatattaataagatttgtactttgaatagacatcaatataaaccaacacacacctataagagctgctattcttatgatacctgctattgctttaattaatatataaagagcaataatggcaactattattaaaactatagtatttgttgttaaatgtattggcgtattttttatcaagctatttactttatccatttgtttcctcccaagttaggtagttaatattatattaagctcgctcactagtatactttcttaaatttaaatttttcttgtgatgatcatagcggtcgctttggtataatcaatgcacaaattatatataagagtaatcctgatcctgcacaaacaatcaaaattgcccacccaattctgactaatgttgaatcaagtccaaagtattcagctatcccaccgcatacccctgctaactttttatctgttgctgatagatagagtcttttctccataatagatttcctcctaaattgctataacatatcatttgaacatagttctttttcaaaattatatcactttagaattctatttactattattgaggtatatatttttcagttctaatataagttcatacacatcattactaaaacatgatacttatatatttaacaattccatataggaatctgattattttttcagctttccacctccaaaaggcattacttccttgtcttacataatatatcttttaaatctagcataataaagggaaagatcaattcactaacccatgaaccattctttcccttttaatagttaataatagaaagtataaaataatcacttaataggggaagattttaatctatatactacataataagtggtttatctttcccctgtttttaatctatttcatatatccacctttcattggtgatactgcatgttctgaaaaaatctttagaattccagattcgtattttgattttcgtggtttccaattctttctacgttcttcaaagactttctccacttcttctttactgcatttttttccctttataccaacgatctgtaacactctattaggaatactaatttcaatcaaatcatcttcttcaattagcgcaattggtcctcctactgcagcctccggtgatacgtgtccaattgccggtcctttagaagctcctgagaatctaccatctgttattaacgctatactagcagataattcctcatccgaagcaattgcttctgttgtatagaacatttctggcattccgctaccttttggtccttcatatcttataataaccgcatcccctgggcgaattatttttcttaagactgcatcaatagcttcctcttcactgtcaaaaggctttgcttttaatatagcctcatgcatttctttaggaactgcagaatgttttactaccgcaccttctggcgctatattcccctttaatattgatacagaaccattagtaccaatagcatcattaaatggacggataacatcttctttttttagtcccactttttcaagatactcattacacttctcataatatccattagtttttaattcttctaagttttcacctaaagtcttacccgttacagtcataacatccaaatgaagcaaatgctttagctcttccattattgctggtacaccacctgcataatagaaatattgcgcaggccattttccagcaggacgtatgtttagtaaataatgtgcatctttgtgtattctatcaaaagtctcttcatcgatatacaatccaaattcatgagctatagcaggtaaatgcaacagtgagttagtagaccccgatatagctgcatgaactaatatagcattttcaaaggacttaattgtaacaatatcttttgggcgaagattcattttagctaattcaacagcttgtcttcctgcttttaacgctacctcctctaaatcttcgcatgttgctggcatcaatgagctacctggaagcattaatccaagtgattctgccataacctgcattgtagctgctgttcccatgaatgaacaagctccgcaggatgggcatgcgttttctttataaaaagttaatttttcttctgaaatttcccctctttggcacattgcactataggcacctatttgttctagtgtcaataaatcaggacctgcttccattactcctccagtaaccataatagctggtatgtttagccttccaattgacataagatgtgatggaactgctttatcacaacttgaaataaatacgcctccatcgaatggtgttgcattagcatggatttctattaaagacgttaatgtatctctagacgctaaagagtaatttattccatcatgcccttgtgacattccatcacaaatatccgttgcaaaatatctagcacctttcccacctgattgtgtaattccctcgactgctttgttagcgaatttcaatagatgcgcacttcctggatgactatctccaaatgtactttctactataatttgtggctttgataaatcttctgttgtccatcccattcctcttcgaagtggatccatctctggagcaatttttcttacttcttgactaatcatactatttctctccttaatctttatttgacaccgtttaaatacatctgatgtatttatgatatcacatctgatgtatttgtcaattttttttgaatttattgttgtaattcttatttttctataaaaagcaatataaaacatgcatattcatctgatgtatttatgataacaacaaaaaaaatacatctttctccaaaacaagagcagatgtatttcatcaagtcaaaacaattaataatttttttccttcgctataatacttccgatattccttcgattatagactaagtgtaagagcatcgcatcatgcgctccattagcattatgttccttaattgaatttaaaatttccctgtgtgtctctattgtttcattacgtaattttctatttgtaatatcgataaatatagtaatagatctattaattatcggaatcaaattaaccacaaccaaattcttactgctcttagctattgcagtatgaaactctatatctttctctaaatatggttcatttttcaaaataagactctctatttcgtcacacaagttagacatttgctcaatttcttcattagtagcttttgtagccgctatagatgctattgatggctctatcataaatcttacttccaataaatcaagcgctaatttatatttatcttttacaaatgttaatcctagaggatcatcagcaattccacatttatcagaaataaacgttccagctccacgtctaatttctaaaacatttcgtgaaaccaatgcctttatagcctctcttattgtgcttctcccaacattaaggctacttgcaagatcatattcattgggtaacttatctccagatttccaatcattatctataattaattgaataattctttctgaaatttgctcccctagcgattttgttgaactatttgtatcattaaaacccaattctctaatatctgacatatctcctccaactgctactatcttgcagcctaaaagttctttcaaaagtattttctacccatgccaacttaaccccctgtattatttaaaaagcaagttttatcccccaagttatacatccgcctttaagcatgataaataatatggaggacaattaaaatgttagcattcacttattataatacttaaaaatccataaatttaaaagactttttaaatttatttttaatgaactaattttaatcttcaaaatcctgcacactttccataattacttacaaagtatttatattctctatttactataatccgttactggtttagtattaaaacttttaaaagattctgattaattagcattcatttataaaagctagctactccactcttcgcttccatttatttttctaatctcataatccccaatgtatccgcaattatatcactaaagacttatataataagccatttagcatttgagaaattcatagttttttgtacaataaaaatagccctaagttatatcacttagagccaaatattttattatataattaattattgttctttcgtgcaaaatacggcattataaatcctaacccaagtaatacaaaaggagttataatattaagcactaattgaaatttatcagctgtatacataccgctaatgcatgcaaaagcagtaaatacaaaacaccatcctccaattataatacctactgttctgttttttacaaatctatattccggcttgaatttttctcctgcttttttcaatgcaatatacgccgcaaatacccataaataacgaagaggcatacacacggcatttaattttactagccattttaccagctcgtctacgtttccaataccaaaggctggaactactattaaaattgaaacaattattaaaatcaatttatggccatttttatatgttccatacttattttttataaacattttttcaggaataaaattcttatccgcactatcaagtaacatacgtaaaggtgcatcaatagatataatcaataccgcaaactgtccaatcatgttagtaatagcataaaccacaacaaataaattacctagatgatagtattcccctaacttctggaaggcatagtatgctccatttgtcattaagtctttaggcacattatttgaatcaaacatcattccaagagaaatagttcctaaaattgcacatacagctaccataatagctaatgcaatcataccctttgagaatcccttttcaggatcatccatttcgtttacatacggcgaaatcttctcacagccacccacagcaaaaattaatatagatagaccagtaaaaaatttcatatcaaatgcaggcataaacgtttttatagaccaatctatggaatttaaatgtgcatcagtaatagccggtgccgctaccattaaaacaataaataaaatcgacattacaaacattgatgttcctgcaagtgtagctaatttttttaatggatttaatcctttagaagctatataaagtccaactaaaaaaattactaagcaggttatttgtaataaccttgtatccatgctactaattcttttatcttggaatatagcccaacttgttgcgatcataaagtttgatggcttttgtgaaatataaggcatatgaacaatccagtatgtccaccctgcataataggcaactctaggacttattgtttcatttatccacgaactgacaccaccgccaaattctttaaacgccgaccccaactctcctaccattagtgcatatggtacgaaataaatagcaaaaatcaggatccaagatacaattgacttaagaccattatactcagagaatccgttgataacgttaccaaagccccaaactgttgaaaaagccataaatgctaaggtataccaaacaatttttttgttgtttttttcagacataaatttttctctcccacttatattattttaatttttatattaaaataatataatatacttttatctttgtatacattttcgacaaaaatagccttcgtttaattatattactaactcaattaaaatccacaaataatttcaatttaaatttatcaaattaatatattacttctttgttctaaataaaaataacaagatttcagctaccatattgaatatcatatttcccatttatcacatagcccgttacagctcacatggacattaaatctaaaaagattacaatctaaataaaagaattaaaaatcagtcttactttgaccttctataaatttcttttaaaaaagcacttcacccataaaaactatcctaaaatagttctatatgaataaagcgctttacaattttctaattattattcagtaatatactgaattgttttaatccataaattattttttctacttcttccggatctgtattttttatagaatttagtataagatttgatataaactcttttttcattttgcaaatatcattatttttcctaaattcctctgaaattgacaatcttacaattctacgattttcctttggtatttctcttgtaacaactccctgttttgcgagacgatcaactattcctgaaactgtacttttagttagtcctatctgatcacttaattcatttagagttatcgatggcatcatatataaatgaaatataacatttaattgaggtgctgtaaatccgcaatcttttgcaattttttcaaacttacagcttaattcttttctaatattcctaaatacaccaataatctcatccgcttgtttttgatataattcattattcggcgatgagggcccctcctgtagattcatttttttcaccttctttattttcttttttaggctctttctttccacccataaataaagctaagaatatagtcacgaatactataacaacagttactacaactgaatacgacatagcatctacatacgcttgaccttgaattattttcactatataagatactgcagaagctctagcagtatttatatccattcccattccaataaatgctttagttaatgtacttattgtgctattagaagatggattatatacattaatttgttctgataactttgcataattataatcatttcttccttgtataagagtagacattaaagtaacactaaccgaaccagccacctgtcttaatgtatttgaaagagctgatgctctactaattaaatgtgccggaacaacgttcatcccggtagtactaattggcatcatactcaatcctattccaatggaccttatacaattaacaagtattatatagtctttactcgaattcatatttatagctgttgcaagttcatatgaagcgcctgcaagtattaaaagtccaggtataaccagtgcttttacgccaactttatttaataaattaccgctaagaggcatcataactcccattaccagagctcccggcaacattattaatccggcttccataggtgtatatcctcttatattctgtaaaaataatggtaatacgtaaacaccgcccatcatagcaagagttaatacactagttataatttggctaattgtaaaatcaaataatttaaaaactcttaaatctaataatggatccggatgagttaattcatttactataaataatacaagacttaaacatccaagggtcatcaaaattggattctcaagttttgaccaatcaattgatgagccttcacctagaacatatagtatacttactagccctacagtagaagataagaatccaattatatcaaaggatttaaaaggtttcctttctgtcccctttaataaaatcaaggccaatattactcctactatccctactgggacattaacattgaaaataagtctccagtccatcttctcgataatatatccacccaaagtaggtcctattgcaggtgctgccatcgcagctattccccaaaatccaagtgctaatccaatcttttctctaggaaatatttgatatattattgacattcctactggcattatcattcctcctccaatggcttggaggacacgaaatgctatcatacttgtattgctccaagaaagaccacacaacatagatccaactgtaaacatcgctaaagcaaatacatatattcttttagctcctaaaatttcctgcaaatatccagtaagtggtataatcgcaccaagcgccaatgtataagctgttaacacccactttatatcatctaaagatactccaaaaacagccatcattttaggaagagcaatatttactatactactatcaagtatagacatgaaagtacctataataaccacagctaacgctaaccaactacttgctaatgattcgttattattctctcccattatatcaccttgtataatgaacatgtagtaaaaattcattatacttttcctttcttaataatttttactatacttaacataagacgctgtggattagttttttcacctatagctagactatttcaattgaggatataaccacagctttatgcttatttgttaattagttagataacgcatgacgttttatatagagcaaggatacatttagcatgaagctacgtggagcatagcggactaaattaaaaaaggagttgttcttatgatttatattggcattgatgtagctaaagctaaacacgattgctgcattattgattcagatggtgttattattaatgattctttacgtatatccaattcacgtgaaggttttgaattactttattcttcaatactttccgtcctacctaacaaggatatttctaacgtaaaaataggacttgaatcaacaggtaattatagcactaatctccaaaactatttgtatgctaaaggctttcacctatccattctcaatcctttagctacaaatcttttccgtaaggctcaaacccttaggaaaactaaaaccgataaaacggatgcactagttattgctaaaatgcttttctctgatgatacaaaatcctattcacctgtatcatatcaaattcaagagctaaagtcactaactagacatagatatcgcttaattggttatagatctaggcttaaactatcaattactagacttatagatataatttttcccgaattaccaaagtatgtttggtctattcatcaagtctctgtttatgctctcctatcggagttaccgagcccgaaggaaatatccaattgtcatttaactaaattgacaaaccttctggctaaatccactaaaggcaaatatagtagagcaaaagctattgaaataaaggaagtagctagcaattctatcggaactagcacacgttctttatcttttgaacttcagcaaattattaggttaattcgatctgttcaagctgaaattgatgctttagataagcaaataaaggatgttgttatagaaatagactctcctttaatgagtattcctggaatctcttatacactagcctcaataattctagctgaaattggagatatagatagattcactgatccagcaaagcttttagctttttcaggacttgatccatcaacatatcaatccggaaaatataatgctacacatacacctatggttaaacgtggttctacctacttacgttgggctatattaacagcatctagaactgtttctatgcgtgattccacttttggggattatcttgcaaagaagcaaagtgaaggcaagcattactatattgctatgagccatgtagcaaaaaaactaatacgtgttattttttatcttttaaaaaccaatacttcatttgtttcacaaatttaattccttaattttccaagcaatgtgattgctttatttgtcatgcacttttttattgactaaaaaatataatttttttattaacttatattgacttcatatagttagtctcatcatttaatatgaatcttaataactgcattagttcctggaagaatcttttcatcaaaattatcaagttcaatttttataggtaccctttgaactactttagtaaaggttccacttgttgatgctggtaataatgatatagcagaattagatatttcccctattgtttttacttttccactaaatttttgtgaatcatattcatcaatagtaatatcaactggttgtccaacttttactttttcaagttttgtttcttctatgttagcagaaatataaagcttagttggatctactaacgtaattaaagtttgacctgttgataaaagttctccaacagttccctgcttctttactacaattccatcaataggtgctcttactaaagattgttctacacttgtgtctggaagattattcatttcttgacgcgctagtatttcattttttgttactttctctccttcatcaacattaagctccagtaatttaccagaaatttgtggagttacactaacaaaatctgcattaactcttgcatcttcagttgaaacatagtatgcattttcataccaatagtagaatcctatactacctaatgctaccacaattgccaacaatattccaataattaatattttacgctttcctttcatattcaagtcacctcttcccttattcctttaatccgatttcagcaaacataccaggctttaattgtgaatttgggtctgataaactaactttaaccaaaatatttctactttgtgaatttagttttgaatttattacagttatctttccgtcaaattcaacattatctacttctgatactttaactactacatcttgtccttcttgaagctgacctgcaatatctaaaggtgcatatgcatttaccactaaagcatctggattagatattgaaacaagagttgcacctggagatgccatttcacctacattaatgcttttagcatttactacacccgaaatcggcgctgtaagagttccattatttaatgttgtttgtgcagtttttaaagcagcctctgcttgtgccacttgggctttataaacatctatacttgtctgtgttgctccattattaagcatgtttaattgttcttgtgcagatttctgttgtgactctgcagttgtaagctgttgatgtgcagcttcaagctgctgctgagtatttgctcccgcatcaactaaagctttagtacgatcatagttcttcttagcaacatcataagcttcatttgcactatctaaagttgcttgagcttgggatatttgttctggacgtgtagaattcatagcgttagttaacgttgcatttgcagtatcaaccgctgcctgtgcttgattcacttgtgcttgcaagtcttgagtatctaacttaactatagtatcacctgcatttacttttgacccaacatcaactagtacttctgaaactcttgctgaaatttttgaagctatatttgcttgatcatttgcttctatttttccagccattatgtatttatttttagcttgctctgcagtagtttcagcagtttttgaattattgcttgtatttccgttattagtcgaaccgcaaccacttaacattagtgctacaactaaacaaactaacatagtctttttcatattaaccctccatgtacgaattatttatatacatattgttcgcatactaacagtatgtattatacaatagattgtccttgtaatcaagaatattattccatgaatttatacatttttttcgaaaccgtatacacctttcgccaaaatttcttaatctttcttcgtttattttaaatataaatatattttgaacacaaaaagtcatgcatatgtattttgcatgactttaatattctcttaaatttgggataagtttatgttcaataatctattcaggtatttccaaatagaaagttactccgtcttccatattttttattttagtaattccaccatgaagttgtgcaatcaatctcactaatgacaagcctatcccatgacctccatactttctcgatctcgatctgtccactttatagcatacatcccaaagtttatccatttcttcctcacatatattatcaccagtattgaaaacacctatctttattttattttcttctttcttgcctattatattaataattcttctgcctttcacatggtcgatggcattcgtaatgaaattatttatagccttctcaagcaagtctctatcagcatgtatctcataatcattcacgcactccaaggtaaacgtaatatttttttcatcaattgctggtttaaatcgttctacaattttacctagaaattcattaacattaaatgatacaatatttaatttaatcattccaccttccatcatagaataatgtaaaagttctttaaccaagatatccattctatcgcattcttcaactaatatagaacaatatttatccattgtttccctatcattggccactccaaatttgagcccttccgcataacctttaattatcccaattggtgtctttaattcgtgagacatattccttacaagttctttcttacgttccacatcttgtttaagctcatctatacttttgttaagcttgtcagaaatcttatttatactatttcctagtcttcctatttcatctttcgaatctatattaacaaccttgtcaaatttaagattagatatattttcagcaattttactcatttctataattggctttgttattttattagagaaaataataataaatatagcaccaataagcattactataaatcctgccaatatataaaattgatttgcaattactacgctctcatgaatactcttaaaagacttctttagaataataaaatctccattctcaatttgtgaaacaaatactaattttgtcctttgatcattatttttctcatcaatatagtaaacatactttttcgaaagtcttttttcatttcctataatagtttgtttaatctccttggatagacgtttttcttcatcatttgatttaggacgaatagaattgtattttatatcataatttttatcaacaattattgtattaatgttatcaatactttgtattgtgtctgcatattgataattatctttttctgcttccatatattcatccttaatcttctgacttactgacactaagactcctttatttttataaatgtaatatgattccaggaaaactgagtttaaaattattccacctaaaactaatgaaatcataagaaccataaatatacaaaataattttgtcttaattgttttcatatttttctacctcaaacatgtatccacttcctcttatagtttttatcaaatctccttgttctaaaagtttagcccttaaagtttttatatgtgtatctatagttcttatatcaccatcaaaattatatccccatactttatctaatatctgctctctgcttaaaactgtattagcatttccaattaaatatagtagaagattatattcttttggatttagcttaatttcttcattatcaatcactactttatgagttctctgatatatccttaagtttcctacagctatttcgtctgagaatttcttctttactttctttacgatgttattcaagcgcgcaacgaatatctcataactaaaaggttttccgatgtaatcatccgcaccctttttgagccctagcacttcatgtttttcatctcctagtgctgtcagcataattataggcacttcagatttttctcttatttctttaagaacctcccacccatcatacactggcatcattacatctaatataaccaaatcaatatcattattattaaaaaacatattaatagcttcttcaccatcgcatgcttctataggcatgtacccttcttttcttactatatcacatactaaatcacgaaatatattgtcatcttcagctataagaatttttatgtccataatatacaccttctctaatgcaaaaattaaaagcaggttcaagatttttaatctataaacctgcttttatattagcataaatttacttatttatactatttcaatagtattacaattttattaacaaatataaattaaataatacattattcagtatatactacaattggagttcctggttcaatgttttcaaatattgttttcgctaaattataaggtgaatttacgcatccatgtgaaccgcttgttaaatatatctgtttaccaaacacaccatttctccaactagcatcatgaataccgatatttccattaaaaggcatccaataatcaactggtgaactataatcttcgccctttaatgttgcatttttctctttataatttagaacatatgtccctgctggtgtacctgtattattgcttacatttcctgtaacaacatcatcatcaacaactagagctccatttttataaaaccatacatgctgcttagtaagattaacttctacataagtatttcctatatcattagttccttttacaaatgcattttgtgcatattttggttcttttgttacatcttgtccattttttataatttctattaaatcttttacctctttagagttatcaacaatccatccataattaccgccactcacttgtactgttttttttgttgttgtaacaaaatctcttgtgctaccaaaagtattataaatgctagatattttatatacataattccgaactttatcttcattgattgtaacttgcatattgtcatctactccaagccagttatgtatagtagatccatccaaaacttcttttttgccatttgaatcatacgtaatttttaatcctatgtatttattaagtgtatctctcgctgcagttacttcctctgactttgaagtatatttaggattttcataacaattgcttgagtctaaatctattgatgtttttccatcaaggatcgcattagctacattatcatgtaaagcatctttatttatcttatttcctaaaacttcatctactatctcgtattctccatctttataatttaagctagcattttgtggttgggttatcttcttgttactaacacaagaaagcttatttagtgtttggtttagttgttcttcatcatacataattatctgggatgcttcagaattacttttcttaaaaaatgtactaggccaagcaaatgaactttgattattctttaattctttgattttatcagaattatattttaatccaatatcactagctttaatttgttcttttacatctcctctttcgtctaattccaatgcatatgattgcatttgggcagctagcttttcttctgctccctcaacggtctgcccgccaacattaaccccatcaattacggttccaaagtgaaaatgattaatagaatataatgacatacctaaatatatagcacccaaagtacaaagagaaattataacccctggtataaccttgttactacttttatttcttctttttctcattatatctactcccttcgctactattatactaaaaaatctaaattattaatatataatttttcaccaaaaaaagccaccataaatagaaaatgcatttctatttaaaggtagctcactctcacatacttttacagtactctgctaatttatttacagctttcattgcagtacttgcagaaccctctatccatccatgcgttaaagaaacatgttctcccgcaaaatatactctattattatattctggctttgccatcgcattagaaaaaagtttttgctgccgaggcataaagtagcaaaatgctccataaaatcctttttctctatcccagtcaacagttttataatcttcgactacataatcaagatatcctcgtggaagaccatggacatcctcaacttgccttttaatcaattcaaatcgtgcattatcatctaagcttcctacgcgtattccgtctaaacctaaattatatgacgctagcagaactccttgattatccttaacacttctttttcttccaacagaaacattcatcttgttttttgttactccaccattgtcggtagtaatattatgactaggataccatatggtttcaattggtaagtcagtattagatcctccaccgactatcttctcattatcatttcctttttcccaaaaacgttcattacacataaaaagagttttttgagatgatgtataaaaaacttctcttattgactgcattttttcattgctaaacataggaaatacattcacatccctaagacttgaaaaaggtattgcacaaacaacgaagtcgaaagtttgactataaagattagatgacttctcttcctcgtattctaacactactttatcctctatatcattaattttatatatactttttactgtctttccactttcccaagatactttccccaaatcttcatctctaatattattatattcctttggtttttcagacattaacgaatcataaaacgctagtggtaaatttactgctccaccaacaatttcgtacctatatgcataatctacagtatattcctcaattaaattttcagagtaactattgtaatagaatgaaccaagaaaaggcgcaactcccgaaattagctctattgctccttcacttacacccatcttttcaagtacttcccttattccaagactaccaacatatttaattatatctgaataattttcttttacctctaataattcctttcttacagaaggaggtatttttaataaattacttgacaatgcatctccaattattttctgccatggagtatttctttccctctcagtcaagttaaattccgggtatatattttccattacacttttaccctgaggatcattcctcgcacgtttatgtcttatataaaataatgcatttttattattttgaataaatggtcttgtttttataccaaaagtattaatataatgccatgttgtttcatgacctactggtatacgcatagcaccaaattcaccataaagtcttttctcctcatcaaaataataggtatagattcgccctccaatccgcttctcttctgtttcaaaaatagtaatatcaaaacctagttttctaagttcaaaggctgaggctaaacctgcaatacctcctcctattatcccaaccttaatgcctgaacaacttccaggaggtaaaattgttgtaatatcttctggtggacttaataattcaactatattattaaaatcttcaatacgattcgcttcctctaaagtcatccttaacatttcatgcctttcttcatcagttggattatctggttgaataaaatttgtttttctaggcaaataaagccactcctttaaacaaaatcactatagttaaatatattattctagcaactacaaaagaccagctaaaagctggtctaatttttaatcttatcctattaagctctaaattgatgtttttatggagatttaataataacaaacgaccggagttccctctttaatattattaaatatagtattagccaagtaatatggagcattcacacatccatgggaaccacttgtcaaataaattcttcctccaaatactgatctccaacttgcatcatgaattcctatccctccattaaagggcatccaaaaattaactggactgctatatccttgaccttttaaagtagcatctctttgcttgtatttcaatgaatatactccagtaggtgttgaagtattattgcttacatttcctgtaaccacatcaccctctactactagagaaccattcttataaaaccatacgtgctgcttgctcatatttacttctacataagtattcccaatatcattacttccaggagacattgctgattgcgtatatttaggttcttttgttacagattgtccctcttttatacttgaaattaattctttttcttcatcattattattaattaaccaaccgtaatctcctccgctaacttgtacattagtacctagcgatgtaacaaaatttcttgtcttaccaactgtattgtaattatctaatatgctatttagatattctttgatttttggttcatcaagtgtaatttctaaattattatttacgttaatccatttgtttattatagatccatctatcacttcggtcttatcaccaaaattataggttattttagaggatatatatttattaagggtatctttagcattaatgacctcctgagattttgaagtatattgaggcttttcatagcaatcctccgaatccaaatctaatgttgttttcccgttaagaattgcattcacaatactatcatgtagtgccatcttatcaattttactaccatatacttcatcaataattttatatccatcatctgtatattcaaaactagggtttcgtggttcatttacgttattactattaaaacacgaaagattatcaatgcttttttttagtaactcatcatcataagtaactacatttgttatcgcagaattatttgttcctaacaatgatataatccatttaagtggattttgcttatcttttagttcgtgaacttttccatctgaattatacttaagatttatctcatttcctttaacttgttcttcattatttcctctttcttttaatttcaaagtataatttgcaatttcatttggcatttcttcatctacttcttgtacagtcttacctgaaacattaacacaactaaccgtagaaccgaaataaaagtggttcataaaatagattgccagccccaaatatatggcaagtaaagtaaaacatgaaactataatgcctattaaaagctttttgtgtttatttttctgcatttccataataacgtctcaccccgttatcattatacaaatgtatggaataaataatgtatgctttatttacccatttatttttcaacaatatcattcttttacaaaacatcctatattatcttactagttactgcttaatactcaatgcacataaatttatttacaaattatctcatactttatgatacatcaaaaagttatatttattactctattttttctttctctttttaaaatttctgtatctctctaacacatctatattctcagcaaagaacatattgagcatatctatattattaatagtttcgctactaataatatgttcaatcaattctgtttcctctaaaatatcctgttcacactctaaatattccaaaaacttttttacaatattgtgcctttcaagcaaatatctgcctatatttataccttcctctgtgagaattattactccatacctttcatattttataagagataattctccaaattttttcatcattttagatgccgatgaatcgcgaacattcagcatttgtgctattttatttagccgaactacattttcctccatgctgcatctatagatcatttctaagtaatcttccatagaaggggtgagcaattttcttgttaaatttatattttcgtatcctcttgcagtatgaaaattcttttccatattcttcaccatccaattttactatatttggggtatttttatgttaccaacagttatgtctaaattattatacatatgttagcctagaaaaaagttttctctaaacttaaacttactaataatatacaaaaagacaaattaatatgaatattaattttgttacttgtttaattaggctaatagttattgtgttttaggttgacattaatgttaataaaatcatacatttaatataatttaaatattttaaggacatctttcaaactatatagctaacctcaaaaaaattaggaatgttataatttaaaatattaaattataacattcctaatatataattatatttaagtttctgaaacttcagctgattttatatgatcgatatatttttctccccaaatagatatgctatccaaaactaatttaaattcttttcctatctcagttaatgaatactctacttttggcggtacctgtggaaaaaccttacgattcaccaatccatactcctctaaactccgaagttgttttgttaatgtagcttgctttaattcgggtaataatctttgcaattccccaaaccgaagtgtttttgtacttaaattatgtaaaattactattgcccatttacctgcgataattttttgtgctgttacaaacggacatttgccaaataaattatattcttcttccatcatgtactccccttagtatatttatgatactatgtatttaaaataatcctacttgaaaaaatcacggtaataacctatattatgtacaaagagattataacatattaaaatttaaggagcaattaagatgaatgaagtattagaatttttgcttaacaaccctaccttctatattgcaactatggatggtgatcaaccaagggtaagaccttttggtgcagtaatgaaatataaagataaattatatttcacaacaaacaacaccaaatctgtttttgaacaattagttgcaaaccctaaagttgaaatatccacaacttcacctaaaggtgaatggatccgtttgactggaaaagcagtttttgattccagcacggaagcaaaatcagctatgttagaatcagttccatccttgaaaaaaatgtatagcttagatgataacatctttgaagtgttttatctagaagatgccgttgtaacatttaattctttttctagcggacctaaaacaattaaactataataattatttgtaatagtctaaaaaagctatactcttatttgatgtatagctttcaattttatgattgccaaaagacctactaatctcaatatccgctaattatatttcacaaatatacattgatatttctattaatcattctgccaattcatattttaatgttcacttttatcataatgaacatgtagcaattctttagttctattctttagcacaccttcatataaagatttaactaccagattttcttcacttcttttaatttgcgtaaccttatcaatcttatatagtccttttgccctttcatttttctcttccattaatccaaaaggttgccccgctccagctatacatcctccaggacatgccataacttctataaagtcaaaatgttcttctccactcttaattttttcaattagatcttctgcatttctaagtccactaacaattcctattctaatggattcatctttaacttgaagttcacatatttttactcctttcatacctcgaacacctataaattctatatcctttaatactcttgaagatttatctttaacaacttcacgaataacagcttccgttactcctcccgtaacgccaaatattactcctgcccccgagtaaagagatagcggtatatctgatgcttctgcctcaatttcatcaaactgtataccgatttcttttatcattgcacatagttctgctgtagtaattacataatcaacatccggaatattatcacttataaattcttctctagctgcttctgcttttttagctgtgcatggcataactgctacagatattgtttctctattttctgaagaatctttctctttgaaatatgccttaacaacagcgccaaacatctccattggtgatttacaactagatacatacggcaataactcaggatatttattttctacataccttacccatgctgggcaacaagaagtaaatagtggaaatttattatcgtcagactctaacttctttaagaattcttttgattcttcaattacggttaaatccgcacttagagaagtatcataaatattttcaaagcccaattttctcatagctgcaacaattttccccataacattctcaccaggttttataccgaattcttcacctaaagcaactcgtactgcaggagcaacttgtgctacaactctctgattagggttatatattgctttccaaacatttttaatatcactcttaacaactattgctcctgtcggacatacagttgcacattgcccacaattcacacaatctgtctctgcaaggcttttcccaaatgctggacttactaccatatttgaacctctattaacgaaatcaatcgctcctacactttgtatttcactacacatcctcacacagtctccacataaaatgcatttattaggatctctaatgattgccttagatgatgtatctaaagctttttttccctgaatgcttttaaatctaatatctgtcaaaccaaaacgtgatgctaatttttgtaacttacactttccattcttttcacatatagtgcaatctctacaatgtgttgcaagcaacaattctaaaattaccttacgatacttttgaagctttggtgtattagttctaattgacatcgcatcttttggtggcgtagaacaagatgttaaaatgctacctctttcatcctcgactacacacattctgcacgccccataaactgatagatccgtatagtaacaaagagtaggtaaatcaattcccgcttttctaactaagtccaagatatttttttctttatcaaattctaccctattgccatcaatgaccatatattttgacatagtttcttaccatcctttctgtaattcataaatttcatataataaataataaaaagaaaataatattatcgaagaaatattcaaattactctaatcgccttgaatacacagctttcaatgcaattaccacatttaatacattttgatttatcaatgacataagttttccttatttctccagtaatagcttctacgggacatcccttagaacactttgagcaacctctgcatttctctttatcaatctcatatgaaattaatgacttgcatacgcctcctggacactttttatctacaacatgttctatatactcatctctaaaatatcttaacgtgcttctaactggaaatgctgcgctctttccaagtccacaaagtgctgtatcagaaatagtctctgctaattcttctaatgtatcaatatcctccaatgtacctttaccatctactatatcattaagtatttctaacattcttctagtaccttctctacatggtatacatttaccgcaggattcattttgagtaaaattcataaagaaacgtgccatttcaaccatacaatttttatcattcataacgactaggcctccactcccaatcatggcacctactttctttaacgaatcaaaatctaaagttaaatcaagatgattttcacgaagacatagacaacctccagacggcccaccaatttggactgccttaaattctccccctttcactcctcctccaatgtcaaatattatctttctcaatgttgtccccataggaacttctattaatcctgtattattaacatttcccgtaagagcaaatgctttagttccataattattttcagttcccatagttttataccaatgtacccctttgttaattattggagatacattacaaaatgtttctacattatttagcactgttggtttaccaaacaagccttgttctacagttcttggaggcttaactctaggcataccacgattcccctcaattgaagctgttagagcactgccttctccacatacaaatgctcctgctccctgattaatctgaatatgaaaatcaaaacctgaatttaatatattatcacccaagagtcctttttccatagcttgttcaatagctatgcgcaatctttttactgcaagaggatattctgcacgaacatatatatatccattgtgtgcttttgtagcaattcctgcaataatcataccctcaataacaccgtgaggatttccttccatcatgcttctatccataaatgctcccggatcaccttcatcgccattgcatacaatgtatttttctgattctgcctgctttaatacctgggcccatttctttcctgtgggaaatcctccgcctccacgccctcttaaatgtgcctcagacatttcattaataatttcttcagaagtcatgtcaaaaagagctttcgcagtagcactatagccaccttctgctaaatattcttcaatagactccgcattaatatgaccacaattatttaaagctacacgggtttgctttttataaaatggaatatcttcttgcttactataaagcttatctccatccttataacttaaaccagtaactacttcattaccaataatacttttttcaataatttcttcacaatcatctatacttacctttatatatagccatccctctggttcaattcgtattaaaggtcccatttcacaaaatccatggcatccactctttttcaaacctatagtattgtcatgtggttcttcctttaattctaatgtgacctctaatcccttttcttttattatctccttaaatcttctataaatgtttagggatccacctgctacacatccagtacctgcacatactaatatttgcttacgttgtctaactaaagcagccttatattttgaacttatatcattcagctcttctcttgtattaattctcatttgacaactcctcctttaactgcttcactagctttcttgctttctctggtgtcattgacggatacactacatcgtttacaatgcaaaccggagctaatccacatgctcctagacacgatactgtttctactgtaaaatgcatatcatcggttgtaagttttttccccgaaagccctaattgactcctaaactcactaagaataggatctgatttccttacgtgacaggcagttccatcacaaattctaatcacatattttcctttcggttctaaagagaaattttcataaaatgttgctactccatatactttagcttcactaagcttaagttcttttgctatatagcacaacgcctcttctggtaggtaccggtattccttctgaatttcctgcataatagtaataatttgtgtcttgtcataattattagaaattaaaatatcatctagtttttttatttccttttgatttaccatgatcatccaccctcctattatatataattaagtaccttttatatcaagaccactatgagtcaagatttctcttattagtatctattattctacatgtaatcattttctcctttgttttaacattgattgcataaataacttactatgtaaaataatgtatgttgcttcacaattatttatccatataatttttttgcaaaaagaacatataaaatattaaaaattcctaattaaataggtagaaaatagtataaaaaccactgtatatataaattctaacattagtggttctttttttatttctatatattaactaaaatatattttgtaagaatacttaaattagtttataatcaatagcgattaagatactaaacatagttttttaatataaataataattgtgaggtgtaggcaaatgcaaaagatacttagacctgtatatgcagaaatagatttagatgcaatagcttataatatgaaaaatataaaaaacttagcgaaagataaagaggtaatcgcggtcgttaaagcagattgttatggtcatggagctttagatgtggttccaactttacttgaaaatggtgcatcaaggcttgccgtagcagttctaacagaaggaattgaacttagaaatgataatataaatgcccctattatgatactcggatataccccttcgtatctaaacgaagaattaataaaatatgatcttgaacaaactgtatacgacttagattatgcgaaagaattatcaaaagcagcattaagccttaataaaaaagctaaggttcacatagctattgatacaggtatgggaagaataggatttctaccaactgaaaaagcaatagatgatatttgtaaaatctgttctttagaaggactagaagtaatcggaatatttactcatttttctacttctgatgagaaggataaagaatatactaatgaacaatttgaaaagtttacggatttgctaaagaaactttcaaatcttaatatagaaattcctataaaacacgtctctaatagcggtgcaatcatggacatgccagagacttacctagatgctgttcgtgctgggatcatactttacggatattatccatcaaatgaagtaaaaaaagaaaacctttctttaaaaccagcattgacattaaaagcaactataacacgcgttcaagaaatggatgcaggtatgtctataagttatggaagaacttttaagactaagcgaagaagtttaatcgctactataccaataggatatgcagatggttattctagattactagctaaaaatgctaaagtcattataaatggacaatttgctcctattgtcggaagaatatgtatggatcaatgtatgatagatattacagatattaatagtgatataaaagttggcgatgaagttataattctcggagaacaagatgggctcagatttaatgcagataatttcgcagaaataatgggaacaatcaattacgagatactttgtatgcttaaatatagaatcccgagggtttatgttaaaaacgaaaaaatatttaatgtaagaaattatctctagatccaatctagcttacttataaaaataaacttgatatttagtttttttattagttcataagttagaaataagatacttctatataagcgcaaataacgatgtatatgcaaatgtgcatatacatcgttatttatatttattaataaaatcttatattgctaattaataatttcaatgtttatcctataaacattctggcatgctaatttcagagaatacgccccaaaatataactttaattgactaacttcctatagatcaaggtttgtacagggttccttattgaaaatttgtaatatataaagtagcaaaattttcatattcatatggaacaagtatatattcaatttcggcttatatccacataaattcagctctcattgcggctccctgtatttctgtcaccgttgaatacattaaatattttatttacttgaatatgctattactttgtaatatttataagcaggcatttatataataaaaattctatttccttctttaatctaaccaattcttcagaacttatattttttaattcatcttttgtattggtgaattcctcacttaattcatcaaataaaactaatacttcttctttacttatttctttcagttcatctaagtattttcttaaagacccttcaatattattcgcccaattatctatagccgttacagatatttcatttatctttttctgccatgttaaagaatcatataaaaagaatatagaatcggtaaaaacatttaaagattcagtaattccctttaaagatgtagcccttattgtttttaataagtgatttaaattattattaacttctccaacagatgatttttcaaatgtattagaaagcttctttaaatttttactaatagcataatccttttctgaattattgaatttacctttatatactgtcctaaacatttctcctgtggctcgttcaatagaatcccctctatgcttttctatgatatcttctacaaccttgttatatgaaggtgtacttcttttaacattctcctttagcttaataatttctgtgtttagaatgttctcaacttctctatctaaattaataacttcatcttcaatataggtatttaagttttcagtttcctcgcttgttaactttggaacatagtagtgctgcattaaggtgaaggtttcttccttcattgaccatttactttcatcgtatatatagttcgtaatattctctttgattttcatatcggattttcctataagccttactgcttttaattttatttttacaaatccgttttctataacatctaatatctcatcttttttatctaaaaattccttaattacattagctttttctactacctcttcttttttacattctatttccgcaattctggaactgatttttatatcgcattcacgcaataagtaatcctgataattctttagagtttctgaaagctctccttctttatctggatcattaacttttttgtatatatagttccagagcttatctgtgtcaggattcttttcaatactgctttcaataagaaatgtttctatatctttatggatacattcagaaacgctatttctaatttcattgattcttttattatccatatctatattttgtgggcacatatttactgcaagtacaacttccacattatcgtttataatttcgccaacatactttaagaactgaaaatcatcttctccaattccagttttatatgacacaacatatattataaaatcgctttctggtataaagttctttaaaacttcttcatgcctttcaacgagtgatccatatccaggagtatcaaaaattctcattccagaatacctcgaatctttgcacggtccaatatatcttaatctatttatattaccatctggttttactgtaagattcgaaaaactatcatcatccaaaacatctatactcaaatcattatttatagcaaataatgtttcttcagaactctcatctattataacttctgttacaattccagttgttggtttaacgctctccactagtattttcctttgaaaaatactatttattaacgcactttttcctgagctagtctcgcctagcataacaatatagtgagctggattaattattctatcctttattaataaattcttcgctgtaatttcatcattatcaagaatattaactaccttatcaatcctgttttgtctatcaacgcagtttttaaaaatattcataatatttatttctccttatattcctcgattaattcccttaatatttttaaatctttttcaaattctaaaatactttcttcgttgtaattagtttcatactgtttctccaagtcttccatatcttgtttaaagatattttctaaattagatttcattgcctttatagattcgtctatttccttttgttttgccattaaatctccggttatttcttcttttaaatatatttctaaatcttctatcattggctccaaatcttttaaagtataatgagctctactttcaactatttttttcctcatatgatctccaatcaaagaaaaggctaaacttattcccattccaaccaaaattcctacagggcctccgagcattcctactgctccaactgtccctattactccagttgataccccaagtaatgctggaattgacttttcatactttattgaactctttttattaaagaatgatatattctcataggttccattaaaaccttttattcttatattttcaaatctgctatttatattttttataaattcaccaatactgttcaaaatctcatccattatatcatttatcgctttatcagatgtttctttatatattaagctaagcctattaccatcaactattcctttatttataattcttcttaattctactcttaaattttcgatattctcttttattattttagatgaattatctataatattattcatttcatcttctgcataagttcggaaatctcttaattttcttttattttccgataacattgtttttgcctctttgattctttcttccttttctaaagtattttgatttccctcatttaatgctaaagttttataagtagttaccctatcattaatgttttctaaagcttcatcaactctttgtcttaaaaccttcattaaatctttattatattctttagaaatatttttaatctcttctattactttaactattcctgaattattataagaggcctcatctacagtgaattttccttttacagcctcataaacatttactatatcaacttttatatctctttcttcattatgagaataacttatactacttaacacgccagagttatgttctcttgcctcatttgcatcttcaatactttcatcattccatttgttttgaacgaaaatagtattagctaatttaggccacaaagcatttataaaatttttctctgatcttgtaattggtggatttgtcctgattaaaaatattcctgccgttagcttgtctacatattctaaagtagtcttctgattttgcggtgtcaaacttccaacaccaggcaaatccacaagtactatatcatcttttaaaacctcactcttgttatataatactattttagatactttaagattattggcttcattataatcattatgtacatatctttccaattcctttatacgtatagattcttttctgccatttagataatatactacagcttcatcagtattttctccatatctaacctcaactggtacgcaagttgtttcatcaacatctgtaggtaatatattatcctccattagtatggcgtttaaaaagctactctttcctgcaccttgaatgcctaaaactggaactattatttctttcttattcaaattctcaataaaatgttcaaagtatatgttataatctataccttgcttctcattgttaagatatttttctaataacctataaaacctttcatcttctattaaatttatatatgtcatcgcctattatctccttcttccaaaaagcttagaaaagaatgatttatttccccactctacctcttcctgtatataatcaatcttattattaagctcatcctctaatttacttattaattctattatactatctttatcttcaattttactgtcaatatccttaatttttcctaaaattgaatttttattattaattagattatattctatagatttttctaaagattcaactttatcttcaatagatttttcaactaagtctactttttcttctatcttatctaagttaatattatctaatttatctaaaatcgcttctttattacttgctgcatcttttactacttttaatcctaagattgccagtctttcttctatagattcaaataataccttagtttgttcttctacactcttctgtattactgattctaatttcgtttctgtcatttctcttatttttaatatgcttttatttaaatcttcaagtttttcttcgaattcttcttcatgaaactcttgaaagttttctctcaagtcatttatttttctctcaactggctttaatttctcagttagctcttctgtcatatttctagatgcccttgaaagtaaacttaacatatcatcctgtatttcgcccattatattttttgtaatttcatcactttgaattaaaattgatctttcttccatatattcattcatactccttcctctttagaggtattcaaaaaatagcttaaaatcttttcaatagtttcttgttcttctactcctcttgataaaggattttcaagcagtttttcttttataactttataatcacttatcaaaaattcatgaatttcttgtgattctattaatgccatattatatattggatttttagaattaattaatatatattcaagtcttatactactaaacctactaataactttatcttttaggtttttaacttctatcagaagctcctctatattattcgcatttataaattctctgcatgaatctattactaaattcactgataaattactattctccttaaagaaatagtttaaatttctgctttctaaaatctgcttcttagaatttccaatttgtattccattaaaaataataaacatactataagtcatatcttttatctgtctaagtttttcataaaatttaagcgtaccttttccaaattcatagataatagctatatcttcaaaactatataaaccttctctctttattaattcacatacttcaaaatctagatcaattccatacattctagaaatgaaatctctgcaagaatctatgtcccatgtccaaaaaagctttagacccatattgttagacttttccttacactttttatttatatattttccaactaataggtagttcttttctaaaactttattactcagcatataaaaattataatgtagctttggaatactatatgaaatatttttttcataattatcacttgttattgctacctcatttttcacatccactcttaaattagaaagcttgtttttaatacctattagatccttagttacttctcctatatcataaagttctatattttgctcttttttttcttcaaattcttctgttcttcttgttacttcctcatagaaagtatctattgcttttgtatattgattactccattcctttaatatacttatatatttattcttattttcactacatattttttgggccctcttaatagtctcatctttatcaattattctctcgtcatatccaacttctttatatccccagtccttgtcaaatatattagacaataatctttttcccttatttagaaccccttctttcttaaataacacagttctttcttcatatttatgcttaatctcaatatttttactttcgatactcggcaaaacataagaggatcttatatctaaattaagactatcatatattcttcttttatctttttcacacctcttaacagtgcttaaaatatcactttcaatatataaatttttattgttaattctatctactatatctaaataatcttcaatattttcagatgatacagatgatatttcctttattatatttgaagtaatgttctcaatttctttaatcttttcagctatttcattctgagcagtctcaaatttatttgtaagattatcaagctctttattacttacctttattaactcttctatttcacctaaattatttccctttataatttcttgatcagttgaaattatgctattaattttttctattagactttcagctctctgtccattaagctttggaatagtattttccgcacaattttctatagcattaataaacatttcaaaattagaattatcatatctttccttatctttatctacaattcccatcagtccattaagtgctgatatttgaataacttccgatatttctttatcatctgtaatttccattaagagcctctctgctctcttcttatacttttttaatatagtaactttgtcttcttcaactattccattcctaccaattttttcttcaattgaatctatcatattttgtactaggattatctgcttgtctttttcacttactatcttaattttttcagcatttgttgcatcactattagccttaaccgtagtcacaaatatgcatatatctatagttggaagtaatatctccaatgtcaatttttcatgattttctaagttccatgcatctaatcctgggctatcgattatatgtattttctcatctaacataaaataaggtgtttttatatcaatctgagtaacattaagcgtatttccaggattcctactctcatccgcatattctgctatagcatcttcatttagattttctgactctaatactttaggctcactattcttaaaataaataacagcttgtctctttaatccttttgatgccgtaattataatacttgaactaggtcttatagccatgggtaaaatcttttcaccaagaagtgcatttactaaagtagattttccactactagttattcccataatagcaattcgtattatattatcatcataaatactttttcgttcttcaaaccatgctatatccctattgtatctgttctttctataattatttttacttaaaactcctcttatctcatcaattatattcaatatgtaattatcttttctcataaaactctccataacaactatactaattcatactatatcttccttatgtattttcatagttctgataaggcatatgaaataaaataacaaatccaaaatgccatgattatttttaattaagcaaaaaatggactcatagcaagtctattagtgcaatctgctgataagcagataagtaaaagtccaaatctatgatttgctttcttgaacttagttaactcatttatgagttaatctcctataaaaatgatttggtgcgaatcgcttgctcagtgagcgtagcgagtcgagtttcctctataatgtgaaatagacttgacagatgaacttattgtttttttgattatgcctaaatatatcttatcataattaagcatacttatctaagcaaatacttactgaataataaaaatttcacaattttatttccatcttctacacaataatatgttttattgctaaaaactctccattatatattttaacttgtcagacttattattaattaagaataacttatattaatttgccaaataaaaaacttgaaagaaatatctaagtattctttcaagttttttataaatatatattgcaaaaataatttttcatcataattctaaaaatgttgcaagaattttagccgtgattgtgaattgcaatatatcaaaatttttataaagctaaaatttatgctttattttaattataagtattattctaactcctcaaattttcattaaatatatgtctaaacttttcactattatatttagtttcattaatctgttttatagacattgcccccattatgctatttgttataattacctcttccgaatgtgttagatcatctatagtgatacttttttcggttaccttaaattttttcataatcttatctcttattataccttttaataatccatcttcaccatttggagtaaaaatttcattattttttatcataaatatattggcacagctcgtttctgtaacattacctttttcatttaaaaatatcacatcatcgtagcctaatttcttagcattttctttttcaattatgttttctatatagcatgtagatttgatagaggataatcgtgaagtactgttacgtcttacctttgaaattgttaacgacattccttttttataatcgtcatctttatatgcaatttctctttcggttattataatgtttaaaggtgtaacagttatttttaatactttgttttttatctccaacttacttaaatgatctcttaaaaatttttcttccactaatggctgtaaatttaattccaacatatctttttttaatctctgtaaatgctcttccaaatatattggtttctccttacaaagaattgtttcaaatattcctctaccaaaaaatactccatcgtcaagcattactttatcataatcatgagctatccttctcactacaatacctccatcaacgctttagctttgtctattgtctctaaccattcctcttcttcaatagactcccatgttattcctccgccaactcctaagtacgctttattccctttttttataatagttctaataactatgttaaaatcgctatttcctcttaaatcaaagtaccctatagagcctgtatagatatttctttttagcttctcaagctcttctattatttccattgctcgtattttaggcgctcctgtaattgatccccctggaaaacactcccttatgcactttactgaagacacattttctcttaatcttccttctattgttgccacaagatgaaacacagtctcatactcctctaatttaaaaagctctgtaacttttactgatttaggtttacaaactttactcagatcattcctttctaaatcaacaatcattaaaagctctgatttatctttttccgaagccattaactcatttctattcctttcatcttcctcataatcttttcctctaggtctagttcctttaattggtcttgtttgaaccttaccatctataattgataaaaatctttcaggtgaagaacttattatttgaaaatcttcaaaattcatatatgctgaaaatggtgctttatttgtatttctcaattttctatatatttcatatggcttttcattattattacaccatattcttctagtcatattagctatatatacatctccacttcttatatattctttaagagatgctatagcttttttatactcttccttatcaaaatttgaaaagaattcattatttgttttttctaaatttattggaagcccctcaatataattctttaggcacttttctatacttagtatgctatttttagattcttcaagttgcccaactgaagttatataagtttttttattttgtaaatcaaagattattagattgtcaaagaaaataaaaatactatcaggtataccaaaatcttcctttgattcatctggcagatcctctaacactcttcctatatcataagaaaaataaccaatagcaccgctcacaaaaggaatgttgctattaatactgatcttataactctcaataatttcgtctaatttttcaaatggatctacatcattatattcttcattatcaatagttacttttctccctctagagataaattttttatatgggttcaatccaataaaggaatactttgataataatttgtcttctttcgaactatctaaaaatatagaatctttactatctttaaaaagatcatatgtataaaaaggatcataatatgtatttaactctttaatcttaaaatctatcatttctaaacctcttgcactctaaaataaaattctctaagattttatggccttcttccgtaagttctgcttctggatggaattgaactccatatataggtagctcattatgtctaatccccataattacctcatctgacgtttctgccgtaaccactaattcttttgggagtttcttcttatcaataattagagaatgatatcttgttacctttaatggatttttaacattatggaatattccgctattattatgtgttacttcacttattttaccatgcataggcctgtcgcctttaattatttctccgccaaaataatgtcctatacactgatgtccaagacatatgcctaatataggagtttcatttttaaatttatcaataatatctaggcacaagcctgcttgcttgggatttttaggtcctggtgaaataactataccataatatttattgtttctgatgctctcaatattaattttatcatttctaactacatccacaatttctccaatctcttcaaaatatctgaccagattatatacaaacgaatcataattatctatcattagtaacactttaatcattcctttttaactttaattattataactatatatgttattattaagtttctgcatttctatcttatttgaactcttgttcttgagctactataattttaaatataaatttattatttcaacatatatactattagtcacatatttattttagcattaaataaaactctgttccattgattgtattttctcgttcataattttaaattatatctagtcgttcttacgcttcttaataaattatattgttatctcatattaccacctaataattacctatatgtataatatataatttttattatacatatattctcttgtcataggaagatcatcatttattcctttagaaattagtaattgatgaatatctattattccattattaaacattgccgcacatgaacaaagataaagttcccacattcttataaattcttcatcaaacattttagaaacttcacttagattgttattaaaattcgctctccaatatagtaaagtcttaacataatgccttctaagattttcaacatcgatagtatggaaattataattactacaaatgtctataatttctctaaaacttggaataactgcttctttaaaaatatactttttaatccatggatctacagaatattcttttaacgaattaatataatccaataaacatagaccttttggttttaagacagaatcaatattttttataaatagtttataattctctcttcctatatgctcaatcataccaacacttacaactctatcaaatgataatccactttcagctaaatttcggtaatccataagtctaacttctagtaatttttcaagctttctttcttttattctttcattaaattttttatattgctcttggcttaatgtaattccaataccatgaacactatatttttctgctgcttcaataagtaaagatccccacccacatcctacatccaagacgctcatgccttcttttatgtttaactttgctagtatatgattaattttattgatttgcgcgtcatgcaaactatcattatttgatttaaaatatccacatgaatatgtcatagtatcatcaagccataagctatagaaattatttcctatatcatagtgctcttgaatctcacctttttgtttttttgaagaattggattgaaaaatcgtattttttacttgcttactacctgatgagaatttatcaatctgactaataaatatatttataacttcaaataaatctccttttatctctatattccctttcatataagcttcaccaatcgcaaggaacgtacttctaattaagtcttttttacttatttcccccttaatatttatttcgaattgaggtgtacccttccctataataaattctttattattttgaaacttaatcctatatggtatatcatcgaaccttgataaatatttaacataaagactatttattagattcatatagaattcctttctataatttaaatactgattaatttatactattatataatttcaaatatgctatacattaaattctatattcaatagaaataattaaagagacagtagagaacgcgcaataattgtatgatcctctaactatctcttaactaacttttctactcatttcatttttgtataattatttttttcctcattttatttattaattttttctgttactttctttagtacattcttacaatcacaacttttaaataatttccctcaggaaatttatctgtaactgcaaaatcttctggaagagtatgttcttctagaatttcataatttctatgtgattctttaaaagcttcatctataaacttcttaaatttgcccatattaaaagtagcacagtttgttgaagctacaattactccttcatcctccgttatatctatagctgatttaaccaatcctttatagtcttttgctgcactgaatctattatcttttgatgttgcaaaacttggtggatcaagaataaccacgtcaaattttaatccttccttttttgcacgtttaaaatataggaagatatcttcaacaattatttcatgttttgtaaaatcaatattatttatagtaaagttttcagttgttttttctagacttcggcttgctaaatcaacacttgtagtaatagcaccaccttttgcagctgccattgaaaatgctcctgtataggaaaaagtatttaaaactcttttattattggagtatttatctttgatagactttcttacttccttttggtccaaaaataccccaaccatggcaccatcatttaaataaattgagaaattaactttattttctttaactataagaggttcaggtgcttttcttccacaaacatagctatcttcatctacaaccataccattttcttcaaatctctttttttcatatataccatcaaaagaaactaagctttttatagctttaattatattgtctttaaatgtatatatacctctgctataccaagtgatgagataatattcatcgaaatagtcaatcgtaagacctcctattccatcaccttcgccattaaatactctaaatgcagtcgtgtcttttgaatgataaaacttcattcttttggaaaatgcatttctaatcttatcatagaaaaatttataatccaaattactatttttactattacttaaaatccagccacagcctttattttgttttccataatacccctttcctaagaaagtctttttttcatctataagggttatgatttgaccttcctcttttaaatcttttatattatcaaaagcttctccaagaattaaaggatatccatttttatatttcttaacaaattctttttttactgtaagtattgcttctttcatatatgtatttaccttcccgaaaactattgtattaaattctaaataattataccataaatctaaacttgttaattactaatttataattgcatattttatcgtgtacactatatattattgtttttttgctccagattagatactgattagtttataccatatataatttcaaatatactatagattaaatgctatatccaacagaaataattaaagagatagttgggaacccacaataattgtatgatccaactatctcttaaataacttctctattcatttcattttactaatatttgatacatcaaattccatatgatatatttgtttaatctataaactattgaattaaaattctactatcatctcttatagcttcgtttaatttaggtaatataatttgtaattccccattttgaaattttgcagaaattctcgatctatcaacattctcaacatgaaaagcccttgatatttttccataagttctttctcttctaatataattatctttttcttcatttatttcttcatttctaagagcagaaataatcaaagtattgtctctatattcaaggtttatatcttctttcttaacacctggtaattctgcactaactaaatattcattttgagtttctcttatatcagcattaaatttttggttatttcccaaaccaaaactcattggcgaaaagaaatcatcattgaaaaatccattgaaaaaatcttcaattgagcctcccttcttatctaatccgttagttctaaaaggtatcaatccaaacatactaagacctccttaaaatatttattatttgtttttacaagtaaattataaccaaaaggtcaaagaaggtcaaaatcagtttttgtcctttattttttttctcttactatatatttctataatattaaattatcttttacttaatagtatttgcttttattttctctaattttttattgcttatatattttttcatgatctctattatttcactttgattttaaatcatatttagacatcttttcagctatattttgagcttgaagtgataattcttcagttgatgccgcagtttcttgtgccttagctgtgttaatctgtataacttcagagatttggttaactctcgttgtcattttcattatctcatttgtttgatcttgtgatgctagtgatatttcgttgaccaatttagcactattatctacattaaccactatattttgtaatgaattcgaggcctcttttgctaaaccttcaccttttttaactgcaaataaagaatttcctattaacatattagtatttttaactgcatttgagcactgttcggctaagctcttaacttcattagctaccaccgcaaatcctttcccagtctctccagctctcgcagcctcaatggctgcattcagcgccaaaaggtttgtttgcgatgctatattttctatagagcttgtaatctttgaaatctgatctgaagattcagcaatctcctctatagatttcattaactcttccattttgtgatttccttcagatacaatattcttggtactttccgatactttattagcttcctctgcattttgggcgtttatagtaactttagttaatatttcattaaaattgtctaaaagtttttctattatacttgcttgatttgtagctccatctgatagttcttttgtaattagtgatatttgttctgatctatttgatgttaactctaccgcccttgatataccatagaaatcactattcaatgtgtttataatactctcaagcgactcttgtataggaacaaaatcgcatttatattgcacatttttctctaactctatatccaaatttccaactgatattttttctaaaattgttgtaatatcatctacatatgagtctatcatctcaatagcgctaatcaaattacttgccatctcccccatttcatctgtagattcatagctactttcaaccttaagatttccatataataattcttcagatatttcttttatattattaattcctttaataaatatatctgtcaataccctgcttattgttgacgttattattaatgtactgatcattatgattattataaatcctaatatggtattattgattatatctaccttatgtaaaaaattagatgtttgtttttgagactgtttatatacttctataactttatctgctatgccatctatttgataagaatatgtattttccattactgctaaggctgatatcttctctttcttatttatcaattccactatatcacttctactttttgcggctaattctacagatgaattaatctcatcaattagttcatgatcaggtagtgtttcttttaaaactttagaattactatcgaattcttctacttcttcatttactaattctaaatatttttgctctttctccacatcttcctcagctattgctttataaagatttttatctattttttgtagactaattctcatatttgatatattatctgaaagtgcatatgatttcctatatgacaaattagttttataagaaaacatatataaaatacttactattataatcatgcttattattgtaaacatattgattattaagaatgatttttttattttcttatttattggatctcctgatataagttgatgtaatctttggtacataactgtttccccccgaataataaaatacatttttccttttgataatcatgattaatttatctttctggctaattaatcaccgaaattagtgatggtatgagtattaattgcattaactttttactgcttaattgataatgaatttcatttactattatatcaatttatgtaccaaattcaagacatatatgaaaaaatatgaaatttaagtaattctataattttttataacacaaaaaacctcactataaatttgatatctatagtgaggttatatattgtgctattctttctgtcaatctcataattgaataaaattaatatattatccattaattcttttctaatacattctctactttaaaatctaaatattcttatttcattgctttaaacatacatattttagttgttattgatatatctccattctttttaatatattcttctaaatatttcgtaaattcttttttcttttcaccaacaagtattgaacttccttgaatagttgaagctttatatgatactactggttcagccttatctactattattttaccatctaaaatttcaacatctactttatgaaaatatttttcaagcattcctctgccgtgttctaggtcaaatctttctgaatacccattgttatctaacccagaattaggcgcaaaattttctgagagtctatttaattctttcatggaattataagaattagctgtcacataaaatacaccattaggctttagtactctttgtatctcagctaaagccttttctatatctggaacaaaatagatcatatgttgagcgatgattatatcaaaagtttcatcattataaggtatttcttcagcattaatttcttcataatgaaaatcatgatatacatcttttaatctatttcttgcgattctaatcatacttctagaaaaatcagatattgtaatatttaaagtattatctatataatctttattcttaaaccaaagctttcctgttccacatccaagttccaatacatttgcgtttggtgagaaacttatctgattaaaacaccatttatcaaaatctattttatttacattatagctatgaagattacttctaatatttaagtttttatctgttttatattgttccctaaccctactttccatattagttacttttatgatatcaatcaaattacttgcatctagaaaaccatttttctttgctgtattttgtgctttattaaaaacatcaattacagcctcaatatgtttcttcttttcttccaaagctttcttttgaatacttatcatattctctaggttttctccactttcatgtaatatatgacttatttcatttaatgacaaaccaatgaattttaaggttgtaatctgctgaagctttaataggtcttcttcacagtaaattctatatcctgaatcagttttttcactaggcttaagtaatccaattttgtcataatgaagtaatgttttcactgtcactcctgattttttagcaaattcaccaattttcaattcatttccctccataacattattctaatccattaccttagggtatagtcaactctaattttaaagagatactatcttttataacctttccaataaattttaattaatatttttaactattttatacgttatactcttattttttcccatataattccgataaaataattgaaggaggaagaattaacaatgagcagtataactataaattcaaatcgaaacaacttattcagaaatcttaatattaattcaaccaatgacaaaaataaaaatgttgttaatggtaattctagtattgctaataaacaagataaaaaagaaagcggtttgatgcaaaatctcctaaagcaaaaacaagaacttaaagaagaaaaacaagcattgatggctaaagaaatggatgcaaaagagaaaaaagctaaaatggatgaattaaatcagaaaataaaagatgttgattctcagattcaacagctaaagattcaagaaaagcaagaagaacttcaaaagaaacaagatgaaatttcaaagaaaaaagctaaagaagaaacatctaataaagatgataataaaaccaaaggcgacgtaataatttctgctagcttaggtgaacttattaagattagtggctcacaaaaaactatacatttattaaaggatagtaaaaacaggcaaaaagtagaagctgaatatatacaaccaaataatatcgaaaacagctacgataacaatcgtttatcgcaaataggcgcaagcatagccaatataaacatgaccatttctaaaaagattggagacataaataaaagtgctgaacgcattcaagctaaaacagaattagctcttaaacaaatcaaagataaagatgacaataagttaaatgaagaaacaaaagacatagataacaatactaataaattagataaaagttcaaaagataaaactaatagtaaattagatacggaacctaataataatccatataataaagctacctaaactatagtttagcttctgaaaaaaacatattaaaatattgcatcagattcaaaaaaatataagacagcccgcctcattgtatgggctgttttatattcataaaaataattataataattcttttactactttaataacttcttttgctatatattcagcatcttctaacgataatgtagtatatactggaagtgtaatctcattttcatattgtgcataagcatttggataatctttaatatcatacccaaggtttttatatagagttagcataggaaggggtttgtaatgaacgtttgttgctattcctatatctgctaacttttgaatagcttcgtttctctttttctcattaaatcctttaactctataaagatataaatgatatgatgtctcagttccattctcatcttttgtaaatggaattattgaaaattcttcttttgataaaatatcactgtatatcttaaatatttgtcttctcttttccaacattttctcgtatctttttaattgaactaaacctatggctgcccctatatctgtcaaattacacttaagtccatcatttataatgtcatattcccatgcacccgcttttagcttacttagagcatcctttgattgtccatgcatggcagtaaatctcatatatttaagtaaatcctcatgatcaccaaagtggttgtcattaaatgtaacggctccaccttctcctgtagttagatttttaactgcatgaaacgaaaatgagtgaaaatcacattgagacccaactggttctcccttatatttagcaccaaaagagtgcgctgaatcgcaaagtattataatatcttctctgtttttatccttcaagactttctttaaagcatcataatcaaacggtactcctgcaatatccactggcataattactcttgttttatctgtaatcttatcagcaattttatctatatccatttcaaaagtatcttttttaacatcaacatatataggtttaatccctctatgaataccaacgcttgaagtagcagtatatgtatatggagtagaaataatttcatccccctcttttatatcaaatactttaagcactagttccattgcagcagtcgcactatttaatgctaatgctttattaacatttagataattttgtattccttcctcaaattctgcaagttttggtccagaagtaatccaacctgatcttaatacattacctactgcttctatttcttcttcagttatatctggtggtgaaaatggtatctttttcatacaattcatcctctctaatttaagcacaaaattttaatatatatgttgcaatacataatgcaaatttcacaattcacaattacggctaaaattctttcaatatttttagaattgtgacaaagaattattttgtaacatatatataatagaatctctaaaagtaatttataggaaataacttttatattagactctcttttatattattataaactccacccttaggtaagagtcaagttaaaaatatttatcttagaataataaataaaccaccattttcagctagtctatttataaactagttttttctaaaaataggtggttgtttaattaagaagcctttctatatgcaataataacttttaactatttattatctctgttttttatggaactacctaattataattcaacaattactggtaatatcattggctttctcttcatctttgtataaacaaaattatcaacttctcttcttattccattctttatttctgcccattgagttatgtttctatctaagcatttttctacaacgttagtaactatgtttctaacttcgtctattaattcctcagagtttcttacatatacaaaacctcttgatactatatctgggccagatattatgattttatttcttatgtctatagctataaccactgtaattataccattttctgctagattcttcctatctctaagaaccatacttcctatatcaccgacacccataccatctacaagaactcttccaaatggcacttttcctgatacctttccagcagctctagttaattcaaaaacatcaccattttctaaaataaatgtcctagatttgtctactcccatactttctgctattttagcatgagtaattaaatgcttatactcaccatgaactggtataaaaaatttaggttttaataaagcttgaattagccttaattcttgttcacaagcatgccctgaaacatgtatatcttctattgatttatatattacattggcacccttttttattagatcatttattaaattagataccgccttctcattaccaggtataggacttgcagatataataaccatatcgccttctattatttgtatatgcctatgtgttgatgcagctattctcgacaatcctgccattgactctccctgacttccagttgtaacaatggttagcttatcatctgggtaattctttatttcatctagacttattatcatatcttctggtataaataaatatccaagttccatagcaacttcagatatattttccatgcttctaccactaaaagctatttttctgttatattttattgaacaatcactaatttgttgtaatctatgaacatttgatgcaaatgtagatactataattctaccagtagccctactgaaaagattttctagtgtttctccaactgttttttcagacatagtgtagcctttatgaagagcattagtgctatctgccattaagagaagtacacctttcttgcccaactgagcatacctttgtaagtccataaccttcccatcaattggcgtaaaatccactttaaaatcaccactatgaacaataactcctattggggtatgcaacgcaatagaacagctatcaggtatactgtggttattccttatatattcaatttttatttgctctaattttattagttcccccggttcgacaacatttaatgtacagtcactaagcatagtatgctcttttaatttaccttctattagtccaagcgttaacctagtaccatatataggaacattaatttgttttagcacatatggtaatcctccaatgtgatcctcatgcccatgtgtaataaagatacctttaactttatccttatttttaattaaatatgctacctctggaattactatatcaattccatataaatcttcatctgggaatgctaatccacaatctataactattatttcattatcgtattcaaaagcagtcatattttttcctatttcaccaagtccacctaatgggattatcttcagtggaatttgtttagattttgtttttttattaattttagtttcactaattccaatttcattattctccatatcatcacacctcaaaagtttttattctatgctttaattatttgcaattaactttaaatatataagtgaactttaaaatttattttaacctaaaaagtagcatcataatttcaaaattataatgctactttttatagttatattcgtctttaaatatcattaaattatttcattattaagcccataaattatattaatatatatgttgcaattcacaatgcacatttcacaattcacaattgcaactaaaattattgcaatatttttagaatcatcatgaaaaatcatttttgcaatatatatatattgaatatgcctggaataatatcttaatatttttactgaaaatacattgcttttaatttatcagctatttcattttcacaacttgatatttgcctgattccatatccaagaagtaatggtgaactactgaatcttggcataaccttacataaaattttattttttatatgatagaaaaatatattaaaactatcgcacttcacgaaataattatttaaaaggtaatgaactacctttctaagattatatgccaactcatttaacgcatataaatcatcacttataattatattaaattcagtaaatccattaaatggtttatgtgatagattaactaaacaattatcacttttatgaatttctattccttcaaaataatcatcttttatatttaatttataatcaatatcatcaagacctactatctgcatatgaggatgttttaggcttccaccagaatttgggccatggtttttataaaatattactgatttatattctccgcttgcctctattcttagccaatgcttaacactaaatcttattaaatcctccatatactctgcagaatactgtcccatatcagtattacaattatacgtttctataataactaattgataagtatcttttatagtcggatacttattttttagtaatacaaatggcccgtcttcatcaataacatctgtaagtgtttctctattacaaaacggacattcctttatatttatttttttaaattcatttggtttatccttattaatttcatttaaaaatactaaatacttatcgtttcccatttatatcaccaaaaaccttccatcaaaatcattttttaattaatacatgtgcacactttgaaggaacagttatactattaccctctatagcgtaaatttcatctactccagctctttccttattaacaaggacgctccatccacattcttttaaatctataaatgcttcctcatcatttggattaaatattacaactatagtattacacaaatttttctcactattatcttcaatcttatatgcaacaacattttctttgtagaaatcctctccatactctaaaaatgttaaattctttctaatttcttcgcttaaattcattctgaacgctttatatttttttcttaatttaattagacctttatagtaatttacaatttctttatattcaaaaactctattccactctaaattatttacgctatcaggagcattataactatcatgactaaagcttccatcgtcatttttcttagtccttaaaaattcttctcccgcttgaaagaaaggtataccttgagacgttaaaactatagccgctgctaacttattcatattcttacgtttttctagagaagattcactgttagttaaatatagtttatcccataatgtataattatcatgagccgaaatgtaatttatacattgataaggctcatttgcccatgcaaagcgtgagtatatgactttatcatagttaatgccttgtttaccaatagctcctacaatacagaatttaatactttcttcaagccctgttctaccatttacatatcctttttcatttatattaaacacatgtcctttaacagaatctctagtatcatcactgaatgctgcaatctgcattttatcaaatttcactatattttgctttactgatgactcttcactacttaatggagtccagcctccagtccaaccttcaccatacataagtatagatgtatcaatcttatctaactcagctctaatttgtctcatagtttcaatatcatgtaagcccattaaatcaaatctaaatccatctatatgatattccttagcccaataaattactgaatcaacaataagttttcttaccatatatcgttctgacgctaattcattaccacaaccagatccatttgagaaatttccactttgatcctgtctataataatatcctggcactgccagattaagattagattcatgacttttataggtatgattataaaccatatccataacaactcgaagtccagcttcatgaatgcttttaaccatttccttaaattctctaattctcttttctccgctaaaaggatttgttgaatacgatccttctggagcaaaataattttttggatcatatccccaattatattgtggcatatctggtttactttcgtcaacagtttcataatcaaatgctggaagtaaatgaacatgagttattcccaattccatcaaataatctattcctgtctttgtatattttcctggaattgtagtcccatgctcacaaaacgcagtatactttccttttttgcttgagctcattcctgaattctcatttattgaaaaatctcttacatgaacctcgtatattacagctgacgttgcagagtttagctctggttttctatctttagcaaaatctatcggatctgtttttttaagatctattaccattcccctgtttccattaaccccaagggattttgcatatggatctacaacttctctttcatttccactattaattattaagtaattgtaaaattcaccttcaagatctcttttcacctctatattccaagttccttgtgctcctcgattcatgtctaatatttcttctggtgcatttgtataattcttttcatcctttccaaacaacgctaatctaacattatttgcatttggcgcccaaactataaattttgtactatctttagaatattctgcaccaagattcccatcatagttattgtactcattatctaataaattcattatattattaccccttttactagttttattaaatgttttgcaagtaaatgatatttaccctatctatatatttttaaattctagtagattatctccatgttactttcttaattctgttattattttacccgaaaatgctgggaccactatgcttgtttcattagcattaatcactatttcattttcatctaataaatcaatacctttttcgaagggtaatctaaattccaaaacactttctttatcagataaatttaatattacaaaaactctatcattatcagtatttctagaaaatatgaattgttcattcttaacaacaacttgttcataattaccatattttaaagcttcgctattaattctaatattacctaactttttaattaattcaaataacttatcatcttgttcatctatttttccaaattctaattctggtcttaaaggtaagtctgtaccatttcctttaactcccttaagaccatattcactcccataatatagacttggcacaccaggcattgtataaagcaatatatatgaattatatatatattctggcttttttagtgtacttgctagtctgttaacatcatggttatcaacaaagttatataaacatagatttttataaattccacctggaccaaataatctatttaatgaatatgcaatttcaaaatagtttttatcgttatgacttgaataaattcccttataacattcataatttgtcacagaatctagactttcagcattagcccatctgttatagtctccatgaataacctcacccattagccaaaaatccttcttctttccttctacaaatgtctttaaaactttaaaaaactcaaaatcaatgctatcagctgcatctaatcttaacccatctatatcaaattcatctatccatgtacttacagcctgtaacaaatgatttctaacttcttcattcttcaaattaagtttgactaaatcataacagccattccaactctgataattaaattcatctcccattggacttttgctattgaaatttaaatctgcaaaccagctacaatacttagaatttactccatttatctgaacatctttaaatgcccaaaattctcttcctacatggttaaataccccatctaagattattcttatatcatttttgtgtaactgctcacatacttctttaaaatcctcattagttccaagtctttcatcaactttgtagtaatccttggtgtcataaccatgataactcgactgaaaaattggtgaaaaataaacagcattaattctcatttcctttaaatgaggtatccatttttcaattttgcttagcctattttttttgtcatatattttacctggttctaaaacaccacaaaatccaagtgtatagaattgataaaatatactttctctaatccataaattcataatctcatcccctttagtttatatacattataccactttgacgccatttttttacaccacttgtttataaattaataaacctgatttttaggcatccctatatttatatccttcctaattatataaaaactcttcataattagaaatacatattggaagtttatatattttatttctataataagaaaatttatataaatattattattatttttatcacatactagatattgaaattaaatatctacggaggtataaaaatgaatacaaacgctataaaatacataataactttattactggcaataaactgcctaacatttcttcctaaaccaacagttgcaagtgcagcttcctattcacttggcggcttaaaaatttcaacttactatgctcataaagataaatctaatggttttaatgtgtttggagaggaaaattataaatatctttctgctaaacaaaaaaaagaattacttgaattaaagaaatataaagataaaggtcaggatctttcagaagagcaacaaaaaactttacattcacttatagattctatcatcaaaggaaaacttggagataaggactatgtagattttaaaagtttagttgaaaaaaaacgttctaatgagaatttaactgatgaagaaaatacacgattaaaggactatacagatattattaacggtaacaaactttcaacgaaagatatacttagtcaatttctaagataatatatattttatgcttataaaagaacaaactctaattgatagaatttgttcttttaacgttatattattattaaatactattttcgtagaatgataacaccctataaaaaaaagaaaaggctatttcatctctttcaaaatacgattcatgcttagagcctttcatatgaaccaccttacaatctttagcataatgcgcaaatctattctgtgcttttgggataacatgcgtatcatattcagcttgaaataatagtattggtatcattatttttgagatactctttcttctaattaattctttagttgcttttaaactttcgatataccataaagccgatgatccaccactatgataattatcattatttttaatcttctccaaaagatattgatatctctccttacaactagtcgatctactgtaaaaatccttcttttcaacatatggcttctggcctggaagatatgaatttccttttccgcaaaccttcattgccttagaaataatatttgctaagatcttaggtgctttcccagtattaatttcatgcattggtgaacttaatactgccgcactaaaataattattgtatttctctaaaaaaacagtacctatacatcctcccatagaatgtgcgaataataacaacttcttattcctactatccggaataacaatttcatctataaactttttgaaatcttctacataataatcaaagttttcaacgttaatctgataattatccatcccaagtctttgtgatctaccatgtcctctatgttcaagaataaaaacagagtagttttcctttataaaataataaattagttcattgtatttttcagtaaattctccaaatccatgacaaataactatattagcttttggcttctttacaatgaatttttcgtaataaagctttaagttatttgctcctataatatatccactttctagattcttctttagataaggttcaactatatttaccattttttccttataattatcctgtgaaatatatatttcaagatacttatccttaaaatttgagtatgaagatgctgttagtgctaagttatcttcattcataatcttcccctccccaactacaaaattttggaatcaaaatttatcttaactattaatataaatcacttcttttaaatctattataatttgaagttaaaatatagattaatttataaatttacatacaaaaataaggtaactattttaaataaaatttacttattagaaatttttaaaacaactaccttattatatactatttatcacatttttatttgaaatttatttatttctagttaacttgtattaattcctaaccatactttagtaatagtacaaaatctataaactttctattttacaataatatctctttaatatataattttttttctttttctaaatctataaactcttcgcccttcaaaatcaaaggcttttctagattatttacattcatttgtattatcttgcatttttcattagtatttaataatacctcttcacctgtgtaataatctataacatgctctaagaatatctttacatattcgtaatctagttttcctaaactttcgtttttaactatttgcagtgcttcaaatggaagtcttttcttcttatatcctctatcagaattaattgcatcaaatacatcagctatagcaatgatttttgcaaaaggatgtatagcttccccctttaacccaagcgggtaaccagatccatctaatctttcatgatgcatcagtaccccatagctcacagccttgtccaaaaatgaaagttcttttattaccatatatcctttctgagcgtgggtttttattgtattaaattcattttgtgttaatcctacttctttcattagtaattctcttgctatttttgtctttccaaaatcatgaagaattgctgaatatactaataaatttaactttgccttttctaaacctgtccattttcctataagagcacttaatgctgctacatttactccatgtctatatattgaatctgttccacttccgtaaagaactatattctttataactaaactacctggctgtatctcattttgaatttttctagaaaattccctcacttcgtttagagcttcttcattgttattaataagttgtctaaaagtttttcttaatgctaaagaaatttcattaaattcattttcaatctttttacattgtgtctctttctttaattctatttcactgctttttgcagctgtattttcacaatatatctctacatttccgataacatataacttttttattttttctataatttgttgagttactgaaatatcttttttaagtagtatacttccattttgctctacattttttgctattaccattccttcttttaactggttaaagcttattacttttgtattcttctccataatactcacacccatcatataacaaattttatgcttctaagtatagacagaatatatctatctccatgacttaaaaattaaaaatcccctaattaaatatataaaaaccataataatatataagtaagattatattaagcttataaaacaatattcgagtaaaaatttatttattatttatattattctatatcttttatattttgtcaaaataagttttaatttattttgaattctagtatttccataacaaggagaaaatatagacatataatataaggatgaaatttgacttccatccttacattatatctcttctaatgagactctgtttatacaaacattattctataggagatgctttcttattcccagtcttagcttttccttgtatctctattgggacatcttttacatcattttttttaggtttatttcttggttctggtctaatcattccttcttttgccataactactcatatcctttctaaaataatctcaattttagtattctaaaaaaattctatagtatacatggcatcaaatagaaactgctgttatagtggcatcgtcttcaaaaactattttagttattttctatccatctattccattcttctgctttatatccaactgttgcttctttaccatttcttactataggagtatttataactttttgattttttaataataattcagccttaatctctgcacttcgtatattattaaagtttaattttacatattcctttgccttcgtatttattaactcattaatactaactgctttaattatgctattaaattcacttttgctcataggtttttcatttaaatcgataaactgaaattttatatttctttctttaaaaaatctttctgcttttttagtatcaaagcattttttagttccaaatatctgtatattcataaattcatttcacctattttcattttaattttctttaagtcgccttacacaatactccaatctattgcaactatactttgactctatattgtgtattaacaatttaaaattcccattataacaaaagaaatccttactcttaattatatactaattactagcatatcattatctctaacctcaagtaaggatcttctctttcaaattactattttaactctttgatattaattctctatttttgctatagtatctaaagcaacttccatcatatttgtaaatgtcaattgtctttcttctgcgcttgtaacttctccagttacaaagtgatcacttactgtaagtaaagctaatgcattaactccaaatttagctgcaattgtatataacgctgctgcttccatctctactcctaagcaaccaaacttagcccacttcttccaatcttcatcatcatcgccataaaatacatcagagctatatatactaccaactttaggatcaaaacctttctcaactgctatatcgtatgctggtttcaataattcaaaacttgctgttggtgcaaatgttctaccttgaaatcttactaaattaagatttgaatctgttgatgcagacatagctattataagatctctaaccttaactttttcgctatatccaccgcatgttccaactcttataagatttttaaccccataactttgtatcaattcatttgcatatattgaaatcgaaggtattcccattcctgttccttgaactgaaattttcttacctttatatgttcctgtaaatccatacatacctctaacttcattatagcaaactacattttctaaaaagttttctgctataaactttgctcttaaaggatctcctggtaataatacgctttctgcaatagcaccttcaggtgcattaatatgaacactcattttttacctccataattttaaccaaatcatttcaattaatgatcaatatatttaaactatttcataataataatttatttgctttcactaactatagatatactagcactagcgccaactctgcttgcgccagcatttatcatctccatagcagctttaaagtctctaactccacctgatgctttcacacctaaatctggtccaacagtctttctcattaaagcaatatcttccttagttgctccaccagtagaaaatcctgttgatgtcttaacaaaatcagccttagcctccttagctatttcgcaggctttaaccttttcttcatcagtcaatagacatgtttcaataattaccttaactaatgcttttccttttgccgcatttacaactgcttctatatcttctttaagtaaactataatttttatcttttaatgcgccaacatttattaccatatctatttcagtagctccattttgaatggcctgatttgtttcaaaagctttagcttcctttgtcattgcacctaatggaaatccaacaactacacatgtcttcacatcagtccccataagttcagtacttactaattttgcataacatccatttacacaaacagatgcaaaattgtattctttagcttctctacataatctctttacatcctctactgttgcttctggttttaatattgtatgatctatatatttggcaatattcatatttcattactccttaaatttattttataactatatattttacaattcacgatgcacaatgcacaattcacaattacagttaaaatttttacaatgtttttagattaacgagtacctttttcgtaaggaactccatcagcttttggtgcaactgattttccaacaaaaagaatcaatactacaattgttaaaatgtatggtagcattgcaagtatttgcgaaggaatagcaaagtttccgccacctaatacaactgttaatgcttgagcaaatccaaataataagcaagctccgtatgcgccatgtggagtccatttaccaaaaataactgctgctaatgcaataaagccttgaccgctaattgctgttggagtgaattgcgctattattgcaagtgtcatagatgctccaccaaaccctgcaagtattccagaaatcataacacacacgtaacgagttgcagttacacttattccaagagtatctgcagctgctggatgctctcctacagcacgaatacgaagtccccatttagtcttatataaaataaaccaaataactactgtaattataagtgctatgaaaactgtaatatctacgccaaatactttaggtaatttagtagctactggtttagtcatagtagctccttcaaataataacctgcatgtaaataaagagaaaccggcacccaataaatttatagcaatacctgatattgtctgatccgcattgaatgttatagatgcgactgcatgtaataaagccattattccccctgcaattcctgcagctaaaaatccaagccatgcatttccagaataatatcctactgccgcaccagtaaatgcacctatagtcatcataccttcaattccgatatttacaactccagaacgctcagaaacaactccacctaatgctccaaatattaacggtgctgaatacattagtgtaatacctattaatagtgcaatactatttaacattcttttcacctctctttaaaagtctgtcagctaaagcaggtacaatcttagttaatgctacgaaaaatacaatagtacctatcattatatttattatttctgatggtgcacctatagcagattgtacagattgacctccatatagtaatccaccatataataatcctccaaatatacatccaataggtgaacttcctgcaattaatgcaactgataatccattaaatccgttattttcaaaagcagccatagttgataacttatgaggtgctgtgcctgtaatagctagtgctccagcaagacctgataatgcacctgcaattaccattgattgaactatattacgattaacatttattccagcaaattctgccgcatctttatttaaaccaactgcacgtaattcataaccttttgctgatttatataacaaaattgatataactacagccattataatagcaacgataattccaatattaacatctgtctttaacaaaacttctgataaccatttgtgatgagaaagaaattccattccagcatcagaagtcttccaattgccaagtatagtagtaaatccagattcattaatcatataagtacttgttgaatctggttggtgaaatacatctgttgatacaacgaaattagataaatataatgcaatccaattcagcattatactggttataacttcatgtattccgaatttcgccttaagaattccgacaataccaccaaacactgctccagcagctacaccagctaaaattactaaaggaatttgtaatactgctggcaaatttaatttgattccaactatagttgatgcaattgtacctactatatattgaccttctgctccaatattaaataaacctgttttgaaagcaaatgcaacacttaaaccagttaaaataataggcgtagccttaataattgtattagatatatatttaggttttgaaaaaattccattaaaaagtgcgctaaaagcatctattgagttatatcctgcaataccaagaactattgcagaaactacaaaaccaaaaaatattgcaatgaatgttgaagtaactggttttttaagaatctttgccactgttttcatttcttttacctcctgccattaataaacctattgtattttcatcaacttctccctgcttaaatgtatctacaatagtccctgcataaattacagctatagtatcagaaacattcataacttcatcaagttcaaatgaaactaataaaaccgctttgcctttatctctttcccttattaatgttttatgaacatattcaattgctcctacatcaagtccacgagttggctgtacagcaattaataaatctggatcattagccacttcccttgcaattataactttttgctgatttcctcctgataaacctctaacaggaattaattcacaattatcaggtcttatatcatattgttttatcatatctttagtatgagatataatttcgtctttatttaggaaaccattcttgcaatatggttcgcttttatatttttctatgactacattatcagcaacactgaaatctaatacaagtcctcgcttttgtctatcttcatgtattgttgatactttattcttaataacattttctgttgtagtattttgtatctctactccatttattttaatggtaccgctttcacattttgttaggcatgtaattgcttcaattaattccttttgtccattgccatcaattccagcaataccaacaatttcacctttatgtactttaagtgataagtttttaactgcatctaattttctttcatcttttacagttaaattatctatttcaaagacaacttcatctggttttgcaggctctttatcaacaactaacttaactgcatgacctaccatcattgtggcaagctcagatcctgttatctctttaacattaacagtatctatatatttccctctacgtattattgtacagacatcagaagattcctttatttcttttaatttatgtgtaattataattattgtttttccatctgctacaagattattcataatctttattaaatcctgaatttcctgaggagtaagtactgctgtcggttcatctaatattaataaatcagctccacgatataatgcttttaatatttcaatacgctgttgcatacctactgaaatatcttcaatttttgcatctggatctacttctaatccatactttttaacaatgtttaatatttccgcgcgggcttttttcatgtccaatatgccaaatttacttgtaatctcactacctaatactatattttgtgttactgtaaaattttcaactaacataaaatgttggtgaaccattcctattccattttcaatggctatattagggtttttaatatttatcttttcaccattaagatatatttctcctcggtcagcttgatataatccgtaaagtatattcatcagtgtactcttacctgctccattttctcctaatagtgcatgaattgtacctcttttaatatcgatattgatatcatctaaggcacagaatgaaccaaacatttttgtaattccacgcatttgcactgcatattgtttgctaatttccataccaagtcctcccttaattaataatatgctttgctaacagtgaatcactagctagcaaagccatccctatttcatatttgccatatatatatattacaattcattttctacattttatctttaagccattgaacgcaacttactataacctaaaatgtaaatttatcctcgctacacatatacattatttaattattcttatttaccaaaactattaaatgtttcttcattataaggtggaactatttcaccgttcttaattttgtcttgaactgccatagctgccttataaacttctggatccatgttcttattttctgttggaattcctacagcattttcttttaatccataagtataagttttaccgccaattttatttccactcatagcttctttcgaaagattttcaactgcaacatttgcaagttttaatgctgatgttaacacgttgtcaggagctaaatatgcttggtcacggtcaacacctattgcaaatttatttgcttccttagctgcttcaattacacctacacctactccacctgctgcatggaatacgatatcgcatccagaagagaacatcttatttgcaattgctttaccctttgatgcatcagagaaactttcagcatattgaacatctacagtaatatccttacctaattcttttgctgcatattgtacacctgcttgatatccaaattggaattgatctataatcccactttttatacctccaacaaatccaactttacctgtttttgttgttttagctgctatatatccaactataaatgaaggttcttgtgctttaaacataactcctgtaacattagctggagttttatcttcaccagttgttggatctacatatgagttatcaactatggcatagttaacatctggatttgattttgccgctttagctattgcatctgccattgcaaaaccaataccccaaactaatttattgccgctatctacaactttatctagattagtagcataatcagattcttgcttagattctaagtaactaacttttgcacccttattgtttttttcgaagttttgtaggccttcccatgaagattgattaaacgattggtcatttaccccacctgtatcagttaccatagcaacttgatattcttttgcattgctgcttcctttgtcagctgtaccagtaccgcttccacttgatccacatccagcaaataacgttactgttattgctgaaactgctaataatgataataatctctttttcattaaccttcctcctaaaatataagaattaatatttaaactcatggataatatccacgatttaaatttaataaaacaattattataaatattcttctaatttaattatatttataatatgttgactttaatattacgaatatgtattcaacttgtgcctatgtatatatgttgtaattcacaatgcacaattcgcaattaccactaaaattcttgcaatatttttagaattatgatgaagaactatttttgcagcgtatatatacatttatatctttttttctgaacctttaattacaatttgtggtgcaataatcattcttcttacactatcatcctcattgctgctaataatatcaaacagcatatccatggaggatctccctaactcaattggacaatcttccatatatgtaatatttaatcctaccatatctaaaaagtcaattttatcaaatcccactatagccaagtccttaggaatgtccttattctcttcttttagagcctttataactcccatcgtcatcatgttactgcagacaactagtgctgtaggacggtctttttctttaagcaattttttagttaattcatatgccttatctaatttaaaatctccatataaaacatatttattgcaaaaatcaatatcattttcttttaatgcttttttatagccctctaatctatccattactggttctgaactcaataaccctgtcattattccaatcttagtatgaccttctttaattagcaggtttgttgcctcaaatccaccttttatattatctacaaaaactccatttaactttgtaaatttaacatcagccgaaaccaatattataggaatatttaaagtatttattgttttaatataattctcattgaacttctcttcaccaaatcccggtgtcattatgattcctttaattctttgctctttaagcaatttaagagcacgcacttccttctctaaataattatctgtattaaacaaaattatattcagattatttctttctgctctctcacttactccttttataatttctccaaaatatgcattagttatatctggaacgataactcctatagtattagtctcgcatttcgacaaacttcttgcaattgcactcggcgtataattcatttcttttattgcgactaatattctttgcctagtctcttcttttacataacctgaatcattaagaactcttgaaactgttgccgaggatactttagcccttttcgcaatatcatttatagtaactgacataacaccccacctcgtcaaatttttttcataattcatccaaatttattacaccattaaaactaaatcgtgaaatactattattataacctagattaatttataacttgaattcttaatttctaaggctttaagccaagttatttttaagtcgaactatttatggtatcgcttccacacttataataatatattaggaatatgatgtcaatattcatagttttattgatttcactataatatttatcaatactacatgccattaatctgcagtttaagccattctatgtctatactagtataaattatgatatgtatatttacaaactttttttattaatataattttatttcactcttctctagtatatattaaaggagtgatctaaagtatttttatacttaaaccactcctttctattatttctctctcaatttatccagaaatctctttgttcttttcaatgcttccataatatcttccattgatgacgcataacaaactcttataaatccttctccacaatcaccaaaagcatttcccggaataactaatactttttcatttataagcagttgttcacagaattcatccgatgttatacctgtagatttaatactaggaaataaataaaatgctccaagaggctcaaaacactctagtcccatcttcctaaatccatccaatagaactcttcttcttctattatattccttacacatttcttctacacttctatcaccactttttaaagcttcaatcgctgcatactgagcagttgttggtgaacacataagagcatattgatgaattttcttcatcgcttctattagaatcggatgtccacagatatacccaagtctccaccctgtcatagcatatgatttagaaaatccatttataaccaaagtcttatctctcatttctggaaaagatgctattgaaacatgtttatctccatagcagagttctgagtatatttcatctgaaattgcaataatatttttatctttaagaacttctactattcctgctagttcatctctagtcattattgcacctgttggattattaggaaacggtattataactacctttgtcttaggtgtaattgctttctctaaatcctcaggagtaagtttaaattcgtcttctgctttaaggttcaaaaccttagctgttgctccagtaaatgcagtacaccccttatatgcaacaaaacttggttctggaactataacctcatctccaggcccaactaatgccctcagtgctatatcaattccttcacttccgccaacagtaactattatttcatcttctggattatagttaagattaaatcttctatgaagatactttgatatttcactacgaagctcaataaatcctgcatttgaagaataatgagtatgtccttgctctaaagaataaattccagcttctcttacattccatggagttacaaaatctggttctcctacacctagagaaataacatcatccatttcatttattatatcgaaatattttcttattcctgatggaggcatattttttacgttgtctaaaatcatatcttctaatatcatataaatattgcctccctatcttctactttcttttctttgaatatctttccatgatctttatatttctttaatacaaaatgagtacctgtacttaaaacatattcttgcactgctagtttttctgatacaaaaagtgcaacttccttcatagtctttccttcaacaataaccgttaaatcaaaacctccagacattaagtagcatgctttaacttctgaaaatttatatattctttctgcaactttatcaaatccaacgcctctttgaggtgttatcttaacttctattaacgctgttactgtttcactacctgtattttcccaatttataagcgttgtataacctgctataatgcttttttcctcatagtctcttattgcttctctaacctcttcaacagttttacctgtcataactgctatttgttcatcactgtatctactatttttttctaatatctcaagtatttcctccatagaaataacccccttgttttaatataattaaataaaaaaattcctccatcccacacaagggacgaaagaactacttcgcggtaccaccctaataaacaacttaaaaattgttcactcagctagagcacatattatactccacccctataacgtgaggagcacgttatagcctaattaaaaattcttactttctaaaaatttttatttctcagctataaaattcaaaggctgcttctataaaggatacttaccagatttcaccgacctctagctctcttaaaagtttaccatttatatactcttccttatcactatctttaaaactttatttttaaaatcactatccaatataactataaaattttaaataaaaaagattatatgaaaaatttctatcactttttatttaaatctttctttatattatactagcaaaagtacaaaaaattcaatatattttttatatttttttatttaaatgcagaatattatattgaattaactaaaatcacccctaaaaaatatatttatatcatatggaaataaaaaggagcataagatttaatcactcttatgcttcttactcaatcaatagaaaatttattactttctatcttctattgttttgttgctttctagctctcctgcagtcaggacatcttactggttcattttcaaaacctttttccttataaaattcttgttctcctacagtaaaaacgaactctcttccacaatctttgcatattaatgttttatcttccattctaatgttccattgctcaagttaaaataactttgcaatagttcacctcctctttttgtttcaaaatttctctttaacatttaatattatgtctgacttcttaatttttattcaaaaacatattggtaagtagattatttttaattaatctttaattcaaacttttcattcataaaattaattatgcactctccacccttacttagttttccaaatagaatttcatcaacaagtaatggttttatatttgaagctatgacccttgctatttctcttgcaccaaattcctcagatgtacctattttagcaacgtgattcacacattcttcactaaattgtattttaacatttttagagctcaacttattcttaaagtcatttaattgctttttagcaatattagctgccatagcatcagtcattccattaaatactattattttatccagtctatttctaaattcaggtgtgaagaactttttaacttcttccattatagcttcacctttgacttccctatctccgaaaccgataagttttttacctatatttcttgctccagcattagaagtcattattattattgagtttctaaagtcagctttcctgcctttattatcagtaagtgtagcataatccataacttgaagcagtacactcaaaatatcagggtgagccttttctatttcatccaacaataatacacaatgtggcgtttttcttattgaatcagttaaaagtccgccttcttcataacctacatatcctggaggcgatcctatgagttttgcagccgaatgtttttcagtatattcactcatatcaaatctaatcaaatctattcctagagttttagataagcatctggcaatttctgtttttccaactcctgtaggcccaacaaaaagcatagatgctaccggcttatcttcatcgtttaatccagatctagacatctttatacatcttacaacttcttcaatggctttatcctgtgaaaatatattttcctttagatccttttctaaatgttttaaagaagttatctcgctactttccacagtttgctttggaatgttacaaatttttgatattatttcctcaatagtttttctgtcaactataatctgctcattcatatcttcattatgcatacgaacataagctccagcttcatctataatatctacagctttatctggcagatatctgtcattaatatacttatcgcttagtgttactgcatctccaattgcttcatctgtataacttacattatgatattcttcataattctttttaagtccatctaatatttgtatcgcttcttttatagatggttctttaacatctattctttgaaatcttctacttaatgctttatctttttcaaaaaactttttatattcatcaaaagtagtagctccaataaatctgatttttccttctgtaagataaggttttaacaaattggacgcatctaatgcgccaccatttagcgctccagcacctacaatattatgaatttcatctatatatacaattggcttatcctgtttgctaatcaaatctaaaactctttttattctttcttcaaaatctcctctatacttagttcctgctatcacagatccaatatctaaagaaaacatagaacttccttttaatttttctggcaccttgtcttcacttattaactttgcaagtcctaaagttatagcagtcttaccaactccagactcacctacatgtataggattattttttatccttctacaaagtatttgtatacttctttctaaaatatcttttcgtcctatcaatggatcattttcttcttctctaaccttcttaataaggtctattgtaaacttattaagaaatgcatcttcttttttcttctccactttttctttactttcattctcagtaaattcattttcatcttctttaaaattttcttgcatttcatcatcataagaatttcgagtatcttcatctatgctatggcacaaagaatatagtaaatctcttcttgtaacgccttcttgttctaggtagtatcgtgcataactatcttctagattaaaaattgcagaaagtatatgatctacatcaattgcatcttttccgctatacttaatttgttcattcgccgtcaaaataactctttgaaactctatgctctcttgtggttctccttgaccaattttatttatatatgttttcacgtaagttgccaaattatatcttaaattttctaaacttccaccacattctttaatagcatactctacatttttatcaaaagttgcagcatatagtaaatgctctggtgtaatatattcgctgcttttctcttttgcttcttggtacgctttaagcaatatcaaattaacttcatttgtaattttcatattttacgcctcctctacagtaagcttaaacggaaagcctttttccttagccattgacattgcagttgaaaccttcgtaactgcgatatcataactatatattcctgctactcccttacccctttcatgcacatctaacattatcttctcagcatctattaactttttattaaatacaactattagtatattaataacaaattccattgttgtataatcatcattatacataacaactttataatttttaggctttttcacatcaactttattctttggtttggttacaatatttgtttccatatataattgtctatccctccccgcatattatcatcatatatattattctaaatagatatattttaacacaatatttaagcttataccaataggattatagtaaattatagattcatcatttatattaatttatatctaaaatctgaattttgttattctttactccgattatactttttttatttacaatatagtctcttactattgctataacatcttttgatattatttctcctggacaaaccaaaggtatccctggaggatatggtattattgattctttagctactaaaccttcacacttttctatttcacaccaccggctttttaatttaaaggtttcataaggttcaaattttttaacaggtatatttctaaaatattttatctctatttctctagacatatttctcatatctaaattcaaaatagtttcgtatataattttaaaatcttcttctgtattaaatggcgataggattaaaacaactcctcttgaaaaactcatctcagcctgtatcttattatctcttagataatctagaaatttatgtccatcataccctttaggaagaataactatatatctactaggatcaattttgtatccttctattctatcattatgcttatctaagtcactttcacttaatatataaactttccctaactcattaatttttttcttccacttctcagcttcacttattaatgtttcataatcatcttttccgtatgtatctaaataatgccttgcatagtctaaagatgccattataagataagatggagaagttgtagtaaatgactttatgtaaaaatctatcatgcaatcatcttcatttactaagagatatgctccttgagttagggccggtaaagttttatgcgcacttaaaaccacataatctcctaaactcgcaagagactttggcaatcttttatttattccaaaatgagctccatgagcacagtcgattataacttttaatcctatttccttcaaattacatataatctcttctatatcatatgtaattccaaaataatttggatatgttattataattccctttggttttgagctattctctaacgctttatatatattctctttattaggtggtaaaaatagtcctaattcatcatcaataataggttctatatatttaacttttaactttctcataatcaatccattataaattgacttatggcagtttctttcaactaaaacttcatcaccctcatcaaatgctgaaaacatagctgctaagtttcctgatgagcttccatttactaaaaaataggcttttttagccttataagttttagctaatagctcttgggcttcctttattatcccttctggataatgtaaattatctaatgggtcgacctctgttatatctaaaaatcccattctattagcaaacttcagcccaatttcatctctagcaaatccaatcccccccttgtttcctggcatagaaagaagtaggtttccttcatcattgtatttaagtaattcttctaataatggtaaattcaaaaataccgctccaatctaatttcaaatataattaaccatggataaaagcttcatatcagtaatgaaacgatatgaagcttaaaacatgctttctatttcataaatgaaatactctatattgcacttgtgttttttcctaatcttttgaaaaatacttaattgttcttaaaagattctagttaatacttcatgccttttttataggtgtagatcttcaataaattctaatacattttcttccttagttgcccatgatgtcactaatctaattgcagtataattagaatcaattattctttcaatattaaaagaatatttctcacttagcttttcaattaaattattaggtaatatagggaactgttgatttgtaaaagattcagttaaaaacttatatccttcatctactattgcagcttttaacataagtgccattttatttgcatgttttgcaagttcaaaatataaatcatctttgaataattcttcaaattgaattccaagcaaccttccttttgctaataatccacctttttgcttaataaaatatctaaaatcttcttttaattcatcattacatattacaagagcttctccaaaaagtgctccatttttagttcctccaatgtaaaatgcatcaactaattttgctatatcagctaaagtcaaatcactttcttccgctacaagtgcagatccaagtctagcaccatccaaatacaatagcagtttattcctcttacagcaatcatgtaaatcaatcaactctgctttagtatatagagttccaagttctgtagaatttgatatatatactaatttaggttgaaccatatgctcatcactatgcgaatcaacaacattttgaactaaatttggagtaagttttccatcgttagttctcattgtaattactttatgaccagttgcttcaattgctccagtttcatgacaatttatatgacttgtatctgctcctattgctgcctgatgaggtcttaaaaaagctgatatagctgtaagattaacctgtgtgccaccaactagtaagtgtatatctacatcttccctatcaattttcttcttcagcagattaactgatctttctgtgtactgatcagtaccataaccatcggtttgttcaagatttgtttcaactaatgcatttaatattcttgagtgtgcgccttcactataatcatttttaaaactgtacataattctgcctccttttatgctctctcaattatctgtgttgtaaaattcttcaatactttcttacctacttgaaaaatcatttcttttgttagtagctccatttctttaatctcattaatataaattttataatctccaaacatgcaatcatatgtcgccagctctttggccagtattatactctgctcttctctaaataatctttttaatttaaagctcttaattaaacgttctatctgatcattatcaagtttcttttctaatgaatctaactttgctatacatccttctattaaagatatggctttatttacattttcttctgatgtgctaaatgttattttatatagttttatataattctcatttgaaattttagtaagcacatcatatactaagccattttgagttcttaaaacatcatagagaattgaattaaccccatctccaaaatattgattaaaaattctaagcgccttaatttctttttcactcaaatcatcaattggaaatatcatttcaactttacatgctcttattccatctcttacattgttataagttcccttttgaggattttcatattctattaaatttttattatcagttttactaatctcttcttgaataacactatttttcttccactcagaaaaataattgcatataacttccttaactatatcaaactttactgatgaaattataacaatcgaagtatttcccggaaaataatatttatcataaaattctttaatattatctaaagttatattctcaagatcatcaaatgttcctattataggatactttattcttctattattgaagcagttaaaaaataaattatcctcgcaatactgatctacatcctcatcccattcttttaattcttcttttatgacatccatttcttctttgaatccattttctccaaattccgggttaattattatatcacttaaaatttccacacctttttgtaaatcttctccgagcagagttccataatagattacatatggatagtttgtcatagcattattaaatccaaaaatactgcttagctcttcatttatttctctctcagttctattttttgttcctttataaaccatatgctcagttgcatgagctactccaaacttttcgttctcagctccagctcctgcatttaaagaaatacaaattgatgatagttctgaatctgtatgtttataaattaatctcaaatcattttccaaaatgtattcttccaagtatctattctccttacattcttatacattgcaatagtagatttacattgaaatttttattgattcgagtgttcagttatatcccaaatattaaaaattacttgcaatatatattatatttaattccaagatgtgcatttaaaatgttattatatcaattttattatataaaaagagaccccctcttgcgaagtgctggataaaaaaatcatctatggaaattactaagtgaacgctatttcatctatacttattttaattaatttaagaaacaagtacagattgttaaagcttttattagtatgtcccaaataagattctctcagtagcaaaggcaatggagttccccttctttttagtatgttattataaaaaagttaattttcttcagcttttagcgcaattgcacattcaattctcttcttttgcatcttgcatccaatttcataaggaatgttcatgtccccattaaaattaaaattgttagcttggcatccaccactacagtagaatttcgcccagcattccctacatttaggcttgttatatatatgtgctttcttaaatttttgagctaattccccattataagtatcttcgtgtatacttcctaacttaaactcttcttttccaacaaattgatgacatggatacacttctccttgaggagttatagctacatattcaaatcctgcaccgcatccagaaattctcttgtaaacacatggtccaccttgaaggtctatattaaaatgatagaatttaaattcatcatttccttctcgttttcttcttgccatttcttcatatagcttgtcatagttttcaaagattgtatctatatcttcttctcttaatgaaagtggatgtccattttctaaaacaactggttctatagataactctctaaacccttcattaaccattgccattacatcttcataaaaatctgtattttctcttgtgaaagttcctcttacataataagtttttcctttagttcttctcttaatcatttccttgatatttggaactatatcatcaaaagaaccgcttttatctggcttaattctaacattatcattaacttcttttctgccatctaacgaaagaattatatttcccatttctttatccatataatccatcatatctggagttaatagagtagcattagtggtcattgtaaatcttactctctttccccatttttcttcgttatccctagcatacttaattatttcttttattgtgtccataattaaagttggctctccaccaaataaatctatctctatattttttcttggtccacttctcttaatcacataatcaattgctttttttgctgtgtctgcactcatgactccaccatgtccatgatattcaccctcgtcagcaaaacaatacttacatctaaggttacatccatgaattacattcaaacaaatcgcctttatgtaatctctatcatccatagagctatgagctatttcttcatattgatcttctgaatataaaatcccttcttcagctaactcttgaatttcatcataagcctctgaaatctcttcttcatcatattttcctttaagttcctgtaatatttctttcttatttcttaattggctatcatctaatatatcataaactagttcatctacaacatgaacagctcctgtattcacatctaaaacaaaataattttcgccttgtttaaatttatgtattaaagacaattctttttcctcctaaacatataaagtaagcagtaactatatagttactgcttgaagattattagttttcacattctaagtttgcaactgtgcaagatgtcttacaagctgattgacatgaatttgcacattctttgcatcctggcttacataaactatttttaatgtttgttttgtttatagtttttatatgtttcattacaaaatcctccattttaaatatatccttagctattatatcataatatactaaagtataaaagatttgctggccctctttttatttatatttctgtttatatgaaattataaatataaaaactatttttcaagaattcttaatcataaaattatttaaatattttaattatgaacttttcatccttctttctaattacatcatagaatttttatataaattattgtatcttcaagctatcttcaaaatattattttcttgtcctatatatattaataaactcactaattaatatctttgcaacagtattatcaataataatttgaaattgttcccttgtctccacaactccacgtacactttctatctttttcaaaattccaacatccacttttttagtgtccttcaatctcaatcttaatctagtcatacaattttctacaaacaaaatattttcttctgatccaaccaaatcaaaaagctcccttgctatcttaccaaaatctgtgttcatctctcttttcccccatccttcaattaatactctataataaaaatagccaacacattaataaattaaatatttaaacttgctggcttttacatctctattcagttttaaagcagcattaatctctcattagaaaattatacctacatgcaaatagtttgtgtattatactaaagtataattttgatttaatttgtagcattttatattatccctttttcttttaattgattaattgctatcgttttatttcttacatttaacttgcaatagacggatgcaatatgtttttttacagtgactaaagcaatatttagtttatctgaaatctccgcttgcttatatccatgatgtactaatttcattatctcaatttcccttggagtcaactctattttttctaaattacaatatctttttatatatatctgattatattctttgcactttgggattaaacattttacatacgcactttcgtttctaatagattcgagtaatggtaatatgtgtggggctaattcaacaaaacacattacaatgtggtctttttctgctagttcaatagcttttaacagtgacttttttgcaatttcacttccatacagcttgtactttgcaattgaatcaaatatgtacgcgtatattattccaaatatactttttttgcctgtataaacttccagcataatttccacctgaatttctaactctatgtaactctccttaagtatcatcgctaaagctgtgataacatgattcattcctataacaggcataatgtcttttgattcattgttttctatatttataatccacttatttaaattttctaaattaccagtgattccatcaatatatcctatagctatctgtgatccgttaagaaagattggaatattaagattttcatactctttaatcagattatagaaattatttttaatctcatttttataatctttattaacacaaatccttgttaagagaaataatgagcaaattattatgcttgtctgttttttggttttagccttatgaaatgccttataagcaaataattctccattttcagagtcacctgtttcataaaaatattcggccatcataaggtaatttgcacctgttgctccaccatttgatatatgaataaaataatttattccttgttgaaaaaattccactaactctttcaaattacctgttttcctatgaaataaatataaaaaatgaggtgatccaaaagttgctggcattttattgtttgctattcttgataatcctccattaaaaagctcataagcttttttatggcactctatcattctcctaacattataaaatactaatatgctttctaaaaatgcgatttcacctaatatctgatttttatctttaagatttttatcttcttcatatacagctttagcctcatataataacttggcgcctgctattggatttccataaagaatataaaaaaataagtaagttagataagctatgggtctttttatcttctcactgataataagctcattaaacactggttttataattcctttatataaattggtaagatctattgtataatttctctctattaaatctaatatacgcgcgtaattttttgctttatagtagtattccattgcatatatatcattaaaatttttagcataccaatcaccacagatactatttattctttttaaatctacattggataatgctaattcttcttctaatgcatttttaagaattgaatgtagtctatatattttttcctttttgtcatatcttataaagcaattattagaacatactcttctaattatctccttagatctttcatcttctgtaatatacacagcttgctcaatcgtaaaattctcaaccaatgagagttttaataaaatctgcttggtaacttcatcaaatttatcatatacagctactttaattaactctgttgcttttggtatattatcaaatgtattttgactgtaatattgaattaatgcaagatacatagctgaagtccatccaccagtatattcgtatagttcttttttttctgcttccgtcaatataattccattaatcttaaagaactctatcgtttcgtcaaaggtaaacgcaatatcctcctgacgcattatcatacatttttgctttatttcaaattcaacatactcatttgccggcttttttctacttattataactatgtgcaaattacttatatcttccaatattatagcttttattaaatgattaatataaactattttttcaccatcccaatcatcaataattattatggtttcttgccttatctcatttctaatcatatctactatcttataaacatctttattattattaggaaccccgtaggcatataacctttcacctaatttgaaattgatacttttaatcaaatcacaaaattttttccatatccacatatcatcaatctcatcatttgttatatcaagccaaattgtttgtactcgtttattcttctctataaaatttctaactgcaatggattttccgtaacccatagatgctgatataaaatatacaggtactcgaaaaacttctagcaatagcttattaatacgctttctatatagcaatttaggtctaaaaatttcatttttcatatataaataccccttcatttaagcaaatgtatgtgaaaactacattagaatattttatcatacttaaaattccatttcaaatttagcctttattgttaaaattatactaaagacccaaataagaatctgcttcgtaaactgtgcatttctaatgctttttaaagttataagtagatttaactttattataatttcccaacgaaaaataaagttccaagtacttaaacttggaactttattaacgatatattaaagagcaactactttatttaaaagcatattatttctctttataaattcatccatttcagctgcatctaattccttatttgcaattttagctaaatctaaaatatgctcacagataaatttaacatcttcctttttgctttcattcttagaaacttctagaagcttcttaattattgcactcttattgtttataactagagttttttcttcatcaaacatacctgggaagctcattcctgattttgcatacatcttactcatttgagccattcttcttgactcttctgaaactaaaataagtgctggagtttcttcattcttcaatccttcaatagacaaattcttaattttgtctcctagtgcagtcttaaatagatcctctatttccttatttaaagcttttatagtctcatcattttcatcttctttacttcctaatgtatctgaaatatcagaatcaattctattgaatttaattcctgattcatgcatttccaagaacgaaataaagtggtcatctagtgaacaatctaatataacagcatctaaatcattctctttaaacatctttatatattgagattgttgtttttcatcattagcataaaatactttgttttcatgcttttctttattggcttcaagataatcctttaatgttacgaattcaccctttaaattcttaaagattattatttcctttatcttatcatagaattttggatctcttaagcagccgtatttaataaatatttgtatatctggccagaatttattaaattcttctctgctatttttaaacaagtcaactaatttatctgctacctttttaactatatgattagatatttttgaaacttccttatcattttgaaggaaacttcttgatacatttaaaggtagatctggacaatcaatagtaccttttaaaagtaataagaattcaggtattacttctttaatattatccgcaacaaagacttggttattatataacttaacttgaccttctgttgcttcaaattcatgagttaatttagggaaatataatattccttttaaattaaatggataatctacatttaaatgaatccagaacaatggttcattgaaatccataaatacttttctatagaaatccttatattcctcgtcagtacaatccttaggtgctttaacccataatggatttgtatcgttcaatgggtttggtgcttctggttcaactaactcttgatattcagttccatcttctttcttctttgtttcatatttaggttcttcttttggcttattttcatcttctaaatatatttctgtaggtaagaaagaacagtatttcttgattatttctcttaccttatattcttccaaaaattctgagctttcatcatctatatatagagttactgttgtaccccttgttgttctctcgctagaagatccaatttcatattctgttccacctgtacattcccacttaacggcttcagcgccttctctaaatgatagtgtatctatttctaccttagtagataccatgaaagttgaataaaatccaagcccaaagtgaccaattatatccttaccttcatccattttatctttatatttttccataaaatctgtcgcgccagaaaaagcaacttgatttatatatttcttaacctcttcctctgtcataccaataccattgtctatgaatttaagagtcttcttttccttatttattgatacaacaactttgtattgctcgtctccgtttactgttgcctctcctagagaaactaatctttgaaatttactaattgcatcgcatgcattacttataacttctctgatgaatatatccttatcagagtatagccattttttaataataggaaatatgttttctgtgtcaattgatatgttaccattttcttttatcatgatattacctcctgttattttttctagaaaatattttaatgcaaagaatatttattgtcaaattcttcttgtaactttattttaaacttatgcattaatttaataaagaaagaatatatgttgtaaaatttatttctcacataatagcttcaaactatcattttgatatagtacaacatatattctaaattatatattaagattaaaatctgattatatcttaaattttaatacaatttcattgagtttttgagatagttctgcttgactttgcgaagatttggcaatatcactaatagctaatgttatttcactaatactatttagtacttcttcagaacctgcacctgactcttctgctgtcgcagatacagtttgcatagcttggtttatttgttctataacttcatttatctgattagatgaagttgcaaattcttctgtcatttcattaacaaattcagcatctttttcatattgaataccagtattcataagtaactcatagcttggttttacattttgagctatatagttaagtatatcttctccactttgagataaattttcgaatgcagcttgaacctgtaaaaccatcccctgtatacttgaaactgcctctgatgattgttctgcaagctttcttacttcatctgcaaccacagcaaacccttttccattctcaccagctcttgctgcttcaattgctgcattaagtgcaagtaaattagtttgtgatgctatatcacctatagcattggccatcaattttacctcatttactactttaccatcttcgatggcctttataatatttgctctcttttcctcataaataatgtttccttgttttatattttctgaagcctttttctttatttcaagagagcgattctttatttcccctactgaaacagccgcatcgtttgctctattagcgagttcatttgttgtcgctccaatttcttctgctgatgcacttacttcttcagttatagcgcttagatcttgggctcccttagatatttgttcaattgattcatttatgtcattcatcttagaagaaacctcatgtgttgtagctgatagttcctgccccgatgaacttatatcattggatccatctattattacccctattaaccttcttatgttttcattagctttatttaaggctcttgccatactgccaatctcatccttagagcttatctctattttctgagttaaatcaccttcttctaaatgctgtgcatataataatactttttttaaattatttgatatgattgtagcaattatagctcctaatagaactgcagtaataaaacctaaaataattgttgctaccagtatataaaaagatttattattcacattattattggaagaacttttatctgatgctttttgttcagtaattttaactaatttgtcaatattattagttaacttctctcttatgattgcactttctttgctaaaactcatagcttcgtcgtactttccctcacttgctagacttattattttatcagatgaatttctataatctgttaaatcactttttatttcttcatatatcttattttcatcttgattcatgtctgattgttcatatattttaaggatttcattattttcatttctataaccatctatattacttattgtttggctaacttcactagaatctttactgtttagtaaattcaaaatttctaatctagaatgtagtgtattcgagttaaaatcttgtaaattttttagcactcggaaatccttttcatataacgcattagaattagaatttattttacttacactaagtattcctgtaactccaactacggcgataaatatagatattataaagaaactgatctgtaatttatattttattttcaaattattaaaccatctcatactattctccccctttgttgatatttgtaatcaactaataattcttattaaaatattaacataatttatccatttttgcacttattttttgtatttttcactaaattccaaaaaattattttatataatattattttttattaaaacaattacaaaaaacactattgacattgacgctacgtaaaggtgtaaattaatcttgtaaggaggcaatcacatggaatatacagtgcaaaaactaagtaaactggctggtatcagcacaagaacacttagatactacgatgagataggaattcttaagccggcaagaatcaattcatctggatatcggatttatagcaaaaaagagatagataggttacagcaaatattattttacaaggaattaggagtagaccttgaaagtataaaaaatatgttgttatcaccagatttcaataatatcaatgcactcaaagagcatcgcgaaaagcttcttgcaaaacgcaaacaattagatatattaatagctaatgttaataaaacactagcttcatcagaagggagaattataatgagcgataaagaaaaatttgaaggctttaaacaaaagatgatagatgaaaatgaaaagaaatatggtaatgaaatacgttctaaatatggtaatgatactgtaaataaatcaaacaaaaaatttcaaagtatgagtaaagaacaatatgaagaattcgaaaagttaggtattaaacttatggacatactcaaggacgcttttaaaactaacgatccttcaagcgaacttgcacaaaaagctgctgatttacaccgccaatggttaacttattcttggaatgattactcaaaggaagcccatgcaggtcttgcccaaatgtatgttgatgatgaacgatttactgcctattatgataaggaccaacctggtctggccgcttttttaagagatgctatttttatatacactggaataaaaaaataattttataaatttaaatatatcagtgacaatattattaaaaatcaatggctgttgattttatcgacagccattgattaactattccatatattgcactttaatcattgttatcttaattatttaaaataatgagtttattgcgctcaatttacatgtactctcataaattataattcgttatttgttcaatactttttcaataaataaatttactaattcgggatcaaattgaattcccgaatttctttttaattcctctatagcaaattcttctgataatgcttttctataaggacgctcactagtcatagcatcatatgcatccactatagatataattctagattcaaaaggtatatctatatccttaatgccttttggatatccttctccattccacatttcatgatgagaaagtacatactttgcaatttctgacatttcatttactgtacttaatatcctataccctatttctggatgacgtttgatttcattatactcatcctctgtaagtctccctggcttattaagaatattttcctctattgctattttgcctatatcatgtagcaatccagcattttttaattcttggattttccttttaggcagaccaatattctttcccataagttcacacagctcagcaactctcacagaatgttgttcttcccttttattcttctcattaagagtatttattattgtatcaatagtttttcctctcatatttgaactttcaaaaagctttctcttatacatataatcctctgcttttatgaatatttcttgaatcatttcatcttcataacatttagtttcataaccgaatgaaatagatatatccaaaccttgtattttttcttttttagccagattattaatattttcaacgatcttctctgcctcataagtatctgttttgggtaataaaataacaaactcatctccaccaagtctaataacaacatcctgagatctacatccgttttttattatctgtgccgattttttaatcaattcatcccctacaacatgtccaaacgaatcattaatcaactttaacccattcacatccccaagaacaatagttagaggataattctctttaacgtctaaactttttagctcctcctcataatatcttctattatataaccctgttaattggtcattatagcataaatattctaatctctcttctagttcttttttaacagtcatatctcttaatgcagctaaaacacgatcttctccacacttaaccatcctaatttcacaatagctacctaatagtttatactcaaaagtatgtaacttacctgtttctagaactaatttcaaattcttataagctaattcagcaatctctttcggcatcacttctgatattgccttaccaataaactcttctttaggtaacatcaatatattttcatccttagcttcagtatctataaaaacaccattagagtcaaaagtaaataaaatatctggtatagctttaataatcgctctacttttctcttcaatttcctttatctgtatctcgtcttttcgtatctgctcatactgaattttcaattcatcctcataatcactcaattgtttaacatatatccccagatctttataactatttctaagttgttgctctgtattacatattttttttagaaacttatttatcaatacataaagaatacttgtagtaaccattataaacagaacacctttatatatgctaatttttaacgcactatcttgtacatttgtaattaaatcaataatagcatccgatacaaaaatccatatcaatcctattactgcatatattaagcatattttaatattttcatacttaaaggaatatttattcttcgataaacgcgataaccccttctctttaattaacataagcattctcctattttcattattattcttccattataccttaaatatattaaatataaccataatgtttttgttttttatacataattagctataatttttttaattgtattcttttattgcttataatatgcagttttcaattaagttctatattacatctttaatcaagtgctttgattactagatttttaaatgtagagttattattggaatatataatttctaacacgaataacagttcaatttgcataacatacataaattagaccgttttattctttataatgaaaaacataaaatgaataaattaatcaaaatgtgctagtatcataattcataatcaaatttcttttataatttctgatacccatctgcataaatcaaccgaaacctttttagctgtttcaacaactctatcatgagaatgttttactttctgtattcctgtagccatgttagtaatacatgctattccaagcacatccatacctaaataattcgccactatagtctccggtacagttgacatacctaccgcatcagctccatgcctaccgatcattactatttctgctgctgtttcataataaggccccataaatcctgcataaacaccttctgcatattttatttccaacttatctccaacttcttttgctttttctataagctctaacttgtatggctccgacatatctggaaatcttggcccaagtctatcatcatttattccaatcaaaggattatctccaaataagtttataaaatcattaatgagcattagagttcctggctcaaagcttttatttatcccaccacaagcattggtcactataattttctcaatccccaatttcttcattacatatattggatatgtaacttctttcattgtataaccttcataataatgaaatctaccttgcattagcagaacttctatatcatttattttaccaaatacaagcttaccttcatggcccttaactgttgatatagggaaattaggaatatctttatacgatatactttctacatctctaacctcattaactaaatcacctaggcctgatcctaatattatcgcaattttaggtgctctgtttatcttacttctaatatacttggttgattcaattattttattatacattctatttcctcctaacgcttaaattaaacaagtttttatataataatactttatagcatttcatcaattagttccataagatgcctatttataaactaaaatttatctcttccttaatattttctttattaatattaaatttcccaactctgtcaggaatacagctaagtatatcatctagattatttattcttcttatttgcattatagtagttttaccatctctaattattaaaattgcgtctaaagatacacttacaccgatacattcgccaatgtctacttctttcattcctttagaatcatcacatttttctccgcctattccgaaaccaaccataactcttataacaggcataagaatcacttcttctaaaataataggttctcctataactatttccgtcataaaatgttttcctgatttaataaataaggtatctatatcttcattttttgctccattatccatattgttccctcccaaatttaatataaccttattagcacttaatacactatttcaaatactggtataaaactatatgtgttgcaattcacaattacggctaaaattcttgcaatattttcagcgttatgatgaagaactatttttgcaatgtatattagcatctgaatatttaacaccattatcttagtgacaagcattctatacttaaacaaatatattagtaattatttcccaataacctgaaatttaaatcttatctctgattaataatttttaaaataccattatttttagcttccgtgccacttacattctttataaaattttgattcacgaagaataaaaaaatatgacttagaagatatatttttctctaaatatcctctaaatcatattttattcttatattctaaaagctttttaatcattaaacctaatttattatttgcagcaaaattaatattatctaatcataaataattatacttaatgtagactcttattttttaaataatcagtaaaacattttactatttggggatcaaattgggttcccgagcatctttttaactcctttatagcatcttctttacatatagcctttttatacactctatcattagtcataacatcataagaatcagccacattaattattctcgccattaaaggaatttcttctccagccaagcctaaaggatatccatttccatcccatttctcatgatgtgttagtacacatttagcaacatttccaagttcactagacgcatttataattctgtatcctttttctgtatgtgtcttcattatttcaaactcttctttggtcaacttccctggctttaataatatatcttcattaacacctattttccctatatcatgtaaacttgcaactaatgccaactcgtccaactctgaaatttttaacctcaatttttttcctatttctaaagcatattttgttactctttcagtatgttcattggtttccatatttttctcttctaggctttttttcagtgaatccataattgaacttctaatacttttcttttctagcaatttttgccgatatactttttcttctaccttgtttatgcaatcgtatatatcttcctgtaatgaatattttattccctcacctaatgcaatgcttagctgcataaatttataatctgcctgctcgcattcttttgtaatttttctaataactttttcgcattttaactcattacaattaggtattagaattatgaattcatctcctccccacctaaatacatgcccattaggatgacatatatctttaagaattccagctatacttctgagtaaattatctccttctaaatgtcctaaagtatcatttactattttaagcccgtttacatctcccattattattcccaatggtaaatattgctcatggtttaattctttaatcttttcttcaaaactatatctattatataagcctgtaagaatatctatttcacttaaatatcgtaatctttcttctaagatctttctttccgttatatctctagataaccctaccaatccccatacttgtccatctttatctacaacaggtatttttacattttcttcaattatttctttgccattctcgttttgtatcctatgctcaaaataagtagcctttttcgttaccataattttattatcctgatcaatgaattttttcgcttcattgtagttaccatatatctccaaatcagttttacctattatttcttttacgcctctctttttataaaaatcttcaaacttcttattaaatccaagaaatctgctttccttatctttataaaaaatagattctggcactgcatcaattattgttcttaatatgtttttttgtttttctatttctgcttctcttaattttctatcatttatatcaattataataccagctacggctttaggctctccatcattatctagtatgggaaatatgaaacactcaacacagttgtcatttactataccttctacaacataagtcttctttttccttaggcattcatttatttgctcatcatatatttttgctttttctaaaggaaaagcctctttatttgtcttgcctttaacatcttccagttttatattatacatatcttcataatacttattaaaaaatattattgtcgtatcaattccttcaatccaaaccggccaaggtatattacttaaaaatgatttatatatttcccctaaatacttttcttccatcgcttcggtattccccttttatgttaagtttattataatttgattttactatctcttaacataattgtctaccgaagcaattattttcaaatattaatatcatacttattatttgctagtttcaccaacacatattactgcatttatttctatctatactcatttccaactatgtttttataagctacatatgttgcatacagatatccaccataaacaataagcatcattaatgctgtcattaaaatcggttgtattttattgctggaacctaataccattaagtatttatttactacagtaattccaacatatgaatgaattattgaaagagctagaggtaatataaaaaatacagcaacttgtttaaatatacttctattaatcatgctctttgttgctccaatctttcttaaagatctatatctttctatagaatcattgcattgagataattgttgaagcgcaagtaccgctgcgcttgacaatagaaatacaattcccatatatactgctacaaataatattattgcagataatcctctactatcgtcatatgccatttctcttgtcccaccatagagactaaagtttaaatttttatattcattttcattgaacttaaaattattaaatatagtagttaattcttttttcgcatcttccttattatcacctacaaaatttaaatctagtacctcatcatatttatctattccatttactaaatcatctggtactactaaggtaaacatagtatcacttgaaggtgatgttaataccgctccagtttcaatttttttatcttttattttaaattccttattatctatctgtagtgaattctcatttttaataaagctttctagtaatccttttaagggctcataattagaacacactaatatctcgttatcttttaaatctatactagattcacccttcaattttcttaatttattgtattctgaaattttaatcatatctgtagtatcgaacactttaaaatttaacatttccttttgttcgctagatagtgcatatttatctaatacatctctagaactcatattattcttatattgtctaatcaccacatagtcggcattatcatcaacattataatttagctgatttagtgcatctaaaaccgaaatcctactgctattatttttatcaaatacttgtactgatgcatcaaacggagtttgattttttaatgcgctttctgaagcattttttacacctaatccagttgacaaagttcctatagtaacaaataacattaaacaaattattgtcatagatataaaattagtattaaatttactcgaaatttgttttatactaaaaacatttagaccatttagatataaattcttatttttcctaagtgcagaaaatgcaaccgatgcgattccataaaagaaaaatgctgttccaacaatccctaatgctattgataatttaaatctgctatcatcaaaattcaatcctgctaaattaacaagataataagcataacctaaaataataagcgcagctattaatataaatagagctatatatggatttttaatattgatcttttcattttttctatctgcatgtaacaagtcaattaatttatattttgaaactataatcacattaaatatcataactaataagtacattatcccaaaatataatatagtcttaagtatagcacttattgaaattgaaaaactatatttagtcatttgcaccgcaaaaagcttagctgtgaatatagaaagaacttgtgcaaacaacattccaagtaaaagtcctgctgccaaggatattatgcctatatataaagtctcaaaaagcaatatacgtgacatttttctttttcccattcctaaaatcatatagaccccaaattctttttttcttttactaatcaaaaattttgtggcatatattattaaaccacctaatataacagaaacgccaatagatataaacgaaataagttgcgccatcatcttaacatattccgtttgtccagaattcatatctgccattactgactgagaatcgattgaattaaaactatagaatatgcatactgcaaaagttaaagtcaaaaaataaatagtataatctttaaagctcttttttacgttattaaaagcaattctagaatacatcttttgaatcacctccaagtagtgtaacaatatctattatcttgttaaagaaatcttttcttgaatcctcgcctcttaccaattcattaaatatatttccatcctttatgaataatatcctatgtgcataacttgccgtaaacgcatcatgtgtaaccatcaaaattgttgcttctaattctttatttaaggtttcaatagaatttaaaagtaatttagctgacttagaatccaaagcccctgtaggttcatctgccaaaataagttttggattattaactattgcccttgctgatgctactctctgcttttgacctcctgacatttgataaggatatttatctaatacttcgagtattcctaagtttttagctgaattccttactaattcatcgacttctttacctttctttcctgcaatagtcaatgctaatgcaatattttcatatgctgttaatgtatctagtaaattaaaatcctgaaaaataaatcctaatttatctcttctgaatctttcaagtttcttacttttaagtcttgtaatatcttctccatcaatcataattgatccggtagtcactttatctattgtagatatacaattcaaaagagtagtcttcccactacctgaaggccccattataccaacaaattcacctttttctactctgaaacttatattatcaagtgcctttgtgacattatctttatttccataatatttttctacattttgaatgtttaaaatgttctccataatcttcctcctatttttatagcaacttttataatcgctatttatttcaaatttatttaacctcatgactacattttaaatcttttgatatttttctcatattgaagtatctttcagtcagcttacattttcgtaagatgtaaataacaatttgaaatattaattgaatttaattaaaaactgtaaataatgaatatcatttataaaacatttttatttccaatattaaaaaatagcctaggaaccaatctcctagactttgtgtcttatataatttagaaatacataaaattctgctaagcctatattagactattctggcaatttacctactgaaaaataattatgacattttggaatcattattttctttcatatgtcttacttaaaactcataaatcctccaatagggaatattatgttaactttagttcctttgccagctattgaatctaaagttatcccgagtcctagcttttcacatagttttttacataaatacaatcctattcctgtggactttccatatactcttccattttcccctgtaaaacctttatcaaagactctatttaaatcatttttcgaaatgcctataccattatcttcaatagttaatattatattctctttacccttacttgtataaattctcacttctccatttttatctttactatattttattgaattaataataatctgatttataataaactttacccactttggatccgtaaccactgccccataaatattatcaatacttactgaaatctttttgctaataaaatcacgcctgttgtttctaataacctcctgaattatgttctttatttcaaattctttaacaatataatcattcttaacatctgtacttctcgagtaataaagagcctgatttatatattcttcaattttcttaagctcatcttctaatgatttcttttcattaatattgctgttttctacaattaatcttgcagatgatattggtgtttttacctcatgaacccaggtttctatgtactctctatattctttttgaagatttttatagaagttaacatgttcatgcatatccctattactatcgcttaatacttcataaataacttttccttcataataatttggactttttattacctcaggtaataaatactttttatctaatttgccactaattcctacaatatcgtcatagaatttttttttcgttataaactcaatgattatatagattgatagtggtaaaaaccaaataataaaaactacaaatagtattacaactggtgttttagctatggtcattatagctgcaaataaagagtatattattagattaattattatgtatggcaactttgaaatagaatattcctttatattcatagtaatatataaccaattcctctcttagtttctattccatctctgaatccaatttcttgaagcttttttcttagcctagtaacatttaccgacaaagtattatcgtcaatataaagatccgaattccacaaataatccattagatcttctctgctaactatgcactctttatttttcataaggcaaagtaatatcctaaattcatttttagtaagatcaatcttttcatctccaaatatcacgcttccattagagacatttagctttaaaccattgtgttcaactatctcagaaattgaattattcccaagagttcttcttaatacggcagttatccttgcaagaagtatttgcgtattatatggctttgttataaaatcatccgccccaaggttcatactcataatctcatccatctcgctatctctgctggttactattattataggtatattcttttctttccttatttccttgcagatataataaccatcataatatggaagatttatatctaacagaattaaatccggttcatcctttagtgctacttttactatattttcaaaattagctggtgcataagcttcataaccatatctttttaaaaactctacaagctctttttttatattctcattatcttctattatcatgattttaggcatatacatcctccttaaaattattgctttatcgttaattaaatataatctgtaaaacacctttaatttattatcaaatcttattttagttatttctaattctagcataaaatccctaataacaaaaatgtatactaagtattcatttatttagtatacttttcattattttcatacaaataatagaagagaataatttaaatggctaatttaaattattctctaaaattatatctctattcaatttaagcttatcagcaaaaatacttacaaattttctaaagttttaagttcatatcttcactagaaatcataaatctagatttaaagttggatatctccaaatctgctaattaggttatacctagtactctgttttaattgttctaacgcaacacgatattgtaaaatttattataaaatatgttgtagctatagccccaaataataagaatatctgagatgatgaaacaaaacttcccataagaatcatacctttgcctgtaaattcttctataccaacagcccatagaaaagatgtatcttttattacagtaattgattgggatagaactgttggaatgcagcgcctaaagctttgaggtagtattatatatcgtaatgtttggaacttcgtaaaaccttgagaatatgctgcctcatattgacctctacttacagaattcattcctcctctaaatatttctgccataaccgccgaagtaaataaagtaaaagataagattcctgaatacatcggttttattggaaccaaaaacctaatagataatatccatagtaaattaggtgtatttctaaatgtctctatatatattgttgcaattctccccacaattcccttagagaaatttcttgatatggcaagaattattccaaaaaacatactcaatacaattgatataatggctataattagggttaatttcattccttgtaaaagaaacatcatatttgcttgattaaatacacttgacattattatagccctccctctgttgcaacggattgttctgttatagaatcttcaatatcaactaatgctttctttttctctctaagttcaagctttcttgaaatcattgctaatggataacacattataaaatataatgctccagttataacatacgctggtccatagtacatattggcacttgaccaagagtcagctgtatacattagatctccgcctgcaatcatagctaatactgaagtattctttattaggtttaccagttgattcgcaagtggtggtattataatctttacagtttgaggcaatattatatacctcatagtttgagtatgagaaaatccttgagattttgcagcctcaaattgtccttttggtattgatgttataccggttctcacaacttctgatatatatgctccatggtatacaccgactccaagtattccaattaaaaacaccggtaataccacctttatatatggtaatccattaaatagaaagaatacttgaattacaagaggtgtattctgaatcacctctacatatattctatttattaccttaaaaatttttattttgcttgtagaaagtactccaaaaataattccaagcattaaggcaagtataagccctagtattgatacttcaagtgttgttaagaatccctcaagaaatatattaaaatctttaaaaagtgcttcccacttaaatattgcaaaaggtccgttcattatttaatatcccactttgcaattaatttatctatttcacctgaactcttcatgtcatttataacttcatttacttccttagcgagttcagtattatcttttttagttgcaataccatattcttgaggatcatatctatcatttaatattactgtcgaatcatcaacataaccatttaaaatagatgcatcaactgcaaaacaatctattctacctgaatccaatgctgctttaagttcaggatatccaccaagctcagagaatttaagagtaattccttccttttccgcttctttttgaagtgcagttttagttgtagcactttgagcaactccaatagtctttccatctaagtctttaagtgaagatgcaccaaggctcttcttaacaagtaatccaactccatcctttatatatggatctgaaaaattataactcttttttctttcatccgttatggtaaatgtagcagcaaccatatctatttctccattatcaagaagtggccctcttgttttagctgtaaccccttgaaattcaaccttactttcatctcctaatatttttttcgctattgctttcgataaatcaatttctaaaccttccatttcacctgtctgtggatttttgtaaccatatttaggtacatcaacttttactccaacctttaatacgcctctatcttttattgcttgtatttcttttgcttccgcagtatttcctcctgtatttgttggtgttgatgagctgcatccagccatcatcatacatgcacctaatcctaacgctaaaaataattttctcaatttcatatatttatccccctatttaaatttttttaaaacttcgtagaagtttttcattaattatgcgttgtacactgtgaattatgtttcttatcttattattttatttaagaacgctttggccctatcattcttaggatttgaaaaaaatgcttccggatgagcctcttcaataatctgtcctccatccatgaatacaattctatctgcaacttgctttgcaaaacccatttcatgagttacgacaaccattgttatattttccttagataatcctattagtacgtccaatacctcttgtatcatttcagggtctaacgccgatgttggttcgtcaaataacattattttaggatgcatattaagtgctcttgctatcgctaccctttgctgttgtcctcctgataattgatttgggtaagcatcagctttctcctttaatcccactttttctaaatacttcaatccagattcctctgcttcttttttacttaccttttggagttttattggtgctaaaataagattttcaagcactgtcatatgtgggtataagttaaactgttgaaaaaccattgcagtagattgtctaactttagctaaatcttttttcagacttaaatcatattcgtctatgattactttccccgaggtcggttcctcaagataattcatacatctaattaaagtagattttcctgatccacttggccctattacaacaagcttttcaccttcatttatatttaaattcacatttttcaaaacatgagtatctccaaagttcttgactatattctctaatttaatcatttattctccccctattttggcacaatattaactctatagaaatcaattaacttttgctttattaattttttttggatgattctgtttatttaatacttctatttcaatagtaatttcgattttgtaaattttgaaatacaaaaaggagccctggcatatataccaaagctccattgcttttttaaatcttgattaaattatatatttttccatttccctagtcaatgacttttaacatactgtgttttctgtagttttctgtagtttatatatgtgttaacctagaatttttattaatatgccctcaatgaatttttttgtatttattttcccttgaccgtatattggattttttaaatgcttgatttcctgtttaacctgctttatctcaaaaagtgatgctgaatattccttatatatgctattatcgctatcttcacttcccaaactagctattgaatccatagccttcataatagttcttcttatgcgttgctccatagatctgcaattaatagccgctaatgaatctccatatagagctcgtgccacatccatataaatctcttttagctgataaggtttagatggattcattttctttttattaatgatattcagtattacaagttttaattcttctattcctgcagtgccaataatgttaatatcagaaaatatacgcaatagcttttcttcttgagaataaatttccgcttcattctcaactcttttatctttctcggtattgccctcaaaaactacacttttaatcattgatatagatttttctaattcaatctgttttttagcattattaataatgctaattgtttcaatcatattaattggcttgttaatatagaaaagtattccgcttttgtaagcattcgaaatcatttttccttcctcaacctgagataacattataatcttaccagtatatccactgctaaatgtccttttcacaatttcaattccatctacttctggtagcagtaaatcaattaatacgatatcaggttttaatttcattatttgatctttagcacctttacctgtcgttaaaatggataatacttttccgaagttattttttttaattgcttgctccaatattttacatactgccatatcatcatcaataataacaaaagttgtttccataaatagcccccttattatgaaaataatttatatactagataacggtattttcactaaaaacttagtgcccctatcaatatcactttcaacttctatacttccgcccaaattctctaagagattttttacatgacatagcccaatccccgtagacattgcccctgtctcctcattgaattttgttgaaaatcctatattaaatatataaggaagtacatctttatcaatacctgtcccattatctgaaacatcaagtagtaattctttttgcgaaatttccccaattacatttatcatattatcgccactgcatgcctcaattgcgttaataattaaattatttagaatagcaaatatatcataatatctttttaccgaataatcttcttctagcttgaattttataaatatattagaattcacattatctatttgtctttttgtattatcagatattatacagaaaatttctgacatagacatgtattctaccttctcaacattttgtactaattgattgatccccctaagaactcggtcattatttttacgaatttcatgagcattttgtgcaagtgataacgccttaactgaaaattcttctttatccttattcatttcatacaaattgtaagcttccctcattatagtatttaaatcatttgttgatttttgtaaataaaaagcctccgcatatatctttgacaccattaaatttaattcagcataacgtttttgatgctctagtgtcttaatatataatttttgatatttatatattagaaaagctgaacattgtataaatgctctaacaagtgctgttattataataacttttatggttgatatagaaaacatatttctaacaagtatttctgctgtgttgcatattatatcaaaacttactaatgacaagtataaatgtattatagacttatttctcctagttagtggaaatatagttcctaaaataccataaataatataaaaaatagctgccggcataaactgcattataatatcatttgaatagctagaagatgacattaataatccaatgctacgaatagaggcagttatagttcctgtgattattccaattaaaacaggatatatattttccgatatagaaaatataagtccaattacaatgactccaactcccaaaacaaacctgctattaaatggataaatatatatttgcgccaaaatactgatcagaatagaaaataatacactattctttaaacaaatcttatttctctctgttattttaattctatacatcattatatttgttccttcaccatataataaaatccattattgctctataatttatttatagaaaataatacgcttagattatcatcaagtcaattcaagtttttacgaattaaaatattaatcttaaaattgctattgaaataactcctgttaatactgttaataataaattatttttcttaagagcaatcagtattgttggtattgtagcaagaaattctggagattttccttgaactaaaaatttattatcggtaattaaaagttctgctactattaatgaagctagtatagatataggtatatatgtcaaaaactcttccactttcttatttaatttcatctttgataatatagttattggtagaactctcggtaacatagttacaatacaaccacctatgataacactccatacataagaattcattctttaatcaccaccccagttaaagcaccagcaattgctgatataataacactaatactagtagatacatatattgtgcttattagtaaaactattgcagatacaataataattatcaaagcttttcttatctttatatttccttttacagataaaattagcaaacctataaacatggcagttaatgcaaaatctagccctaaagccttataatctggaataaatccgccaataataactccaattcctgttgcaaaaatccaatttatatatgcagtaatgtttaaacctgtaatccataaattattaattttcttattcctcaacccctctgccgatgcaactacaaaagtttcatctgttaaaagcagccctataaaaaagttttttaagactgaattttctttgaaatatggagctactgacgcactcataaacaaatgtctaaagttaacaaagaaaatagtaaatattatactaggtattggtgaggatgataaaatcatactcgaagctataaattgcgatgatcctccatatataaaagcactcatccccattgcttcccaaactgtcaatccacaagatttactcaaaattccacatgcaagccctaaacttatgtacccaaatatagttggaatacagtctttcactccctgaataaaaaaatacgagttgtttttattctttatttctaaagaatcatttggtattttccccaattccataaaatgcccccttgatactttttgtataaaaacgtaatatatattatatacattgtacgttatactttatattatgctatatcttacatttgtactttatatttgtcaaggagtgaaaatatgaatttaaataatattattgctgggaatttaaaaagattaagaaacgagaggcaattaagcttaagcaaactttctgatatttgtggcgtcagtaaagtaatgctaggacaaatcgaacgtggagaatctaatccaactattaatacaatatggaagattgctggtggacttagggttccatatacatcccttattgatgagccaataaaaaatgatattttaataaaaaaagaagattctaagcaccaagaatctcctgataataaatatagagtttattgctattttgcaagcaattcaaatagaaattttgagctttttactgtagaactagatggcaatagcacatatgaatccaattcccatggtgaaaaaactcaagaatatataatagtttatgatggcgaactaactttaaatgtggataacataacttatatcctaacacctggtgattccatagtgtttgattcatctaaaccacattcatatataaatctgaacagcactactatacgaatgactataattaataactatttaatatagttattaattataaaaatacctaatactacttatttaataaatgtcaacaacctgtcaaatagaagttttcttaccccctgtggatgtttagcctttatcatagcataccctattgatataatagatgcttcagatgaaaatgctataaattttgactcccaagccgatggattatatttcttcttatagtcatataatgctttaaatccataaaaggaattcatataattatacataaatttaaaaatcttatgtataattactccctctacactactattaccctgaatatctgcaagaggcgctaatcctaaactaacttctttaacctcatcttcttttaaaattttacaaatatctatggttaacttttccataattccaagtggagcatccttactccttcttgttatatcaacaaaataccccttgtttgagccatagggaaaacatactacaaaacctaatatatccccttctttatttgacgctataaaataccttctatcaaatggtttatccagggatacagttcctagcataaatgaaagttctccactttttttcattgttaaccattcatgagaaatacccattatttgttcctcaattttatgatttcgttcaacgagcggcttatattctgttgttttaacgcctagtttgtccattttattatttgcccatctgatttttgcagttttagaaccacttattgtatatgtatctaagtagataatagcttctttcccatattcttgcacaataaaaccagcattcttcagaacctttatgcaatttttagaaacttgacaaaaacaaattgacaatgaattatctgaacaaaaattcttgaattctgataaaatattctcaatttctttatcactacatatcggttccccagccacaattgctatattattaactacagtatatccgataacaccctcacagaatctagggaaaaaatattgcttatcatcttctaaaattattgccgatacaggatttgttgaaaatttccttaataaatcttgaacctttaatttatcctcatatgtatgctctattcttaagttctttggctttaatgttaactttataattatcaaaaataagcacaaatttataagcatatttatatcattaaatctacttataaaaatcacatttaatataatattgacagcaaacaaaaaacaggctaggccaatccctattttcaatcttataaagtgagattttgctttaaaccatttgcgctgaattattaaagacaataatatatagcttagtaaaaatatgtcgaattcaaagtatgtatcttccagaagatttgttactaccagcagcgataaaattattacattaactatcaatgcccatctaagccgttgaagcaatccctttataataaacaaaaaagaaatcatcaataaaacaaaattgattatgtatacatgattaatttttgaactactatcgttatttatggaacttagtaaatcaaatatttcttgcattattaaaacgaccattaataaagtaatagaaagaatatggtattttttgtacttcatgtttcctccaaatatgtttttttataaaatatattatctatattaattattttttaaaataatatgaatactagcatatggacatgttgtattatatagtttatattatattgtataatactatataatgacaatataaattataattctatttttatgccaattatatacgctttttatttaattaaattaacaaagtaaacataaaggagttttcaatgtttttgtattgtttaaatctttcgctatccattgacacttttctcacgaatttcgtaacaaattataatgattacacttacctatttctatttaccattgtattttgtgaaactggtctttttatggcaccatttctccctgaggaatcattattattcgttgctggaacgttagcttcaaaaggactattagatattttcaaaataacgttattattaactattgcgaacataattggtgaatgtgtaaattattacattggcaaaaagttcggcattaaaattttcaaaagtaataattctataatttttaataaaaaacatataactagagcacagaatttttataacgctcatggtggaaaaacaataattattgctaaatttattccaataatacgtacctttattccatttcttgctggaacagcaaatgttaagtttataagctttatatcatataacatgcttggaggcataccttgggtagttttatttataattggtggctatttttttggaaatatacctttagtttcaaataatttcgaacttgttatattgcttataatttttatttctgtatcacctggcttaattgcttcacttttaaagaatattaaaagaaaatagctataaacataaaagcttatagctactttcttccagtgtccttattaaaattctttataatacatagctttataattaataaaagagcggcctataatctaatattcttaattagatttccacttaccaaataacatttgccagatacaaaattattggtatagtaatcagtgatagcaatgtgcttaagccaaccaatttagctccatactcataatctcctccatacatctgagaaaacattggtactgttagacctactggcgtagccatagctattaatacaactttttttatttctattaaatatggtggtaaaaatttaaatattatcattattataactggaataacgataagttttataaatgctacaaagtaagcatgtttatcattaaataatgtaattagttttgacttagcaatatacgtaccaagtaaaatcatagcaataggtgtattggtttgtccaacaaggttaaacgcatcataaaagagctttggcagctttactggcgaaataaaaataagcaatccaaatgccacagctattattcctggattaaataaaacactttttaaggtaattaaacttttattatttgatactgtatatattccataagtgtaactcagtatattaaaacagactaggtatgctgataaaaaaaacaccttttctatccccattatgctagtaactagtggaattccaataaatcctgcatttgcaaatccgattgcaaatttatctattctctgatctttcttaaagacaacttttcccacaaaaaaacctattaacattgcacatagagaaataaaaaaagaaattcctaattcctttaacttatctatagaaaattccatttgatagcgcgttaacataatcatcggattaataacccaaactaaaagattagatatttgtttggctccatcttcattaattaattttttacgatagactataaagccaattgccattaatatgtacatgatacttacttgtccaactattgtaaaaataatctccataatactttatccttccgttctaaaaatgactttaaatatattagttctttacatgataattcatcacaaactaactctttccttctgataaatcattatatcaattacctattttaatatacaagtctaaaagcaataaatttaaatattagcaaactagccatatatattactagcttattaacatttaaatttgctttaattctatattaagctataagttacttcattaataaataactcacatttaaaaaataacaagtccatttaccagcctattttccatcatacttcggcgataatttaacctaatatacacgctataaagtcaatttccattcgcgtctgatgaaaaatattcatggcaatattggacttgatatttattttcatgtatctaaaccaaatttataaattcaacattattgtctcaaacatgtcacttagtgctacctgactatctgcaagacctgcctcaaacactaccttaggcatgccataaactatacaagattcttctgcctcaactataacatatccattattatcttttacattctggcagcctgctaacccgtcattacccattcctgttaaaattacagagactagcttatctttaaaaataggcgctgccgaacttaaagttacattaattgatggcttatataggctgtccacatttttcatattctcaactttaaaaactatgctattatcctgacttttttctaatagtgtttgaaatcccgctggtgctatatatatttttcctcgctcaagtatatctccattctctacttctttaacatgtagattacatatagtatcaaatctttcagctagaggtccagtaaatcctggaggcatatgctgtattacaataacaggtctacataaatcttttggaaatcttggcaatattgattgaagtgcagatggtccacctgttgaacacccaataataagcagttcccttttcatgcgtttttcatcgcaattaatctgctcttcatcacatttaatatgttttaaatctgcattactatcttctttattcttttgtctattgctactatctgcaattccttttagtttaccaagaaaatcatttattgtttcctcttttatgtcttcacctactaatgagctttttaaaaaaatatcaattgctccaagctctaaagcctttagtgctgttctagtgccatcttcagtatgattgcttagcatcacaactggtacagggcaagttttcgtaatttctttcagtgcacttattccatccatttccggcatctctacatccattgttactatatcaggtttcaatctttgtatcttttctattgcgtccaatccatttctcgcaattcctattataaaaaactgaggatctttttctataataaggcttatacatctcctcataaaagacgaatcatctacaactaaaacaccatattgtttcatcatgttttatctcccttcttataataaaagattgacggagtataaacagtatcaaaacctggattgacattagtaactgtttctgcatgacctaaaaataaatatcctgtttcgttaagaatattgtaaaacgaaagagcagcttttttaataaattctgtatcaaaatatattaaaacatttctgcagagtatcatatcaactcttccaatttcttgttcgatatttttatcaaacatatttaaattcttaaactttacaagttttcttatctcatccttaatcttatagtcatcttcaattttatcaaaatatttatctaacattccataaggcatcttcctaaatgataaagatttactactgtatactcccttttcagctttatctaatacttttttattaatatccgaagctattatttcaacagaacttttttcaaaaagcattgtttcttttattaacattgccaatgtatagggttcttccccacttgaacatgctgcacaccaaattctaaaagttttctcctttgaatagtcttcaaattctggaaaaatattagtttgcaattctcttaatagattttcttccctaaagaaataagtttcatttactgttattagttcaattaatgtatctctttctttttcttctattttaacgtatccgcaatattcccaaacactaagtccaagttctttaattctataggttatcttgctttcaagtgaaggaagatttttcgagtagtcaatgccacagaattcatatatataactcgccaattgttctaatgccataatactcataatttaaaatttcctccttatatttaaaaccacaatttattcttttgatatataagttgctgtaaggatcttagaatttagaattactaaattctaataattaaccttaatataattttcccttagcaacttatatactcatatggaatttattatctaattattcaactaactcctctaatgatttttttatttctaatgtatactcagaaagttctctagtaatacttgaagttttttgaacatcttttacatttaaattaactacattatttatatcttcaatatgttttctcaactcttcaacttctcttgcttgtaccttagtagccattgttacttcacttgcttgttccgtaacattcgtaaaattatctgtgattctatcagtagattttgtttgttccttcatagaccaagttatctgcttcatatcttccctagaacgtcttacaccttttataatattttctactcctgatgcctgctctttagatgcctcagtaacttgttgtgctactcttgtaacattttctgctgaatttacaatattctttccttgctttgcctgctcttttactgctacagctatttgtcttacctgttctctagaattagttattcccttaactacttcttcaactcctatagcttgttctttcattgctcttgttacttgctccgactgttctgctacattttctacagaaactacaatgtctttcccttgttttgcttgttctttcactgccactgttatttgtctgacttgttctctggcattttctataccttttactatttcgccaaccccagctgcttgctctttcatagcttgtgttacctctgcagtttggcttgtaacctctcctactagcttagtcattgattttccttgtattgtttgtgctatcatggcatcagttatctgcttaacttgttctcttgcatttactacacctttaataacttcatctactccatttgcttgttcttttactgccatagtcacctgtgctgcttgatttgttacattttctacagaagcaacaatatttccaccttgtttggcttgttcttttactgccacggttacttgtctaacttgctctcttgcattcactattcctttaactatctcttctacacctattgtttgctcattagtcactgcagatatttgagctgcttgatttgttacattttctaccgctgctacaatatctctaccttgttttgcctgttcttttactgccacagttacttgtctaacttgctctcttgcatttacaacaccttttattacttcctctaccccatttgcttgttcttttactgctgtagtcacctgtgctgcttgatttgttacattttctacagattcaataatatcttgtccttgttttgcttgttcttttactgctactgttatttgtcttacttgctcccttgaatttgttacaccttttattacttcatcaatccctgccgcttgctcttttactgctactgcaacttcattagtttgattaactacattttctatagacaaggctatattttgcccttgttttgcctgttcttttactgctactgttatttgccttacttgttccttagcattcacaacaccttttattacttcctctacgccagctgcttgttccttcactgctattacaacctcattggtttgattaacaacgttatttatagccttactaatatttccaccttgaattgcttgttctttcactgctactgttatttgtcttacttgttctcttgaattttcaacaccttttattatttcatctatgccaataacttgttcttttactgccattgcaacttcatctgcttgatttgttacattttcgacagctccaacaatattttgtccttgtttagattgctcattcattgctatattaatttgcaatacttgttctcttgcatttgctacaccctttattacattttctacacttatagcttgttcctttgtagcttgtgtaaccatagatgcttgattagtaacgcttctcatagattcgagtatttctctacttcctttattttgactgtcagttgccaaagttatttctttgatttcgttagtaacattttcaattccaccaactattttttctattacagtcccgacttcattgcttaatctcgatccatattcaactttctcagtgccaacttctatcgccttaattgcattagtagtttctccttggattccttttataagttcagatatttcctttgtagctgtagccgttctctcagctagttttcttacttcatcagctactactgcaaatccttttccgtgttctcccgctcttgcagcttcaattgccgcatttaaagcaagtaaatttgtttgatctgctatatcatctattacatctatgatgcttccaattttatcagaactctttcctaagttagttattacactttctgccttgtgaataacctcagatatttcacctatagccactaatgtgttagctacagctgtttgtccatccttaacatctgattttactacgtcacttaatgaatttacgttttgagcattttgcgccacttggcttattgaagccgccatgtcctcaaccgtcttataagtttcatttgaagttctttgcagttcttcagcattaccagctactccttgaatagatttgcccatttcttctatagatgcagatatttcttccactgatcttgtagtactctcactatttcctgctacttgctgaatagatactactacctcttgtaccgcagccgccgcttcatttgcagagcctcttaaactttcagcatttcctgctactcccctaactgatttacccatttgttctactgatgacgatatttgttcaactgagcttgctgtgctctcactatttcctgctacttgctgtattgatgctaccatttcttgtatagccgctgctgattcatctgttgaaacttttaaactttctgtattagtagctactccttttattgatacgcccatttcttcaattgatgatgatatttcttctactgagcttgctgtactttcactatttcctgctacttgttggattgatgctaccatttcttgaactgcaactgatgattcttctgtagatccttttaaattttctgcatttcctgctactccttttattgaagctcctatttcttcaattgatgatgatatttcttctactgaacttgctgtactttcactatttcctgctacctgctctattgaaacaaccatttcttggactgcggctgtagcttcttctgctgaaccttttaaactttctgcatttcctgctactccctttattgattttcccatttgttctattgaaactgatatttcttctactgattttgctgtactttcactatttcctgctacctgctctattgaagcaactatttcttggactgccattgtggcgtcttctgctgaaccctttagactttctgcattccctgctactccctttattgattttcccatttgttctattgatgatgatatttgttctactgagcttgccgtgctttcactattccctgctacttgctgaattgatgctactacttcttgaacagccattgtagattcttctgctgaacctttcagactttctgcattccctgctactccctttattgattttcccatttgctctatagatgctgatatctgctccactgagcttgctgtactttcactattttttgcaacttgttcaattgatgctacaattgattgcacagatacttttgcattttcagcagtatccttcaacccctctgcattttttgcaacaccttgtattgattttcccatttcctctatagatgctgatatttgttctactgaacttgctgtgctttcactatttcctgccacttgctgaattgatgctactacttcttgaattgatgcagtcacctcttttgctgaagaagttaaactttctgcatttcccgctactcctttaactgatttccccatttgctctactgaggaagatatttcttccactgattttgatgcgctctccccattacctgctacttgctggattgatgccaccatttcctgaattgattctgaaacttccttcgctgatccagtcatttcttccgcattacctgctacaactttaattgttctgcccatttcctctattgaatttgatatctcttcaattgagcctgatacgctttcgctattacctgcaacctgttttgatgatacagctatttcctcaagtgagctttgcgacttttgagcgacattcgttaattgctctgcatttatcacaactccatttatagatttagccatttcacttgtgagagaatttactgacttcacagcttctgattgatcaattgttccttttgtaacttgttcatttatatttgataattcttttaatttttcatcaagctttttagatgtaaaaactgcattatctacacttcttaaacctcctataagcttaattccaatatttcttttaaaactacccatttatacacgcctccacactttctgatcttttgcttattaaatttcattattactaaagttattattgtcttttatgtttttgctactaatcattctcgatattcctacaacgtcaaatatatgagcgacacttccatcaccaagtattgttgcacccgatatcccctcaatttttcctatgtaagagcctaaaggtttaactactatttcttgatttccaactaattcatcaactacaataccgaatcttttttctgcgatacctaaaactacaatgaacacatttttctttttattttccctaggcaatttaaaataatcatggagccatactagaggatgaactttatctctaataacaacaacagattgatttttcacatattcaatctcatctttaggctttctcacaatctcaattatattgctcatcggtaacgcataagtttcattatgaatcttcaccagtaatcctgcgagtattgcaagagttagtggtaatttaatcgtaaatttactaccttctccttcttttgtttctacatcaataattccatttaatttatctatatgatttctaacaatgtccattcctacgcctcttcctgaaacgtcacttacattattagctgttgacagccccgtttgaaaaataagatttattatctcatgttctgataatgcttctgcctcctgaactgaaattacttctttcttaattgctgattgctttatcttttctaaatttaaaccagcaccatcatcttcgattgttacaattacatggttttcttgatgaaatgcctttattttcaaagttccttttgaaggcttatctttgcctatacgagtactgggtttttctattccatggtctagggaatttcttacaagatgaatcaaaggatcagtaatatcttcaattatagttctgtccatttctgtctctccaccctcaagaaccaagtccacctctttttctaatgaattagcaagatctcttaccaacctcgggaatctactaaatagctgttgcactggcaccatacgagctttcattatgctttcttgaagttcactaactactcttgatacacgacttgatattccaattaaatcttctaccgaatcatcagctatatatttattatgtaaattgttacttacttgagcaattctagtttgttcaataaccatctctccaactaaattcatcatatgttcaagacgttctatatcgactctaatggtttgtgataattttttttcatttcttatgtcttgtgaaacttttttttcactgcttatctcatcaattttttccgttgccatttctctatttacattagttatattttttttatcctgagtaactaccttttctttatctaatttcgtaaattcataatcaaacacactaacatcatcaatatccattaattcatgcttaattcttaactcaagttcttttgctcctaattcagaaatcaataaataatttatagtattaatattttcatcttcatccaatagttctaatacattaggactagatcctataacctctcccatatcatttagcgaattaagtataagaaaagctcttgttgctttcataagactatcctctgagagcttaatctcacaaacaacacaagagcacccatttagcttttcattttctattgtatgtcttttctcatcatctagctcaaatactatcctctcattgtcaccttcatgactaatttcactttttactccaataaattgattgtcttcagttttgtccacgtcaatactttgaatacatctaagttttcctatgatatcatcaatgtttacttccgtatcattcttatattctataaaatctctttttaataaagttaagcagtcagtacattcaaacaaaacgttaattattggctccgttacttccataaaattattcctaattttatcaagtacattttccatttcatgagtaagagttttcatcttttcataccccatagctgaagaggatccttttaatgtatgtgctaccctaaaaatatcttgtataactttactaacttcatctttcttttctaattctaaaattccttgttctaaaagttgtatctgctcttccacttcatccaaaaatgcacttaccatttcaggcatttcatatatattagacatttcacacctccccctaatcatgaagaactacatctatcttcaataaacttattactccattccccgtaattcctattccttcaaagtactccccatcaatacctgcaacaacttttggcgttggttggatatcattgaattgtataactgagtcaaccttgtccacaattataccaatcatctcttctctactttttaccactattattctagtttctttagttctagcgcattctattagtttaaaccttttatgtaaattgactaccggaattacctttcctcttaaattaataacgccttccaaaaagaacttactattatgtgttggagatatttgctgcatcctaataatttcataaacatcactaattttaagagcatacttctcacttgctaattcaaaagcaatatgttgaatatccaataaatcattcatataatattcctccacaaatatttagtaaaattcactataatctttttaaagtgtccactaaataatcttctttatatggttttataatcaaaccttctcacatcccctcctacaaatacaagttcattaatatttttttattttttataatttaattttatatatatttcaaaaactaatatttaattatctgcaccataaaaaaatattgattcctactaattttatagtataatttttggtcttatttgtcaataatgatattatattgttcaaagtggcaatatattgtaccaattggtattatcatctaatagtttttattaatttatataattaaatgatgttcttgtattgaaatttcattttaccttttctataaatttctacaaaaaaaatagactcaagtagcttaaaatctacttcgagcctatatttgctgtaaaaccccacatctaattcgtaatttatattctatttactttttttcattaataaaagtttctatctatacacactaaaattccaattttatttagctatattatttccaaaaatggaattatgattcgacatctacatagagatttttttataattttttaaaatttatattatgctcatcctaaaattaatagaatttttaactagtatatttcttattatatatgttgaaattcacaatgcacatttcacaattcacaattacagctataattcttgtgatatttttagaattatgatgaagaattatttttgcaatatatataaaacagtattttttaagttttaaatttccacatttctatattactaaatattatacaaatatatcacttatatccaaatctgttcttcttgaaaaatcaataagttcattattaatttttacaatgggacttaatatatcattgggcggtatatacataatttcacccatcctgccatcctcaagctttaccttcatccctatataatatgggcttatattttctaaaagtgtaaaaatgactgatgtatcatataatttcatcccttcagtcaaaaacatttgaaatgttttaaatggtgttactcctttcttatatactctatttgatgtcatcgcatcaaatgtatctgctgctgcaacaatctttgcatttaatgtaatatctcttcctagttttccaaacggatagccagatccatcgattctttcatggtgcatgagtattgcatcttttatacttctactaaaataattataatcatttattatatcatatccccaaatagtatgtttcttaatttcatcaaattcttctcttgttagcctacttggcttgttcaatatttcattgtctattttaatcttgccgatatcatgaagaagtcctgattcaataatttccttaactgtgtctgaagataaattcatccactttgctataagcattgaatatattgctacatttatacaatgcgtataagtatattcatctgcttcctttaacgcagctaaacacttaattataatgttaggttcatctaaatactttattattgatttagatattttagaaatactctcagtattcatgttatccgtcgtaattaattcatttattacctctttaatattgtatatacttacatcatagtcctctttaaattctttaattttatcaatattgctcttgcccaagctattgtttccttcagaaacatagatataaatactatattcaccaagactaatcaatttatctattatatatgaattaagtattgtatttttagacgctaattttaaaccattacatattatatcctcagccaaaatcataccaggtttacaatcaaacaataatattttatgtttcataaaattaatcacctctatccatctacattaaactttatcatcaaataatttctttttcaataaaacaaatataaatatagtatatttttccttatattataacataataatacattatataatttgaaatctagtaattgtatttattattagtaaaggtgactaaaaaagcctcaaaaacaattttccaatcattttcgaggcttctttaatttattttatatattctatattcaagagaacccgtttatacattttctatttagtactatgaaaaactacttttctataagtctcaaatttaacccatttgttcaagaaatctcctagagttttctcatcagtttctttatattcactcaaaaatgtttcagcttcttcattagaatttacctcaacttcaaatcctctaccattaataactggaacttcttgatatttataatcgtcaatagatttaatattagtaatcttcttatcacgtacttcgattgctactccatcgcgaagaactaataaatcaaaagtctctggatattcataactatcgccttttattggaagttcattacctatagtataagtcttttcttctggcttatatttgaagatagataaagtttctgtatcataatagaattcttcaaaaatatctcctcttgcttttaattcattatgttcaaaagcaaattttgcatttttagtatcattattatgaacatcttctataacaccacaagctgatgtcatattagtgatacggtctattaaaataagttctcctaatgttttatgtgcatcaaacttatcaacaactatcttttcagataataaaatatcacatgctgctatttcattttttgttaaataaccagttggtaaatgctctccagtgttaacatcaattttatattttacatctgtaacaacaccagtcaacatcttagtacctacttttacaaagtattctttaccagctgttaattctgagtcatccatccaaagaatctttgcactaattagcttacttgtagtaatatcagttccttttgtaagtacacagcctcttgatacatcaacttctttattaagttgtattgtaacagcttgaccttttcctgcattttgtgattccctatcagtaatatgaatactttttactaatgctttttcattgctaggaagtgtcgtaatttcatctcctacagaaatgcttccagcttcaatttcaccttggaatcctctgaaagtatgatttggtctacatactctttgaacaggcatatagaaaccttcttcagacttactatcaatctctacattttctagatatggtaaaagtgcttcccctgcataccatggagtattttctgatttcttagtaacgttgtctccttctgtagctgacacaggaattatattaacattttctaatgaaagttcatttactagccccttaatttgctcttcaatttctagaaatctttcttgactgtagcctactaaatcaatcttattaactgcaaatacaaaattctttacacccattaaggaacaaattcttgcatgtcttcttgtttgaactaataccccttgctttgcatctatcaatataatagcaagctctgcaaaggatgcacctacagccatgtttctagtatattcttcatgccctggagtatctgctactataaaacttctattatcagttgtaaaataacgatatgcgacgtctattgtaattccttgctcacgttccgccattaagccatctaataatagagaatagtctattgctccacctctgcttccaactttgctatctaattctaaagctttttcttggtctgcatataaaagctttgaatcatataaaatatgcccaataagagtagattttccgtcatctacactaccacatgttataaactttaataagctcttcatcttagaaatacccctctctctttcttctttccatactacctgctgcttcactatcaataactctagttgttctttcagatgatacggcactaagggtttcctcaataatcgcatctaaagtaactgcatctgattcaaaaccacctgttaacggataacatccaagtgttctaaatcttatttttttatgttcaaccttctcaccaggtaatagctttaatctatcatcatctaccataataatattgccatcacgctcaatgcatggtctttcttttgcaaagtataaaggaactatatcaatattttcacgttttatatactgccaaatatcattttcagtccaatttgaaattgggaaaactctcatactttcacctttatttattttagtgttataaagcttccacatttctggtctttgatttttaggatcccatgcttgtgcttcatttctgaaagagaaaattctttcctttgcacgagatttttcctcatcacgacgtcctccaccaaaggctgctgtaaatccatatttacttaatccttgttttaaagcttgtgtcttcatgatatcagtatatgctgatccgtgatcaaaaggattaatcccttgctttatgccttcttcatttgaatggacaatcatctcaattcccaatttttctgccgtcttatcacgaaattcgatcatttctttaaacttccatgttgtatctatatgcatgaaaggaaatggcggcttttcaggataaaatgctttcattgcaagatgtaacataactgaactgtctttaccaatagaatataacattactggcttttcacattctgctgctacttctctaataatataaattgcttctgcttctaatttatcaagatgtgataattcgctcatatattagtccccctatttgctaattaaaattttaaaatatgcttctcaattcacaattcacagttcgcaatgcacaattgtagattaaattacttcgtaatttcttcaaatattctttattacactttgcgctttttttaggtgaaatgtttttatttgcagcatagctgctttttttatataattgatcttgattgcagcatagctgctttttttatataattgatcttgattgtagcatagctgctttttttatatgtgtatattttttcagaaaagtctatgggcttttcctccttaattgtgcattgataattgtgaattgtgcattaattctaatattgatttgaatccttacggtttatcttaattgaatgctctgttccatcagtctcttcaatcttccaatctgcaatatcatctttaaatttaactgtaagtttgcttcctcttccacccatatctgctcctagatataatgaaatcgaacctgtagggcattcttttatgcaagaagagcatccccagcaatctttaggatattttatatatactttcttgccatcttcagttgattttataagacttcctggacacacagctaaacatcttttgcatcctatgcatttatttttattaattgctatgctcatatgtttcacctcttcccactaaatctctatataacattgtaagtttgccatccacaagcttcgaattaacatattttaaccattcatcgcttttctctggataatcaagattttctgcaaagctgtgccatctagtttcttttctcgcttttaaatgggcaattacagatttacaaagagtaagcctctcttttaactcatatacaaacatcaattcatgcatatcttctgcataaagactttcactcaatttctcaatttgctcaattttctccattgcaagttcaagttgcttttcattaaactgataactacttccaattccacctgcataagtatccatcaccttctgcattgcttcttcaagttgttcaaaattgaatatctgattgtcagagtttaatactttttcaacttcttctttctttttctttataagtaaatcttcttcagctgttgataaagtaacaatatctttatcactattatttattgcttcaactgctgcctttgctgcaatttcgccttctactagtgctcctgtaacatacttttgtggacatccaccagctacatcacctgctgcataaagaccttttatagtggtttctcttttagtatcaacccaatatccactagcagtatgtccacctactatgtatggttctgttccctcaatttctacattctgctcacttggatttttacctgactctatccattttaaagtttggctaggagccatatttaaatatgctttctttaattcttcatcttgagcaaaggtaattccttctgttcttaaataacaaggccctcttccctcttgattttcctttactgttccataaactctttctgatgtagttagaccatattttgtttcataaacttctccttttgaatttacctgcttcgctcctacaccttgagcaattgtacctgttggagcaattgtgtccttacatctcaaagcaataaatctcatttcaaaagtagtcatttcagcccctgcttttattcccattgaataccctgcaccagtgttgaaaggaggataccacattttatgtcttgaaaaacctggattgttaggtttgtaaaggcctgctgctccaccagttgcgcatattactttttttgctctaatttcatatagaatttcttcttctacaccaactgcaaaagcaccaagtatctgattatcttttacaatataatcaataacattaacttgattcataacagtaacatcatttagttcctgcactgcatctgctaaaataggtttaatattttcaccattaatttttatatttctatttcctctagccacatatttgccattttcatcttttaaaataacaagccctaaatcctctaacttttttgttaccttatttaaaccttgtgacattgtaagaagtagatcttcacgcacaatattatctgcatccttttttgcataatcaacatagtcttcaggagttcttccttttactatatatgcattaattgcatttactccggctgctaagcatccgcttctcttaatattagctttttcaaggataagtacggatgcattagaattttcacgtatggttaaggccgcatagcacccagcagtacctcctccaataattaatatatcagtttctaattgttttacttgaacgttcttactcatagcatatctcctttttttaggcacatgagataaaataataaacaagcatactggtctaatattttttcgattgtgcctagagtcaatatttactaaataaacacagagattattattccctgaatttttaagcactgatttttatttatacaaagcttaaagttatttaatctttgtctttattcatggatgatatttaaataaatacagacatttcttctgttttaatcttattttccacaacatttgcacttttttcatcaaatgcataaactctatggattaaaacgaaaacttcttcaccaatttttaattcttcatcttccaagctacggtatccataaaatatttggttccctacctgtacatctatttcaagattatttcctctaaatgcaataccttttacaattcctttttctgctgcaagaggagtcaaaatctccttatcatttttagcaatttgtataaactcaggacgcactattgcctttgtttctttagggtttacaacttcaaatccttttagcttagtataatcatctattagattcgattcaccaataaattgtgctacgaaatgagtctttggattcttatatatctcaaccggactacctttctgctcaattttccctctatttgttattattatttcatctgctacttctaccgcttcatcttggtcatgggttacaaagatgcttgttattcctaatttagatatcgtttctctaagccatcttctaagttctttccttaccttagcatcaattgctgcaaaaggctcatctagtagtaacagctgtgggttaggtgcaagtgctctagcaaaagctacacgttgtctttgtccaccagacaattgacctggataccttttttcaagacccttaagaccaataagttctataagttccataactctctcatgtatataatcttttttagctttttgcaccacaagaccaaacgctacattatcgtaaactgtcatatgacgaaatagagcataactttgaaatacaaaaccaattcctctttttcctggttctatatcattgactttgactccattaataatgatatctccttcatctggagtttcaagacctgctatcattctaagtatagtagtcttaccacttccacttggacctaaaagaccaattaattttccctgctctatcctaaaactaacattatcagatgccttataatctccgaatcttttattaatattctttagttccacatacatacatactagacccccttcttagttttccattccacaatattacgcaatattaagaccataatcgcaataattaccaatatagaagcaactgcaaaagctgctgaaaattgatattcattatataagatctcaatgtgtaatggtaaagtatttgtctttcctctaatatgaccagatactactgatactgccccaaactctcccattgctcgtgctgcacaaagtattactccatatataagtccccatttaatattaggaagagttatttttctaaatatattaaatccattagctcccatcatcgccgctgcttcttcttcatcagttccctgagcgttcattaaaggtattatttctcttgctacaaacggaaaggttacaaatatcgttgctaatattatccctggtacagcaaacactatttttatattattttgaactaaaatattttctaaaaagctcccttttccaaatgttaatacgaatattaatcctgcaataacaggagaaattgcaaatggtaaatcaattaatgttcctagcaagttcttcccactaaatttaaattttgttatagtccatgcaacacatataccaaatatagtattcatgattgttgctatcagcgtagctattaatgtgaggttcatagctttaatagtatatccatctgaaattgctttaatatatgcactaaatcctttagccaaagcttcagaaattatcgatatcagtggaataataagcattaatatgagaaaaaatatgcttatccctatcaaaccgtattttaagaatttattttcacttctactcattgatgtttttttcactcactactcacctcatatctgctttaatttactattgtatagttgaataccgtttataacgaatagtattaagaacgaagcgcctaacataaccaaagctatagcagtagcgccactataatcgtattgttccaatcttgacataatcaaaagaggtgcaatttctgttttcattggaagatttcctgcaataaaaactacgcttccatactcaccaacccctcttgcaaaggccaaaccaaacccagttaatagtggcgctgatatttctggaaatattactttacaaaaagttcttattctactagctccaagcattgcagcagcttcttcatattgaccatctaaatcttcaagaacaggctgaattgttcttacaacaaatggaattcctataaatgttaaggctataacaattcctaaaatagaaaatgatgattttattccaaatgaataaagtatttttcctatccaaccattctcagaatataaagtagtaagtgagatacctgcaacagctgttggcaatgcaaatggtaaatcaattattccgtctataaatcttttaaatggaaaatcgtatctaactaaaacccacgctaagataactccaaatatgctatttattatcgctgctatgaatgcagccccaaaacttaccaaatatccgtgcaatgttctagcatttaatactgtactaagaaatttatctaatcccatcccccctgactttatgactaaagctgataaaggaattaaaactataaggcttaggtaaacaagagaaaaacccattgtcaatctaaatccaggaataactctttttgtcttgctcatattcatcccccactctaacaaaataattacatatttaaaaacttctctgatacctagccacttttatctcctcttatttaagtttgatataaaactggcaatctcccagatttgattctccttgatgctataagttcaactaaaattccttttagtatccccccactgaatcaattttcactttataatctaatattcttagtttttaggaatatagatttggtcaaatgttcccccatctgaaaaatgagtctcttgagcttttttccatcctccaaatagtgaatcatctattgttacaagatccaatttaggaaatgtatctttatattcctcagcaacatctttatccctcggtctataatagttttgagctactagttcttgtccttctttagtgtataagtagttcaagtatccttcagcgacctctttagtacctcttttatcagcaacttcatctactactgcaactgatggctctgttaaaatacttaaagatggagtaactatttcataattatcttttccaagctgttgtagtgataacatagcttcattttcccaagctataagaacatcacctaatcctcttcgaacaaaacttgtagtagctcctcttgatcctgaatctaatacaactacattcgaatacaacttggacataaattcttttatagatttttcatcaccattatatttttttgatgcgtaagcccaggccgctaggtaattccatctagctccacctgaagtttttggatttggtgtcacaatcgaaaaaccatcttttgttaagtcatcccaatcttttatattctttggatttccttttctaacaagaaaaacgatagttgacgtatatggcgcactattttctttaaaccggctttgccagtcactattcaaaaggccagctttgcttatggcatcaatatcatatcctagagctaaagtaacaatatcagcatctaatcctcccataactgcctgtgcttgtgaaccagatcctccatgagattgatctattgttacatcttgtccagttttttctttccagtactttataaaactttcattaaacttagtgtataattctcttgtaggatcatatgatacattcaagagctccactggtttcttgctattatcgccattagttccttgctttccacatccaacaaaagccccagtaattaaagtaatagaaagcatcaaacataaaatcccagtttttttcacaatattctccccaatcttttttcataaatatttattgctcatatgtaaaaaatcaatattcatatatgtttagtagggttttaattaaataacaccctagcaaataccaagctttagtatacgttacaaaccacaatgcacaatgcacaattacggctaaaattcttgcagtatttatagaattatgatgaataattatttttgcaatatatatcataaaagctttatatcaattactatataaaataatgttttatgtgataattgactatctaactaattatgcataatgtctttttatttcctactaattttataaactttatatgaaatatactataagggaaatttatgcttttgtcaataaaatcagctcaaaaatattaatttttaacaaaaaccgaacttactaaataaatatgttaatttttatttagtaagtttttgaaattattattttattaaatcttgcttgtattcgaaaatcattataatcgatacttatgatttgaaaatagtattggattgatccagtgataaaagtgcttcattttcccatgatataagtacgtctcccaatcctctctcaacaaaacttgttgttgctcccctagctcctccggatgtttttgattttatgttactatgtttattatttctaatatatgtttagtaggtttttaattgtaatcacctatctaaatctcaataaaaaaatttataacagcataaataattcgtattattctattagttataatgatatttgtttttaattcctattatttcaatgggaattatatgacttatactatagtttatattatccactttgtcaatacatttattcaagaaaattccattaccaaaatacacagtcaccccagtttcccctccacaaatataaacttcaagaaaagaacaaaatcataggcgactttggaacctggagaattaaaaaaagtagttgccttaaacaactacttgatatatatgttatgacattaaaatccagtatgctagtaatatatttgcttatttaatattaaaatataagattctaatcacaacatatttaattattaacattttatttttgctttacttttattccgtggcatgcattagctgatgaacaaccggagcatccacatccgcagccactttctccatttttagccttttttatttgctttcctatcacaaatgccataaatccaaatattataccagctaatataattgttgccaccataattatcactcctcaaatcttaatctaagtaaaccgtcatacttatatctagttgtataaacactattttgtataacttaaattagtagtaattactttttcttttgattctcttcttcctgttgctataactataaatactacagctactgcaattataattgaaactacagctcccactaaacttccaactcctaatatataattaccaacttggttaataacaagtgcaacgatatatgcagttgctgtctggaatcctatagtaatcaatgtccacttccagtttcccatttcacgtcttattgtaccaattgctgcgaagcaaggagcacaaagtaaattgaatgccataaatgcaaatccacttgctgctgtaaacattgcaccaacgttgctgattaatgttggatcagtttcagatgcatctgttattccatataaaactccaaatgttccaacaagattttcctttgcaacaagtcctgtaactgttgaaactgctgattgccaatttccaaagccaagtggtgcaaatataggtgcaataatatttcctagacttgctaatatactattatctgcgtctaccatctcgaatgaccaattaaatgattgtaagaaccatactgctgcacaagatactaaaattattgttccagcttttgctataaatgcttttaccctgtcccacatatgaataactacactttttgcgcttggtatatggtattgtggtaattccataacgaatggtgaaggatctcccgaaaataattttgtcttctttaatataattccacagacaacaatcattattattcccaagaaatatgctgatggagctacccaagctgaatcgttgaaaaatgctgatgcaattaaagctataattggtaacttagcactacaaggaataaatgtagttaacataattgtcatttttctatctctctcgttttccattgtacgtgttgccataataccaggtacaccacaaccagagctaataagcattggtataaatgacttacctgaaagaccaaacttacggaaaattctatccataataaatgctacacgagccatatatccacagtcttcaagtacagataagaataagaataatagtataatctgtggtacaaaaccaattactgaacctactccactaattattccgttaataactaatccttgtaaccaatcggctacatttgcacttgccatccagtctgaagcatttacttgaattatctctccaaataacgtgtcattaatccaatcagttcctattgttcctattgttattgcaatataatatactgcatacataacaaccacaaaaattggcaatgctaagaaacgatttgtaacaattttatcaattttgtctgacgttgtttcttttccattgctactctttttaatagcacttgaaactacatcccctataaatgcatacctatctgcagtaacaatactttcactatcatcatcaagctcattttcatatttctgtattactgcttctatatcacttaatatgttttctggaagtttcaaattatctattatgtttttatcacgctcaaataattttatagaaagccaatcaatatttatatctttaccttgtatattaccttggacaattttttctatctcatcaaaagcatccctagcttcttttgaaaatggcacttgaaaatttggctttttctttgaattagctatttctatagccttttctgctgctgctttaacaccatttcctttaagtgcagaggtttcaactactggacaccctagagtctttgataatttattaatatctattttatctccatttttctctacaatatccatcatgttaagtgctataacagtaggaattcccaattccaaaatctgagttgttaaatataaatttctttcaatattagatgcatccacaatattaattaccgcatctggtctatcatttatcataaaattacgtgttacaacttcttcaagggtatatggtgatagagaataaactcctggtaaatcgacaatttcaacttccttatgtccttttaacttaccaccttttttttcaacagttacccccggccagttaccaacatattgtgatgaacctgtaagttcattaaacatagttgtctttccacaattagggttacctgcaagccctattttaattgacatttctattcctcctcatcactatatatacctttctttattaatctgaactatggtatatatttttttgtattaaattactctacaagtatcatttctgcatcagctttacgaagtgataattcatatccacgaactgttacctctattggatctccaagtggtgccactttacgaacatacacttcgcatcctcttgttattcccatatccataatacgtctacgaacaggtcctaaaccatcgaccttcttaaccttaacagtttgtccacatttaatctcctttaatgtgttcattataaaaatcctcctaaactataattctacttgccattcttttatctaatgcaactctgctatccttaacatttattattagatttcctccaagttcagaaataattttaaccgtttcacctgtaacaaaccctaaactgtttaaaaatctttttgtttcatcatttccagtaatctttttaatattcatttcatttcccttattagctaatattaatggcataacatttcccccttaattagattcactaattttttcataaattatttatgtataattccttgcattttatcgtcaattaaagtcacaatcaattgataatgattttaattaacttctctataaataataatatcactttttactcgtattgaaaatgattttcaataacttttttcaaaaattatactttcattaattggtaacgttttatcattgacattttgctttttttgttaatttttcttggctattttaacaattttataattattcatatattatttgattctatgaacttaatataacttgaatgatttttccataaaaaatgagaatttttactacagatatctatatttttactatctaaatatataaaatctagtcttgcttgaaaactttattaattagaattcttaaacatatatcctgtatttcaataatattgcaaaaataatttttcatcatgattctaagaatattgcatgaattttagccgtaattctgaattatgaaatgtgcattgtgaattgcaacatatatatgcataatgttattaactaagttttctatatgattttatatgcactttattcaaaatttatataaaaaatagactatacaaaatagaaaaacattctatttcgtatagcctatttttatatacaaaatctatatcgcagttaagtttctacattccgaacataattaaacaattgatttactagagttttaaatgtaaatttattattgcaatatatataacgttatgtttacttattcctaaatattaaatcacgtgagggaaaattaaagtatttcctccaaagtttttcttatagccttaataaagttaaatgtatttagtgtttgaatattactatgctcagcaagtaacgctaaatctttagtcattattccatcttcaattgttttaatcgaagccttttccaatttgtctgcaaaattgaccaaagccccattattgtctaattctcctcttttccttaaggctccagaccacgcaaatattgttgcgatagaatttgttgacgtttcttcaccttgtaagtgtttgtaataatgcctttgaacagttccatgtgccgcttcatattcatagtttccttctggagaaacaagtacagatgtcatcattgcaagtgagccaaatgctgtagcaaccatatcactcattacgtctccatcatagtttttacaagcccagataattccaccttctgatttaacaactctagcaacaacgtcatcaattaacgtatagaaatattcaattcctgattcatcaaacttaactttatattcttcatcaaagatatcttggaaaatatccttaaatgtatgatcgtatttctttgaaattgtatccttagttgcaaaccataaatcttgtttagtatctagtgcaaaattaaaacaagctcttgcaaaactttcaatagacttattaaggttatgcataccaagaactactccatcacctgcaaagttatgtactaactctcttttttcttcgccagtctcagaggtaaatacaagttcacatttaccttttccttctattttcatttcaacatccctatatacatccccataagcatgtcttgctatagtaataggctttttccatgtcctaacatatggcttcactggttctactataattggtgccctaaatactgttccatctaatattgctcttatagttccattaggacttttccacatttctttcaaattatattctttaactcttgctgcatttggtgtaatagttgcacattttaccccaactttatattttttaatagcttctgcagcatctacagtaacttgatcattagtctcatttctatactctaatccaagatcataatattctgtatttaattcgataaaaggatttaataattcctcttttattgcgccccaaataattcttgtcatttcatctccgtccatttcaactaacggagttgacatttttattttttccatatttattgcctcctatattgcttatatttgctttaaaaatctttagacactaactttcttttttcttttagacatattaatttctataaataattatacaatattaacgccctattttcaaacaattagcattattatatacgttttaataataaatttacatttgaacttctagtaagtcgagcgctcaattaagacaaaatatcgaaactcaattttaatatatatatttttcaatgaaaaatatatatattaaataattcttcatgataattctaaaaatactgcaagaattttaaccgtaattatgaattgtgaaatgtgcattgtgaatcgccatatatattacaattactcaaaagaccactcagctattatagtttctccttctcctaaagtaatatcaccgtcactaagccaacaaatagcatcatccctatatttattatctgtagaatcatcctcatcatacacttctataatactctcatttttctttttatttacttttctcttcttacctacatcttttttaacttcaaaaattacaggagaattattatgttgatcaatctcatctttctttacttccgtcacattactattattatcaaattcattttcactatttaattttggattatctacttttaaaagtgccgtttcatcattcttattttctttaatatccacttttccttgtatgttagtcacatctttagaacttacttctgtattcttatttttatccatatcagtcttttctaaaattcctatctcattttctttttttacaatttcagatttttccttgactttgatattttggtgctttacaaaatttttcaccttgtatacattatcatctacgatttcaatcatttctaaattcattagaacgcctaatgcagcttttacttcactgatatctctattaaattctattgataaggtctctattgtgtatggaatatttcttgacatatataattcgccctcttgatttacctttccagctaaaacaaccatcctgttccagacatagtgaataagatctctgttagacattctatctattattttaaattttgtatcctcatacatatcaactctgaatctcacatatcttctctctctcatattcaccaatccccttcatatttatatatactagcaagttattctgcaaaaatgttcttatattcagaaaagttccgtattgcagcatagctactctttttataagtgcataactgccttttttaatgtgcatacttataacacttctttacataatcttaaatatttgtccttatataatagaaatatgcttgaaaaacaaatatataaaggggtttaataaaatttttttattaaacattaatttcctaactaagttattcataattatttagacaacaaaaaagctcagttacaaaaaactgagctttaatatcaaaatattatttttcttttttgtctacatcttcatattcaacatcaataatttctccagttatatagtcatctacaggagtgctgtaaacttccttgtctctatcattattataatagttatttaaattcttctttctctttttttctctaaaaaatcccactatcttcataacaatatatattattactcctgctatcagaagccatggaagaatatgtagaattaatgatcctactaaaaatattatacaaattgttcctataatatacatatatcttttaaattctctgttcattacactcaacctctatattacttagtttctcatttagttaaaagcatatcttaagtataccttatgaatataaaatttacaatgtacataacaaaatcgtagtcgactttggttaagttccgtattgtgcttcgcactcttttcatattttaagttccgtattgtgcttcgcactcttttcatattttaagttccgtattgtgcttcgcactcttttcatatgtgtagattttttactcattttatgctctataaggtatgaatttatacgttattaaaattgttactatgagcaatgctgtaactactattcctccttctggcccaaagcttcccccattaattatatttgaattaatagttcttatggtgtatatagaatctgtaacatttccacttaccaagaatccaaaaatgtcaccctgaaaataattccaagttatatgataacctatgcacatccatatatttttagtttttataaataaatatcccataaaaatcccaaataaaaacaaattaatatatgcaagtaagctaattccacgatttaaggaatgcattaaagaaaatattatggctgatcctaaaataggcacccatgatattttagtttgtttcaaaacagtcatacaataccctctagcaaaaaattcttcattaatcccaacaaagataaaaacaataagctgcaaaaacaatgctcttgaaaagtttggactatttaaactattcactagttcaactgatttagtacataacaatataattgcaactatagtaaatgatattgcgccaaataataagccataaaataaatctttccatcctatttttatattaattaatccaatatctttaactttttttctatctagaaccttccaaaataaaactacaaagaatatcatcagtatacattgtatcaaatttaaaaatgctcctggaaaagaagacatacttaaaagttgttccgtaatatatcttattccctcgtcttgctttgacagtaattctggattactcataaagacaaatgcactatatatattactgaaaacaactgacattatagttgtagatacaaagaaacatacgaaaacaagtattattttccaaccagatcttacttgcctacgatcattactaaaaattttcattaacatcctccaatcaatttctctttacaattttattctcttttaaaacatatatttctaaatcaaccctttttcataatttatcccctcaatgagcataatgtccgcagatttagcttcaatataaattcctagagaataaaaaaatagtcacctctatattatatatatctacttaatataaattcataaagatattcttaattattaattaaaatatctgttttgtgcgaatctatactaagtgtggcgttactttcctaatatatatatttcaattcacagttcacaatgcacatttcacaattactgctgagactattgcaatatttttataattataattaaagattatttttgcaatgtatatactattcataaacatgttagttataaaaatattgttcatagaatttgagtgtttgcttattgctatctactatttctaaattgaaaatctaatttcccctaaaaaaataagagtgatacttctaaatacttagaatatcactcccatttcaatatgctattttcttaagaattcattaacagatattcctgctcttattccttcatttatagctgtaacaaccaatgattgtccacgtctagcatcacctgttgaaaacactttgtgcacattagttttaaaatctttttcatttgcttttatgttgcttcttgcatctgattcaacaccaaaagcttctttaatgtaattttgtgaacctgtgaagcccattgcgagcaatacaagttcggcttgataagttttttctgatccttcaactggcactggaccaaatcttccattttcgtctttcttccattcaacttttacagtatcaacactttcaagatttccatctttatctgcattaagaccagtaactgtagttaaatattctcttggatctttgccataaaggtctataaattcttcttggccataatcaaccttaagaactttaggccactctggccatggattattagctcctctttctttaagaggttcacccattatttcaaattgaactaatgatttacatccatgtctaagtgaagttccaacacaatctgttcctgtatccccaccaccaattacaattacatttttatcttttgctgaaatataattattatcatcatgatttgagtctagaagactttttgtattagcttttaagaaatctactgcaaaatgtacgcctttaactccatctctaccttttgctacaagatccctaggctcagatgcgccagttgcaagtactactgcatcatattcatctaatatttcatttgcatcataattttcaccaatattagcgttagttacaaatctaataccttcctcagccataagatttattcttcttaatataacttctttatcaagcttcatatttggaataccatacattaataatccacctggtctgtcacttctttcaaaaacagtaactttatgaccacatttatttaatgtatctgctgctgcaagtcctgctggacctgatcctattacagcaactttctttccagttctcttagctggaggattagctttaactattccatttttaaaagcagtatcaattatagctctttcattttcctttatagcaactgaaggcccatttaatcctgctgtacatccagcttcacatggagctggacatactcttcctgtaaattctgggaatggattagtcttatctaatctttcataagctaaatcccattttcctctatacactaagtcattccattcaggaattaggttatgaagtggacaaccagataccatacctgagaataatactcctgattggcagaatggaacaccacagtccatacaccttgcaccttgaatactttgcttttctgctggaagacttaaatgaaattctttatagtcttttattctttctttaggttctctatttttacctacttctctatcatactctaaaaatcccgttggtttacccatttttctaaccctcctaatttcctttaatttcttggaaagttttaattaatgcttcatcctcatcacatccaagattcttatgcttttcaacagtttccaatactctcttataatcctttggaattattttgtggaatttagatttttctgtctcaaagttgtataatattttatttcctttaggagagcctgtaactttcacatgttcttcaattaagttctttaattcttcttcatcttctaagcttaactcttctaatagaatcatttcttcatttaagtttattctaaagtttggatcctcttcataaatgtaagcaattccgccactcataccagcagcaaagttaattcctgttttacctaaaacaacaaccttaccacctgtcatgtactctaatccgtgagctccaactccttcaacaacagcagtcgctcctgaatttctaacgcagaatctttcacctgcaataccatttataaatacttttcctgaagttgcaccatatagagcaacatttccaatcaagatattatcttctgctacaaatgttgatttctttggaggatatactataattttaccacctgataatcccttacctaagtaatcattagcatctccttcaacttcaaatgttaatccacttggaatgaatgaaccaaaactttgacccgcagctccattacacttaatagtaatagaatcttctgttagtccatctgaaccatttactcttgttatttcagatccaagaatagttccaagtgttctatcagtattagttatatcaatttcaaagtttactttttctttcttttctatagcgtctttaaattggcttaggaatactttttgatctagtactctttctaatttaaagtcgtatttcttagtttcatcaaacttaacaacttttcctttatacttatctggagtgtaaagtattgagcttaaatcaacattcttagctttccagccatgaatattttctctctgcttaagtttatctactctaccaaccatctcatcaatatttctaaatccaagacttgccataatttctcttagctcttgagctataaagtacataaagttaactacatattctggctttcctttaaatctctttctaagctcttcattttgagttgcaactccaactggacaagtatctagattacaaactctcatcataacacaacctaaagttactaatggtgcagttgcaaatccaaattcttctgctccaagaagggcagctatagcaacatcacgtccactcataagtttaccatctacttcaactctaactctttctcttaaatcgttaagaagtaatgtttggtgagcttcagctagtccaagttcccaaggaagtccggcatttttgattgagtttttaggtgatgcacctgttcctccatcataccctgaaattaatattacttctgctccacctttggcaacaccagctgcaacagttccaactccacattctgaaactaacttaacagatactctagctccagtgtttgaattctttaagtcatatattaattgagctaaatcttctattgagtaaatatcatgatgaggtggtggtgatataagaccaacccctgtagttgaatgtctagttttagcaatccatgggtaaaccttagttccaggtaattgaccaccttcaccaggttttgctccttgtgctagttttatttgaagttcatctgcatttactaaatactctgaagttaccccaaatctaccagatgcaatttgctttattgaagatcttcttgaatccccatttgcatctttaatccatctatccttatcctctccgccttcaccagtattagacttaccgccaattctgttcatggcaatagcaagtgcttcatgagcttccttagaaattgatccataagacattgctccggtcttaaatctcttaacaatttctgaaactggctcaacttcttcaagtggaattgccttagaattatagttaaattctaataatcctcttaaagtgatttcagctttttcatcatcaattaaagaagtatattctttaaataattcataatttgatgttttagtagcttcttgaagtttatgaatagttagtggattatataaatgctcttctccactatcttctcctgatctaagtttttcatatcctggagaatccagcgaaaagtctgctgcataagttttttctttaaatccatttttatggtttatctctgcttctttttgaatttcagcgagtccaattccatcgattctgcttatagtattagtaaagtatttatcaataacttcttttccaattcctatagcttcaaaaatttgtgctccttgataagattgtattgttgaaatacccatttttgaaagtattttaattatacctttaagcactgctttattatagttgtaaacagctttatcatattctaaatcaagtaatccttcttcaattaatcctcttaagctttcataagccatatatggatttatagcagaagcaccaaatccaagcaatgtagcaaaatggtgaatctctctaggctctccactttcaagtattagagcaactgaagttcttgttccttttttaaccaaatattgatgaagtgctgatactgcaagtaatgacggaataggaacttttgcctcacttatatttctatcagataatataaatatagtatatcccttttcataagcatcttgagctttttcaaacgtttcatttaatgcttcctctaaagagccacctttatcaaatacaatatcaattacttttgattttaagtttcctttattataagcctttattttagctaattcttcatcattaattattggtgaatcaagtttaatcaactcacaatttgatgctttatcttctaatatattaccctctggtccaagataaacattagaagctgtaactatttcttctctaatagcatcaataggaggattagttacttgtgcaaataactgcttgaaatagttaaataacggttgagaattctttgataatactgctaaaggaacgtctacacccatagctgctaatggttcagctccagtttcagccattggaagcattgttgtttttacttcctcataagtatatccaaaagctttttctaatttctttctagtttccttatcatattcaatcttgaacttcttactttcattcattttatctaaagtaatcagattttcttttaaccattctccataaggatattgattagcataagaattttttaattcttcgtcatctataacttctttcttaactgtatctacaagtaacattctacctggcattaatctatctttcttttcaacaatttcagctggtatatccaatgcaccaacttctgaagaaagaataagtcttctatctttagttatataatatcttgatggtcttaaaccatttctatctaaaactgcaccaactttttcgccatctgtaaatacgatagctgctggaccatcccatggttccattagtgtagcattatattcataaaaagctttcatttctttactcatagttttactcttataccatggttctggaattgccatcataatagctctagttaaatccattccgttcatatataagaattctaaattgttatcaaatatcgcagagtctgatccttctttatttatgataggtaacactctgtttaaatcttttccaagtgctctagatttaacatttgtttctctagaataaaccttattaacatttccacgaagtgtattaatttcaccattgtgaatcataaatctattaggatgagctctttcccaacttgggaatgtattagtactatatcttgaatgtactaatgccaaagatgtttcaactctttcatcttctaaatctttataaaattctctaagctgtgtagataataacattcctttatatactattgtctttgatgaaaaagacgctatgtagaaagtttcatttaggaatttacttatccatcctgctcttttttctatatttcttctaacaatatataaatttctttcgaaatcttttcctggttttattccatttggtcttcttacaaaagcttgcattattgcaggcattgcttctagcgatgcttttccaagtattgaagggtttgtttgaacttctctccacccaattagttcaagtccttcttcctttgatatatcttcaaaaaggctcatagcttcttttcttgccttttcttcttgtggtaaaaataccatagcaacagcgtaatccccttcgtttccgagagtcataccttttgatttcaattcttcctgaaagaatttgtgtggtatattaaataatattcctgctccatctcctgtatgttcatcagcgcctgtaccacctctatgctctagcttttctaggatagttaaacaatctgataatatttcatgagatttctcaccatcaatgtttactatagtcccaattccacaagcatcatgttcaaaacatggattatataacccctgtgcattcggattatttctttccattaaaattcccccttgagataataatatattcatttgtaccttcttaaacatttatctatcaggcacctatttatccttaaaacaatcatattgcatttatgtgtagcaaacaacgagtaaatacatccttttttgaaatataattactcgcgtatttgctaaattttacaagttattcattttcacttaatattaaactcgcaatatctttcattcttttcccagaatccatacttatcttctgcatatatctaaacgcttcattctccgtaagtcctgaagttttcatgagttgacccttagccttttcgataagctttctatcttctagagtatgttctaacttttcaacttgatcccttagcttcttgattctctttttgctttgaaaaattaaatttatagcattagttaagagaacattagagattttagtaccaatacaatatatatcagtatcttcttctataaatgatttataaggctcatttacgatagctaaaaaactagttacatctactagtgtttcataaacatctagtaaactcatatccttgaatttatatcctactaagactaggtctggggaatgttgcataactaatctaattaattcatttcctgaagcacataatgctatgatttcatagccttcctgcattagtaaactctttaatttttttgctgtctcaatattgcttaaagctataataattcttccatcttgagccattgcaatccccaccttaattaataataattggtattactaaattaatatctattaagatagttttctaattcccagtcatgtactttagttctataatcatcccactcagctgctttaccttcaagataattattgtatacatgatctcctaaagctgacttagctaactcactttctctcatgaattgaactgcttcatataagttattaggtaagttatcaattccgttagcttttctttcctcatcagtcatagcaaaaatatttgcttcaacttctgctggtggttgtagattgtttttaataccatctagtcctgcttgtaatagagctgctaatactaaatatgggttagaacttggatctggacatctaagctcaactctagttcctgcgcctctagctgctggtactcttattaatgctgttctgtttttacaagaccaagctaaataaactggtgcttcatatcctggtactaatctcttgtatgaattaactaacgggttagtaacagctgcaagacctttgatattctttagtaatcctgctataaagttataagctattggacttaagccattcttatcattttcatcaacaaagacattctttccatccttgaataatgacatattaacatgcattcctgaaccattaattccgaaaattggctttggcataaatgatgcatgcaatccgtgcctttgtgcaatagacttaacaactagcttgaatgtcataatactatcagctgtagttaatgcatcaccatatttaaagtcaatttcattttgtccttcagcaacttcatggtgagatgcttcaatctcaaatcccatttcttctaatgctaaagtcatgtcacgtcttgcattttctcccaaatctgtaggtgctaaatcaaagtacccacctttatcttgagtgtttgttgttgcattaccattttcatcagtttcaaataagaaaaattcacattcaggtccaacattcattgtatatccaagttcagctgcatctgctatagctttctttaagatatatcttggatcaccttcaaatggcgttccatctggtttataaacgtcacagattaatcttgcaaccttaccttgttgcggtctccatgggaaaattacaaaactatctaagttcggtcttaaattcatgtcagattcttcaattctaacgaaaccatcaatagatgatccatcaaacatacattcattatttaatgctttttctaactgtctgtctgtaattgctacgttttttaatgttccaaagatatctgtaaattgaagtcttataaatttaactccattttcctttactaagttaatgatatcttcctttgtgtactttgccattttacaaaccccctttttttctaaaaaaagacgcacaatagaagcggtataccatctattgaacgcctttgctcaattcatttaataagtaaattatataccaccgtttctaacaaatcaatagattttttaaaaaagtaagtatttttgtgctaaaaactttaatttttaaagaaattaataccatattctttaaaaattaaagcttatatttattaaattgataaatataaaaaataacttctgcagaaaattattttataacttataacaaaaaaacgaaatcactctgaattattaattctatgactccgttgtcaaagtatatataaatttgtaatacatatagatatccaactttaaaactaaatttatgtggtaacttaccgaaatcataaatattttgattccgaaaaactatgaaaatatcgctgaagattctaagcagcaggttgtatccactttagcatgctccaactttcagtttgacaagctaaaatggaacaacctacagctaagaatctttaacagctcattttcatatgttttctccacaaatatatttatgatttctagtgaagatattaacttaaggttttagcaaccttataaatatgttcacctaataaatcgaattcttaatttgtttatctatataactcctgataattaaaatatttagatattaaattaccagtaccatattgttaacatacttttatttctacattgtttttcttgatttattcaacgttgaatttcaatgaaaacaagaaataatcaagtttcacttggtatttttattatacaaatcaatatttactctgtcaaacgttattaataatactcgctattttctctacatatagtatgtgttgtaattaaatttctaaattttagtcttaactaataactcagcctacttaaactttaaatataaagtatctatctacaacatacttatatgattaactatgataaatttttttcatggaatatatatgctgcaattcacaatgcacatttcatagttacaactaaaattattgcaatacttttagaattatggtgaggaattatttttgtagcatataatttattatattgaataaattttcttcattaatatttaaaggcattctatgtgtttttacacagatagagaaataaataacttgatttatatttgcaaaactcagtacctactataatctaaatccattttatatccattccttaatctgctttgcagtttattatatgttattttctataaataatactcaaatgatcaagagaaaataatcatttagcattattaataattaacttgaacatttttagataaattgctacaatcttatatgtaaaaatacatatatatgggggctataattatgaacacaattgtaacaaaatttggtggaagttcactagcagatgcaactcaatttaaaaaagttaaagaaataatcttttcaaatccagaaagaagatatgtagtaccatctgcacctggaaaaagaaattctaaagattcaaagattactgatttattatatctttgccacgctcacgtttctactggaatatcttttgatgatgtttttaatcatataacagatagatattgtaatatcgttaaagatttaaatttagactttgatattacagaacatttaaacatcataaaaaaagatcttgaagaaggggcttcaagtgattatgctgcaagtagaggtgaatacttaaacggattaatacttgctaactatcttggctttcaatttgttgatgctaaagacgttatggtttttaatagcgacggttccttagattctaaggcgacagattcagcccttcattataaattatctaaaatttctaaggctgtaattcctggcttttatggagcagataaagacggaaatataatcacattctcaagaggtggttctgatgtaacaggagctttagttgcttcaagcatcaatgctgatctttatgagaattggacagatgtttcaggatttttaatggcagatcctagaataataaataatccaaaaccaataagcaaaataacttattcagaacttagagaactttcttatatgggtgcttctgtattacatgaagatgcaatattcccagtaagagaagttggaattccaataaatataaaaaatacaaacaaacctcaagacgaaggtacttttatcgtaaaaaatacagatggctcaatgaaaccaacaactgtaacaggtatagctggtaaaaaagatttcacagttatttcaatatctaaagcatcaatgaattcagagcttggtttctgtagaaaaattttatcaatacttgaacagcataatatttcatttgaaaatatgccttctggaatagatacagtatgctttgtaattcaagacactcaattgaagaacaaaaaggatgttgttgtggaagaaattaaaagagcatgcaacccagacagtatagaaatccatccaaatttagctatgattgctactgttggacgtggaatggctaaacaaagaggcactgctgctaagatatttacagctctttcaaatgctgaaatcaacattagaatgatagaccaaggttctagtgagatgaacatattagttggtatagaaaatgatgattttgaaaaaggaattgctgcaatatataacgcatttaattagaaaataatatatataccttatactaccgaaataagtgacatgcatttactccagttgcttaggatttcaatggatgtttctaaaattataagtgcaccaatatactagcctcaaagacaagctttgaactagtatattggaacactttataattaagaaacactaccattaaaatcctagatgcaacattccgcaaaagcatgtcacttatttctagtattggtatatatacataattattaaatgaatatatagattatttataatctaaaaacttaatgcacaattaaggaatccatttatggcttaaccttaattgtgcattttttatattacttcattagtctttttcatcttgcttcttaagaattcaatgataactggtacaatagagataaatatgattgctataattacaaattcaaaattcttcttgactactggaatgtttccaaagaaaaatcctagtgctgatactattaatacccatagaattccgcctattgcattaaatgaaataaagtgtctatattgcatctttcctattccagctacgaatggagctagagtacgtactattgggataaatcttgcaaagattattgtcttcccaccatgcttttcataaaacttattagtcttatctaaatgctctttcttgataagtttcccaccagcaatattaataagtttatcgccaaaaattcttcctatttcataattaactgtatctcccaggattgctgcaaccattaaaagtcctagtaatgcatatatattaagcattcccatagcagcaaaagcagcagcagcaaatattaacgaatctcctggtaaaaatggagttactactaatcctgtttctaaaaatattatgaaaaataatagcaagtatgtttcaaacccataattgtttattatgaatcctaaatatttatcaagatgcaagaatatatcaattaaataagtaactgtattcatatctttcctcccatatgtttcgacataataattaatttataacatatggttattatacattattatttagtaaagggaaattaagattttattaaaaaatgtgtattttgactaacaagtagttcataaaatttttaactgccttgagttatttctacttctttatttttaaacacgatggcaagttttataatattatttattcctctgcttaaaagctcttgtgcatattttttattctctatttgctctaaagcttcttttgttgcttcttctattgtatcgcttaagaattcatctatctttttaaactctattactatcccatattttgaagcatcctttggtattatcattacatcataccttccatacccactttctttatttgattttacttcataattatcagaaagtgacactaacattccaagaacaaacgcatgataaaccttttctggttcctttcctgagacatcaaaataacttacattatttataacaaaacctttaaataatgctccaaagttccttatatctccatttaccaaagcattaagcatagttctatactttaacatacttaagctatcatcaaaccactttaatatcatattcttaaaatatatataaacctctttattgggaattgctaaatcacactttaaaataccttctatattttcttttttgacagcctttaaatatcctgtcataagtaaaaaactccatacgctctcactagatccttcaatctctcccataattacattatcatctataactttttcaatagttttattttctattaaatactcaaattctttctttatttcctcgtttccatttgagagaatcttcttaactaaagcattctcactactattgatccagtaaggtttaaatccctcttcccgattatcaatataatttagtactgaccatggattgtatatgatattgtttccaaaaatatatccattgtaccattctttaatcatattcttatctatattaacattgttattttcataatatgataaaatctcctctatctcactttccaagaagccaaacttatcactaaatttgtttctaattattgtatctacctctaaattattaagtcctgaaaaaatactttctttggctacccgaagtattccagtaagcaatgctttttctatatataaattacctttaagcaccgaacctaataaatttctcataaataatattacctcatcataatatccatttatatatgcttcttgtattggcacatcatactcatctataagtaatattacttttttatcatgatatttgcatagatacctacttaaattttttattgaatttgttaacagcggaatatcacctttactatagagtattttgttgaaatcttctttatctgcatctaatagattatcactgtctaaaacatatatatattctttatacacttctgacataagacctcttattgctgatgtaaaatctctaaaattagcaaatttagtatccttaagtgttataaaaataaccggctgttttccttgtaactccataatttgcttatctttttttatatttaattcatcaaataatgttctagactcatctttagtatttatatcaaagaagtatttaatcatactcatatttaaagtcttaccgaatcttcttggtctaggagttaaaattatattagcagaattatttataaattcttttataagtaagctcttatctacaaaataataatcattttctattaacgttttaaaatcatctattccaattggtagcttctttttaataataatctccttctttcctactaaacatatccactcatttatattttctttctttaatattatatcctataaactatttgcttaaaataagaaactccactcatcatttaattaagtgaagttttttatttaaaaaatcaatatcaatgttgctatcattattatttagtaaagggaaattaggattttattaaaataccacagctgtaaattttttatgtttttttatatgagttctaatgacacattataaaccttaatacttataaaaaaattcaaatcatataggaattaattaaaatttctatatgatttgaattttcatggctcattttaatattttgctaacataaaattctacaatatctatgttgcagtaataaatatatttaaaataaatcgcgcaaactgttatcatttaaatatttcatctttgcatccatactaactccatttgcagcagcagtatttttatattctggcgggcttccagatgatattcctcctaatttcacactatataatacaacaatattactataacccgtaccatcaaaatttttaagttcaaatactttttggtcatcagtatcatcaagcgatcctatttggatcaattttcctccatcaactttataaacttttggtttttcctcaatagatgtatttgcatcaatacttattgttaaattagtcgaaccactcattccacttatattagcagccaacgtaactatagaatcttttgaaaagcctactgtaccggttttatccagattagcttttccattttctatatccttataaatcccatgctccactttagtttcatctaggttaagtataggtgtatacaattgattctttactggagaatttataacatccacataatttaatgaattatcacccgaaaatacacgtggagttacattgctttgctgatttggttttattataaaattaactagataagatgaattgttagttgttacccctgcatcctcaaaatatccataataaacaagtttctttggtgttccttcttcttttgctagatatttaatatctggtatattttgaatatactcttttggatcatcgctattcggattgttaatcagccctttatctaaatcaatatctgcacctaaattgaatttcagcttcaaatttttcaaaacataagttggatacctaaacgaactcattgaattgtgcaattgataagatataacattccttatatcattttcatccttactaatgtaataatctcctggaagtcctcccatttgattatgccattgtaataattgtggatatttatctcgactgcctaaactatcctctaatgaaatagtaattatattataattattacttttaattttctgtaaaacagctggatcgatagtatcagaaggattgcctgctgatataattataatagtttttcctgatccatcttgattattgctttcaaagaattttacagctctatttattgcttctcctagttttctttgagttgaactgtctggttttagtgaatctaattgagtttgtaatttatctctatagtttataggcactccattttgatctttatctgaggaatctatatatggatatttttcattaattgtatttccatagctcattatatccattttaacattatctctttgattattaatatcgctacttaaataataattaagtatattatctcttactgcatttttactttgcgtaaatctatttccgttattatcacttgtattgtcaattagaacagctatttcttttgacatactatttggaatagcttcaccatattgtaaggactgtggttcaattttatactctgcttttatcctatcagttttttcaactttaattggattatcatttttaggtggattatttttatattgatcgtttatatcaactgtatccaatttaaacaaaccagtattaactttaaagtttggtgcattaatcgcctttaatatataatttttttctcttcttgctccttgtatgtctgttgcatctatttttatataagtcttattgccttccttttgaagttttgaatctggtattgttatttcaatttcttttctatcgagatttttaggatcaattttaaatattttatcatttgctatagaactatcacttccacctcttttttccaatcccacttgaatattatctgatgtaagttcctgtccatcaattgttacatgcatacttactatttcatgttctaaatcatcagcatcaactgtaaaagtatgttttcctcctacaataacgttatttaaaatttcatttgcaggatctgtagtctcatttggaatactacatttaattattggagcatggttagctcctctttctgattttaccattgtatttataaataattctaactcatcattagggaaccctttatatgtgttacctttagtatcttttaaattttgaaggctatgacctgctcctgagtatgttatattaccttttgagtaggtgtaataataatttcttgcatctcctgtatcaaatgtactgctatccatattaaaccacggaacaacatccggatcttccaagtttaattgataccattgagtatgtgttggagcgacatctatttcattatttaatgtaaatgggtattgattaatctgagcagtatttattttttttactttagttatcgaatcccaactagtagtccactggtcatctcttccatttgcacttccttgaaatgtagttcctaaactatatgcttgattaacataattatcactattcgggtcatcatttttattgtaatcaaaaatatcatgtggtatatttttatcctgtaattgtaattctccattactatctatagaatacatcttatatatatctttctcatctattgtaccattaacttttctataagcatctggatatctagattgtccaacatagtctctaaaacgttgtgtaagtaactttgctcctgtgttagatgttaattgattagttaatgaaggcgttattgtgtcatgtgtaaacataacactttgtcctgttctaataaatgattctatttcatttattacatttgtactaagctgctgtcctccataactatctgcaaatcctagaataaccatgtcataatttccatttaacttaaagcttgttcctaaattatttacatcttgaactgtttttgattcaatagtcaaatcataatcgttatttagagctgttgaattttttatcttatcattaatgactgtatcagtactaaaattaatatcaccattagaaggccttatttgaagcactttaatctcctttttatttatcaacgctttatacttggaactaccaagtatatcagtttttactccattttcttttacaatctctattttccaatctaaatacccaataaaattactatccagtgtataattcaattgatattgcgtttttcctggctgtaaatccattgtcttaatcaattcaacttctttaaataagccatcagcgtttatatctaaaaataaatttgcttttaaagtttcgctttgtgggctagctaaggttatattaaaactcatatttctattttgccttactgctgctgtaagattactatcatctattggcttgacaacttgaaccacctgtggcctttttagatcctgagaaatattagcatacttacttataatgttatttatggttatgttagctaacgaatcttttataaaattagtattgctattttgttcactaaatctactacttgctttatcaatgaaaagattatataaattagtttttgttattgatttatcagttgttgtatcaaaaatagtgttatccatacaaactaattgcttagaatctatcatttttaatatttcattggctctctttttggttatatcattttctgcataatactctccgaattttatattgtctactgtactaaaatttttcttccaatttgtatattgttcccacttccactcagtatttaaaggtacccagttatatcgaccatttacttgcgtatattgtgcatttttaggtaaccattgttgacgactataaacagatacccactgcgcatctaatatattgccattaccatcttcccaatgaccaccattacttgataaccatttccaacttccttgttgtggcacccactgacttacaccacttatccgaacccattttccatttttaggcagccattgatatgaagtgttaattgttttccattcacactctaaagcatttccgtttgtatctacccaatgaaaatcaccatacgtactactttcccaagcacttaacggcaaataatatcttttttgactaagtggattattataatctctatatggctctggcgttgatattgtagctaaatattgactatttttataataatcacttggcaatccaacattctttcttccaacaactaccacatcatactttccacttatttcatctaccatactaataaattgttgcatagttacatgagtaatcttaatatcttttccatttatattttgcgttttacaatctccaatcaaagtaagctcatctgctgctcctaatgtgaactggtttcctggctctatctctaatatttttatttcattcacatttccagaaataggtgtttcttctgcaatgactagatttctaggcatgtacattagagtaaaaaaaatcactaacataataaaacatgctacttttctaaaaaaagttcttgcattttttaaattattaattctcatttatctcccccctgcctttttataattctatttttaaatttatagatatttctgaatataatagattgaaactctcatttattatcttatgatcagctcaactaacagcctctctatttctaaatgtcacttctacattcactggatatttaaccgtgtctgaaacaccactcttatattgcaaatccacctcaaattctgctcccttatcttcattaggtgaaattttgaaagcaactactttagttgaaatagttctattaacaccattaaaatctttcatgactaattctttacctaatagtgtaaatgtatattgttttttattcctattatcatcacgtaagttaattataacttcttttatctcacttgatgctggaagtccttttacttcttctgcgttttttactgaatcatcttttaaagttacttgctcaatatctgaagcctgcattcctatattacctaattgttcttgtactgtttgtccttccatttgtaaggtagatttaacatctgaattagagaatactttaatacctgtaataaatatagaccctacaattcctagtactactgctactaaggcaaatgctattattatttctattaaagtaaaaccagacttatactgctttagcattaaacctacctcctcatttaattattctctttaatttatcttttcatcatcctttggaattctccataatccatttttcaaaaatttatttatgtcatactgagtttttacatcattcaaactcacttccttgtcagaagtagaatctggaacatcttttgtagctaggtttttaaaaacatttttgaataacgtgctattttttgattttattctatctatcacttgttggtcataatttatattgatatttccgcttccaatattcaactttccacaagtaataatattcccattaatagtaacatcaccttcaatatccacatcaccttttgtaactattacagcatttattgttgaacttaaagtatatgtttgcccatcaactgtaagttcattaccatttattttaacgggattcaaactaaatatagcaatctcatttttatttactcccaactcatttactgtactataatcagaattttttaatatatctgatgataaatctattaaatcttctacactatcagcatgtgtacctaaataatcataatcatgaaggtcgagctcatccccaattctatatcccattctatatacttgagttgcatactcccccctcatcttattaacatcttcttcaacatcaagagtatattgttgtgatgctttgactaccgtttgctctccacttttatatactatggcacctgtagaatagattttatctggattatcaaatactattcctccatccttagctttagcatctgattctgatgttgtactttttccaacatcatcaattccatcccactcttgtccattcataactttattccaatacctagagaaatgactagctttatcgaacacattattattatctaaaacttgcaaaggactatcaggtataaatttctcgccactatctataggcactgcataagctaagtagtttcccttaacagctactgactctcctgtttgatatccgttatctgtattaatatgtgctacccccataatataagctttatcagatatattaactgtagaatttgcatctggagagtttactatgatactgctagatgtcctttccttaggagcatcacttttattataataatacgttcctttatggtcattaaactcagtgtttttatcattaattccataaaaatcattaattttaatatgcgtcttatcagcttttatagtcaggtcattatccaatatcatatcattagcatttaatattgacccatccgaaaaatctgtcgaacttatctttcccgcatagaaatttttagcatataaacttcctgaaatattaactttcatgttatcttgaagattaaatgtacctctagtaataacatcattattaaatactacattatctggatctgtttcatatttttcagctccattagaatttattataatgccgccatcatacttttcataagtcctatttgaattatctatgtctggacctgaatctaatttcccttggacaaatacatttccagttacatttaacttatcaacgccatctacattcatttctttttgaaccataagtgctttattttcaagtacaacatattgatctacattctcagtacctttgccaaaaaatatatcgctatactcaggtacgtatatattatattttgtttgaactgtcctcaaattattgtctacaacatcagtatttgtcttttctttagttgattgaaaaatagattgtaatgttatattatacacgtcattatctattatattaattgtaattggtttatcaatattatgcccatcttcaggttttatagttttacttttctctttgcccacctctgttttatttactaatttaacttctgccgaaagttttggaaattcttctgtatttccatcaacagtttgctttgttgtatttggaatattaacctttactgtttcaaaacgatttattccggtgacatcgttaatataagtttttccaattattgagcttataagttgattaggtagtattgtgttcgcttgacgctcttgggaatcgctaataaaatacttaaaagctcttttaaattcctcgtttaagagtatttctatcattttattatcttcatttatacaattattatatttttgtatattttgattttcctttgctatatcatcgcttttatcgctatcctcatctcttaattcacgaattttacttttagattgttcaattttagtttttaagtcagaaatatctccttttatagcttgatacgttggattgttaggactacttaaatttccttttttaagtgcttccacttcataataaccatatgttgttgcagcatcaaaggttttaaccattatattatatgcaacatccaaaccagattcagaagaatatagattttctactctattgctttctgatactctagctctataattcccacttatcatagataacattgcaaccgatactgaagtaataaacataaaaataataattacaactattaaagaggccccctctttctttcttctcattaaatcacctcctacctctcaatatactttcataatgttatccaaatcacaaataatccttatgcataatggtcaattaccaatcactacttgtcaatgttcaattaagtcttttaacaccaagcattgatatttgaaattcctatttttaagcctaattattactttatatttatattctgatttgaatatccagtaaataaatcttctccatctttggtttttaaatctactttaatatcatataaagttccaagtttaaccaccttatcgctttcagttctattattataaatgttaacttctccttttttagtattgacatcaacatctaaatccctagctttctcaacatttatattagtgatactatcagcagtctcttgatcataatcatatatgttaacttctgtctctaaattttcattagcttgctttttataatcatcaaaattaattgataaatataactgattagttttagtatcatctaaagacaatttttttacttctggaaaaagcgatttgccatcaaaatctttaactgatacattctttgttttatttccgtcttctccaacttctgtttttatatatacattaatcactacttttccttcagaagatttgggaacttccactggagtattctcatcatcgctgattttgatttttgaactactgcctagctccttggttaattttagattatacacaatcttgttaacctgtgcattttcagtaggaacatctatctttctttcatctaaatcaatatcatatttctcattactattgctttcatcttgtgcctttgccttttcaatctttatctttcgaatatatgcataattggtatctgtagtttctttaaagtcattatttaaatatatctctttttcaaaataagtttctgttttcccatcagaatcaggactactttgctttttatctaaagtaataatatcatttaaatctaaagtcgctttattcgtaatatcaaagtctttcccttcagtatcggctttaatactttcaattatactttttcctaccaaagccgccctttgctttacttccccatctttagttactcttataagtactaaataagcattatatatcccaattgaaactatcgctattatagccatgcttattattacttctaataaagtaaatccgccacgtttatcaaattttttttttataagtcatcacctacttttgattaacagttatatttttactgtcaccatcaattgaaactcttggatttgatatatcatccccggttatattcaccattaccaatttgtctgtgttattaactatttttaacttcaatccagatttatcatcagaattaaccctactttcacttaatacatttaatactatattatcactattcggaataaattcatttcctaagccaccataatttataggtattttatcattctgagttttatatttatagtaatacttatctccttctttagttaatataatttcagaattttgttcattatttccatcaccataagcataagtgcttcttagcatatcattagccttcccaatcataactgtaggcagatctgaagtattagatttaactgaaaccatgaagtcatttgtgtctttctctgattttattccatttccaacaccactatctacattaaaaggctttgacttaccataagtgttgtttaaattccactttagatattcagaaatttcatcattgattttaggaactgaatataacaccatattaactgaaccttttacttcatctaaatttttttgactcatattaattgtatataccggaatttttctttcataatccccaattgcttttaagaacttaactacatcttcataactcccattaaaatccacattcatttttatttgagttacagtattttctttattagtatcattactttctttcgcctttgcagtattgctattggcagaatctgaagcattttggttgctacttgaggaattgtccccattatcacttgaggtatttttatcatcttctgattcaccatatttacacttatatgcatcagcttctttttgaagagaactttgtggcaaatccttatctttctctgattttttaagtgattctacagttttaacatctttagcttcaaatgtcatgccaccttccaatccgctttcctttatcagcttgtccatctctaatattatgtgttcttggcttatggttggatacaatggagctgattcattatctatctttgcatttaatatcttaactttactcttttggttttcaagcgaatttatagtaagcatagctttattatatttatcttcaatctcattcttttttgccgttttttcttgaactttttgtgttaaggttaaataaccaaattgataatatccaataccaattaccaaaatccccaaaataagtaacatcattttttctcttttacttattctcatattattcaacctcctttataacgcaagtcatttcgaaagaataatcttctccaactgtattacttttagaaattttatcgacttgaacatttttaatttcagataattcgctcaaattatgctcaagctcaccaacagccgatctagtactagttactccttttatatttaatgtatatccatcaattttaaaatccttaaaagaaacttctgctggcattgcgccacatatatcatttaacaaatcatcagtgacaatatcattttttgcaatagcctgcacaacacctgataatgaactttcatatttatttaagacttgaagcttatcactagtctcttgagcttcctttaatttagcttgcatttctggatcatttaattcttgctcatagttttttatgtctttatccatactgataattcttgatacattaaaaataagtgtaaataaaattactactactaatattccataagctatataaaaatatattttttcatctcgtctttcttgtttctttcctaaatagggcttaaaaaaattaaaatcttgcattcttattgcctcctacccaattcttataattgaacctatagcattaataaagtcatcaataggcttaccatcatcatttgatttaaaggcaatcttagaaattccttttatttttgtctttatcccaagcttttccgttacatacttttccattccttttaactttgaacttcctccaaaaataactatattattcacttgatttcccatatttctatttttatagaattgaattatcttttcgattttctctacccattcatcaacaatttctcttgctcttatatttaccggctctagcggttccattaaatctatgtttcttatcttaaagctttctacttcagcagcttgaataccgtttctttgtattaacatttcatcaatttcattaccacaatcctttattattctcgtaaaatcaagttgtccatttctatatatattaacgtcgataaagcttgcccccatatcaatgaaagcaactgaatcttcaactttatattcaaattcattatttatacctgtaaaatttataaatttatttactgcattataattaacatctaaagcatgcggctttaggtttaactttaataaaagattataatatcccctagctattctttctggatatgcaacaacacgaacgctaagttttttagctatgtcgtcttcttcttcacttaacatcttcacctgtaaaatgtaatcttctaaatttattggcaaatactgttgtatttcataccttactacagtatctatttcttcttcttctactttaggaattaaaatttctctatttatgattaatgtagaatttgttgtacatattgcatcttttacttttatattattttctattaacaatttgttaatttttacatataattcttgctctctctttatttcaccatctacaattgctcccttaggtgtgggaattgaaatgtatttacttatagtcaaatcatttttgtaataaatcccttcaactattttaatcatatgacttcccatgtcaaaagcaacaacttttctctttttttcatgggtacctaatttatttattttatttatgttttttgataatttaatttttaaagtttttaaatccatattcattagagacttaaaattaattgactttttttctgttattgtatctaattctttattttcagaattattttttttcttcatcttctcacctgtaccccttgttgttaatttatttttcatatctcatacataaattttcaaatcaattataattatctaataacaaaaatgcataagttcttctaatattgttaataaaatcaatactaaagataaattatatactctatttaagatagaaatatgtaatttatctttaagaaataggagggcatttttgcaaattcctcccctaaaaatctcttatattatccttgtgctgcagttacataaccctttttttgagttgtatcttcaggtgctaattgatatgagttttttccatcaactacagatacagttacagttccaccactaacactaacgctgaagtgacaaccagatttagcttctggtgttactgttgtaactctttttgctatcgcttctgcatcttcattgcctgtacctgttgccgaaacgtcagaaacagttatgctgtcagacaaggctccactcgctactaatgtttgtgccgctgtttggatattcttagccgctgcaacatcattactaactcttgcatctaccctaactgcagtgaaccttggaatagccattgccgctaatatcgctataatcgcaataacaataattaattcaattaacgtaaatcctttctttttcttattcatttttttgacttttaagttgttcataaaaattcctcccaaatatttatatataaattttatattaatgcactctggatcacacattgtgcatcaattttactttaattaaatttgactatagctattaaacataggaaccattatagatgctactataaatccaattataagacccattactacaatcaaacctggttctaacatagctactgatgattggattattgattctaattcatcatcataaaaatctgctgttttatttaatatttcatctaaagaacctgtttcttcacctattttaatcattgaataaagcattggtggaaaaatctcactttctaccattgaagtatataagctttcacctctcactactttatctcttatttttaaaagtgctctctcagcaactttatttcctgcgacatttgaaacaattttcagcccttctattagtggtaacccacttgctataagagtagataaagttcttgtgaatcttgatactataatcatttgattaagtttttttaacactggtaattttaatttaagctcactagaaacttgttttcctcgatcagtcttaaaaaaagtattgagtccaaatatacttatagctaatatagcaattatagcaatccaatatttttttattgcttcgctagttccaagtaataatctagtattccaaggcagaactgttccactttgcttaaatatatctgtaaatgttggcattacataaactaaaataaatacaactgcgccaatagcaaccgttcctagcaccatgggataaatcatagcattctttactttattattaattttattttctttttcataatgatttgccattctaagcattattgattctaaattaccactggcttcccctgattctaccaatgacactagaagttctggaaatatcttttcatgttttttcattgcatctgataaaaccccacctttttcaacatcctcatttatatcctttatagcttctcttaattttttattttcaatttggttcgatagtatttctaaacaagttaaaattggtactcctgcatttaacatagtatagaactgtctacaaaatactgccaagtctttgagcttcactttatcactaaacttaagttcaatattactgctttgaactatttcttcaaccaataaaggataatacccattcccagatatatactctataacatcattttttgaatctgcttcataattcccttcgattttttcgccatcggagttcattgctctatatttgaatctccccataaaaccaccccctttcaaactaacactactgtttttttatacgatcaattttgttaaatatcgtattctacctttgcaattgttgaaagttctttcattgttgtaattcctttcagaactaattccttgcattcactttctaaagtcttcatgccattagctatggagatatctctaagtacatccgaattacctccggcatttatagcttctctatgctttcttgtcatctccataatctcataaatcccaattcttcctgaatatccagtttcactacaatatccacagccctttcctttatatagcaagagtggcttgtccgcatcttttcctaaaatctccttctcgtaactatctgcttcatatgcttctttgcagttattacatatctttctaactaaacgctgagccattacaccaactacagaagttgaaaccaagtatggcttaatacccatgtccacaagtcttactatagatgatggtgcgtcattggtatgaagtgtacttaaaaccaaatgtccagtaatcgctgctcttgttgctatttcagctgtctcctcatctctaatttctccaatcataactatatctggatcttgtcttaatatgcttctaagaccacttgcaaaagttaatcccgccttttcatttacattaacctggttaattccattcatggtaaactcaactggatcttcaaccgtaattatatttacatcatctaagttcagctcttttaacacagaatacaacgtggtagactttccgcttcctgttggtccagtaaccagtattattccatggggatgagctattattctacctagtttctttagattttcctcgctcattccaagctgctccttactcagtgcagctcctccagtgtttagaattcttataactattttttcaccattaaccacaggcagcacagaaactctaagatctatatcttttccatcaacgatagttattattcttccatcctgtggtattctcttctccgctatgtttagacccgctaaaattttaattctggtaactattggacccagactctctattccaagtgtattaacagtttgaagcttgccatctatcctgtatcttatcctaatttcatgttcaaaaggttctatatgtatatctgatgctttaagctccactgaatttttaaacatatagtctatcattttaacagcaggcgcactgtttacttcatttatattttcagttgccgcatttttagagttttgtgctgactttatactctcttttgataattgtactgcagcattattaacctgctgactactataatatattcctataaatttctttatatccgcttttctagatataaaagactctatttcaaatcctgtggatattgcgacgtcatcaatagcaaagatattaagtgggtctgcaagggccactttaatcttattattatcaaatccaaatgggattaataagtacttatcacataaattttgaggaattaatgtaattgcctttctatcaaaatttattgtatttaaatctacttttttaattcctgtctgctgttctattgcttctattatatcttcttcagttataatcttactatcgagtagtatttctcctagcttcttccctagtgtcctctgagactttaatgcttcttgcaattgatatcctgtaatttttcccgcatttacaagaatgttacctagtcttcttttttcagttgccattgtgagtctcacctttcctatgaattatatataaaatgcggtatagcaccttataattagtataagtttgctatttaatttgcacaagtaaagttattgtaaaaaagtgtatcttcacattaacaaattccagtaaatttttaatatttccgccccgtagagcattgaaattaaacttcctattgctacaaaaggcccaaatgctattttttcttttgccttctttaattttagtatcaaaacaattattcctattattccacctagcacaattgctagaaataagcctaataaaattcctttaactcctaagaacaatccacacacagcggctatttcaatatcgccttcgcccattcctcttgttaaaaacactattaatcctattattattgctcctagtattcctcctagaattaaatctagaacattattcttatataaaacatattgtaataatataaataaaatgccaactattcctccaaaaatcgtagtacttgtaaatacgaactgagtatcaagatctatagcactaattacgattaaaagagataccaaaatacaatattttaaggtaatcagatctaatccaaaccttacatacacaattaaatacaacaatccatttaagatttctataataggatatcttatagagattttttcaccacaatacctacatcttcctctaagaaatatatagctaaatacaggtactagatctagtggattcaaattatgtttacaggttgtacaatgggatggtgggaacgcaattgatttttctataggaattctataaatacaaacatttaaaaaactgcctataactagtcctaaaatacatattaatgcatagtccaaaaaatcacctctcattgtatattttaatattatttaacttttttgtaaacgttgttgtgagcaaatttgtattttattctcattttttcaaaatatttaatcaaaattatattaagataataaaaattcattctcttattttaatcataatagctaaagtacctcttcaatatatctccactatatttgtaagtatattacaaatactttaaaaaaatataaaaaccggcctttataaaatataaaggtcggttgcactactaactcaccatatataaagtgcccaattaaaatatatggatcaaagtttccttataacaaaatatacttgctgtctcttttatttcttacataacatattaaatatagccaatatatgccatagtaattatatcataatgatcattaattggtctatcttgtttaaaacttttttcttctaatattattagcaattatttactgatagtcctacatttttgtcacttttcatataaaattttagaataattgccatatatatttctattccataataccatgtttacaatttttttacaactattgaataatattgttaatgatattttacatatatagtttctacttgtatctttaataaacaacaaatatggtttgaatattccttctaaacttcgtctattatagtttcaataccttctaatatagaagcatatttttttaaatttctatcatatatttatagttatcttgtagttctttactaagctcctaaatttctcttagcgataatcttttttcttcatctagcctatagcttataatttactaattttaatgttttaattcacgaaaacgtgatataatataaataagaaaagttagtgctgcaaacactaactttccctagaacgtttttaagtttagggctattagatttttatttagttagaaaaagaacgcttaatcttggtctgatggggcgttcttttctgttgtcttaaacttgattttaaaacatttcatgctacaccttcactgaccttaaaaatatcttaatacgtgaatacgttgttatacaattaattccgcttgtcatgatatatataactacccatttctataatcaacataattgtcggaacaattcctataccaataaaaaatccaaccaacatgatattctttgttactgctaatccaatcacagataacattgtaatagcaatacaaataataaataaaatcctaaacgcactgctttgcgatttcatgttaatataattttctcgttcatcatcatttttcatatcttcttttgtacatttactacttaaacttctatataattctattactccaaataacacacaaaaaacatccattataatatacttgatacttcttaaaatctctatatcatcaaatcttataatagtaccaggaatactaattgacgctatcaataaaaatactataccactcaagaatttctttttattatatatctttctcttcattttctaagttctcctttaaacaatatagttgttctatactagtatcaaaaacacaagctatcttatatgccaacataagcgatgggttatacttccccttttcaagcgaaataatcgttcttgaagaaactgaaaccaaatcagaaagctgctgttgtgtcatattcgccgaaattctgaattcttttattctatttttcacttatatgcctccaatttatatgaagttgccttcacatgaagtttatttcatattatacccatataagcatattgtcaatattctccaacacagatatatatctttttgattttctttaataattcttttaacaacaaaaaaatacccctactattaatttcactcaatagtaggggtctttttgaacatatatcatagtcaaagactaaaaatcaatgtataccttagtcaaatatagtttcctatattataacttttccaaagaagtataagtcatgggcgtttggaagcctattcatcccatccttcagggaattcagcgttgtggtacacttcttgaacatcatcatcatcatcaagtaagtctaacatcttttggaacttcttagcatctgcttcatctattgctgtgtatgtatctggaatcatcttaactgaagcttctaagaattcaatgccttgtgcttctaatgcttctctaactgttccaaaatcttcaggcgcagttgttactacaaacacttcatcttctgatgcgaaatcttcagcaccagcatctaaaatatacttattaattttcaactcaaaatctacagatataccatagtcatattttaactagttttacctaatcaactacaagtttaccattatcaaattttaaaatcaatactgtataccatagtccagcaaaaagtattaagtttatcattatcaagttaaagtttaccttaatccaatatatatttttcgaaattcctacattaatgtattagaatcaatctgaacgaaaaaataaggcaagaatatatttctatactcctgccaacaaaaaagagaacccagtaaagtttgtacacttttactaagttcttttaaacattttctatttatatgtacttttcaattcttttattaagtcattttcaattatatatataattgtattcattatatcttcattttcaataacttctaatgcttttttaattttttctttaatgcttgtatctatatactcaacaatagtttttacttcttgatttacttgcttgtttaaatatttttgtaattcatatgttaatgcaattttatagtctaattgctctaaatcatcagtatctaaaaacttttctatttttttattatacttttctaatacttcaatttctttatcatctactggaaaaatcatatctaaattaatatatgaatcatgttctaagacgcctaaataattatttaaatctaattccacatagttttgaggtattttattttcatcttttaatgactgtgcagtagttataggtgcaattagtatagttctatatggagtttctcttgaaaacaaaactactgccgaatgctctcctactattacattcttattcccctcaatcttgggaaaactatattttacaatttgtccctttttaaacttcactattattctctcccaacattctgctaacaactctatttctaataggtttaacaaatgtttcaaattcttgtttacattgttttattaattcatcagaataattctgctctttaatatctgaacccaataaagatgtagcagttctatttttttctcttatttgactaagtgttaacatactaacacctccattaatttttccttcacaattaattttacttttactattaattatcatcttagtagttttaatattattttgactaagattatatctctttatattcatattatatcacctctataatatttttgtaatacaaatataatatttttatattatatttgtaatataaaaatattatttgtattacattctctccattacttcatatataatatacatatgctaatgaaaattttaataatagaatatagaaataaaagattttttctctattgcttctaaaatatatttaaatatgtactctctatttgcttatcttctcttttatataatccacatcttgcttaatcacttcaacaattgcaaacttttcagttattctatcaatcatttgctgatactttgtttcacgttccttactatcttttctattatcattaattatcttggtatatctttcttcctgcttttcttctctttttgaagatttctttgtgaaataacctaaagctataatgcatagcaagcaccatgcgccttgtcctataaatacatttaatatctgttgttccaataataaaaccgccttcctatatacccttgacaaaagttaataattgattttctattacatgaccacttgaatgatctattatattaacatagcaagttgttgttgtggttattgtactatttttaactgagaatgagttatcattcttacgagttactactatttttgagctgctaatcaatgcttgtcctgcactatcgaatacataatctatcagtggtgtttctacaactgaatcagtagtacgagttactgtatatgtacttgtaacatattgcttaatagttgtggtttgactccaattttctacatagctaacaactggttctactggtttttcctcgacagttatcgttaaatctacacttacattattatagttacaatttattgtcgcacttcctacacctagacaacttacaactcctgttgaggaaacggtagctatatttgtatctgatgaagtataaataactgttggtgatgttacaactaccccattatcagtacagttaggcacaatcgtataagtttcggtttctttaagtgtttgggaattactatttaatgtaattgcatatgtatgagggttatatatatctttatattttccagtaacaattaacaaattatccttagttttatctacagaaataactgcatatataccaccatcccaaacaatttcattatttaaagctacattatgccctagttggggaattataaatgtatattggtcatacacagcctgtataccttgagttgatacaattgaaactttatttctatcaactatacctccaatttttttatttacatttaacaatattaattcttttgtttctcggaaaactccgatattatatattgattgagataattgttcctctacatctacaattaagaattgaactccattaataagaatataatcaccttgcctaattgaagttgaacttataattttcttataatcaattccatagttgtccgagacttctcgaattaatacttttgtttggttttcgtcaaccttggcgataactccataatcttctatagctttcttataacaaatatctattggattataattcatcttaacacctcctaacgtgtgaagaatataggtcttatattggaatagttttcttcttggctctcttgtatttctaatattttagttttaattgaagtaattctttcagcaaggtatttataagcttgatctattgaagtaatttctttagaatctatctttctcatcatgtcaacatcatttgatagagtttctaatactgatattacagtttctaataagtttatttgattagtagattttgagtatgtaccagttggtaagaggttattttcatctaggaaaactgaatactctgcatctgtataataagctttgtttgataattctagttttaacctttctaaatttctcatattatcattcctttcttttggttaacctttgtgaggttagcgagttttagtgtccaagcgattggactgtaattttcttaaaccttctggtggttatagtttcgttctatgtgaccacaatttcgcggtaagttctgaatgaacctagcaaaaaaggactctgcaaaattacagaatcctaatatgccaactttgattgaaggatcgtttatttaattattacctttaataactgttttttgactggttaatattaattcgttaatactaccgttagcactttgtaaattttcttgttttatatatccaattaatgttttagattctcctgtattaattctctcataacaaggtatttcatatttacaatttgtatttaatatttgtttatccttatttaataaatctaatcctatttttatatattttatagattcatcaccattatttactaatgttgccgtaactctataataatcattttttactctttctaatttatctagtttaaagtcaaccttctttttatactcgtaaccttttaaatcatatgggtctgtatcattgtactttaaatattccccatcaataaatctaacattttcattatgttcaattatattatctaaattattagtattaaaatatttattattcaaatttatagcttctgtaaattcttttttatcaattaatgaacttattttactatttctatcttctacagtcataccataaccgtaattaattcttttatacaataatgaacttcctacaaaaagtattgttattactacgattgtagacagtacaactttcttatgtagcttaattttggtaaagattttaattataatattttttaatttatccttcataataatcaccccttaataagaattataacacctactagataaatgttccaatagttacaatttgtacattcacagtaattaaaacctatttttttctgtgggtggtttttgtattagataggcgacctctttccaaaatggggtaacatcaagtaaaataagcgtttttaactgtatataatataataaatttcaaaactttaataaaatatcatcttttttatttcccacccatatctcaatttggtcgtttatagtcccaatttatatacaagttatttcgctaaattatatttttgcgaaataaaaaaacgaaataaaaatacaagaatggctctattactagcttgtagagtttatgagctttttgccatgcataatgtataaaataaatgtataaaatgcgaataaacagtgtataaaatactttattattgtatattatacatttattatttcccaactttttatcataatatgttgttatgttggtacaatatcgttcccaccaaatgcaaacacttgtgctatatagaacatatgtacctatctgttcgccttttgaacgcattcatatcttaataccaacttatggtagttacctcatagaccttttattttttaaaaaatttgtgattatataaatggtctaatataatcaacaatatcacatcttattaccttctatatattaccattattatacacctatacataccatgatacaatactatacgtatataataccaatgactatacaacatctataaaccctttatatatcaaggattaacacatgaatatctatacactaatactacatacttatgcactatatcatatcatatatacatactatatactacttacctattgtgtcactacatctttattcactatattagtatctacattactattatctgtcttatccttcttttcctttcctactctttccatctccattgttacatcatcagttaatggtgatttctccatagcagattgtattgacattgcccccatttctacttgcttacttatattatcaagtgtttcagtagcattctgtggtctattataattgaatacaacatcaacgtattcttccttattctccttacctatcatcttcctaattatattcaatctcttattaaatccctttcgcattatcctttctgtgatacctgcatacacatctgcaagttgatatagcatctttagtgatacttcagaaacgtttgctatgttaccagaaccccctaatatactaggaatatgtgcaactagattcaaatagttttctagtttatcaatctgtaatttaatagtttgataatccatagtagctgtaacatacttcatatctgaaccattatcaagatttacattatatccaactgcatcatttgatatactaccctcaatactttgtccaatagttgttaataatggatttaaagataatgtataaatagcatcacccatcttactaaataggtcttcaagttcatcaatagcaggtataattatttgaagtaatccttcaccctctctataatcccattcactactttcataatatggaatcggtaaaccactttcatttgcatattcacctaataaatgtacatcataattaattttatcttcaccggttactttatctttttttactgaaggatttgaaccctcgtttgtccattcttccacatggtcttcatagtaaacattccaataataaatattatctttagttttccaatgctctataaacgcaatataatttccatcgtctgcaaatactggataacagaaaattgtatctattattttacttgttatattatcattatcatctttataaatatattcataactttcaccataaataatattctttttaagtattgtattatcagtatcatggaatccaccatatttataaacttgtttaatatcttttactaaatcttcacttcctgttaatgttactggcttacccaataaataatttacatggaaatttattatagttttagatatttcaaatatcattttcttaacaataaattgttggtctttatattttatatcttttctatttaatactttatgtacaccatgtaaatattcttttaattcaaaatcctttgatactctatctctatgatgtggcttttcaacctcttgtgtaaaccaaaatggatcatttttataagttgtttgtatgtaataattaatatcttgcattatttaaatcgctcctttattttataatttataattttgtaaacactaggtttaaaatgtatacaacaaaaaaagaaagacatataatctttcataaaatttatttatataattcttgtgcatggactaataacaaatgttgctgaaccctcaataacttttaatgtattacgaacatcacatagcattattggaaattcataagcataatttgatgtaaattttgaaatagtaaaagttttaatattattcgacatttcatagcattgacacttctcacaatccaagtaaataggattatttatagtcaaattatttaaagttacagttaagtcattccatttaaaaacaactttttttgtgtttggtgttattttaattaatgggtatgaatcgctattccctttgcttcttacaatatactcttgatttaaaatcatattagtaaatgtaatatctctatcttttaatttgaaataatatggattatgacaaataaattttaaattaattctcccatagaatttcttaccataatatacttgagacttccagttaccactttcaattgcaaaaattgctttttcatcccaatcatcatcccaattaaaaatttgttggtgttttttacctaaccacttttttagttcaaataaatctgctcctatttcatcaaataatactgtcatatcaatttcacgaactccataatgagcatttataaatatttctccatctcttaaatcatttttatcagttataaaattcatttgtggcatacactcacgttcgtaaacttcctcacttgtatttataattatcccaccaaaatcattagttaaatttttagtaattcccgtttttggatcggttaagttaaatgaattataatgtatatagtctattgtaatctcctccttttaacgacaaaaaaggaagatataatttatttatatcttcctaacatttatctatttatattattgaattttaaatcttttatttctgtctttattacctttaatatgtcatttggtagatttttaacttgagatggattttgagcattaatattaaattcattatataattcaatttttgtatctcctgtagttctattagaattatttactatattactagacatagaacttaaatccattcccatagcaggtgtaaaatttggcattgaataattattagataaatataattgattcattaatacactgcctgttgacataatagatttatatatttcgtctatattacttaaatcattaatcttattaatagcattatcaaatttaacagtatcatctttattaagaatcttttcatcactatgtaaaacacctattgcaccatcatctatattagatggagttctaccaccagtatcataacttgcaacatgatgataatatcctttagagtctgtataatctccattactatatgatttagttccatcagaatgtgtagtaactttaactccgttacttgctgtttctgtcttatctccttttgatgattttgaactagaacttttacttgattttacgtctacatctaaatctaaagcactactaattttcttagttatctctttaactatagtctccatttcagcaactttttctttgaaagcatttgtaacattttcaccatatagtgaacctatttctttatatgattctccataacttttatatagcttaaccatagctttctcgttattatcagtaatcatttcatctatcttttgataggctttcttttcgtccaacatttttttatattttcgttcattggcttcttcttgctttttattagattcttccaaatcacttaactgttgatcgtatgaatcactagcacttttcttctgtgtatttaatgaatcaatttctttttgaatactatttttctgcattgttttttgtaagtcggctatttctttgtttaaagcatcaacatgagatttactatatgtactattatctttaagccaattgtctctatcttgaattaaaccctttaatttagcttcattatcgtctgtatcatcattcaaggcatcaagtaattgttgtttagcttttatttgagaatcatattcatttaaagtattttgtttttgagtttctaggtttttctttgctttttcttctgccttggtcgatttctccttgagtttatcaacctcgtcttgctgttgttttaaataatatccaactaaatcatctcttaatgttttaactgcttcatcgttagcctttttaatagcattagcgtattgttgccacttatcaattgtcttaggtatatcttcattgactaactgtgtatgtttagtaattaaatcatttaaatcagaaacttgttgaagggctttcttcttggcttcaaattctggctcggaacttccttgcatactttcagcttcttgttttttctttgctagaacttcataagcatttgataagttacctgttgaatccaccaaaattccgtattgtgataaagtcccttcaatattgcccttttcaatttcttgtaaagattgaagtcttttataagcatcaacttgttgattcattacatcagtttctttttgttttgttttaactaaatcaactccacttaaaccttcctctgatgtttttaaagattgcattgtattatctaattgagttatagcattattagtatcataatacatatcattatcttttacatcagattttaattcatttatctttttagtccattcttcggcttctttcaaagctttctcagcatctttttcttcttgtgattttcccgaaccacttcctccagattttccagaacctccacttgatcctccaccaaaatcagtagttccacctaatccaccaactgaagcctgtcttatacctgtgtcaaaattatcaaaacttgtttgaactttaactttagttgcttcaagtgtggcttttttcttactataaatatcagccatcatttcatttgaatcacttcttgctgatgcttcataattagtagctcctgtggattcattaaaatcaccactagcaattctttctttccatttttgtgcttctgccatagctgaatttaattgattggtaacatttgctatatcatttgccaattgttgaagtatttgagcctttaaactagcgaaacttttaaaattactaaaatctatttgatagtttttagcactctcgccaaccatagaaactaaccaattttgaatcgaaactcctaaatcttgttgtgttccattttttaattctgcataagttttataattactaaaatctacttcataagcttcttcgccatcagcattaaaagaattaagaaattgagtgtaagcatttttaaattcatctgaattagcaagtttttgttgatagaaattttcatccattgcgttcatttcaagataattttcagcttcaatttccttttgttctttaatctttttagttaagaaatcctgtgcttctgctacactatcaatagttgcaacggaatctccgtatgtcttttgcatctgcttcgctaaaactggggttactgctcctgctttattcagtttttgtaagtatatttcagcctgtgcaatttctttactagcatctgaataagccttactagcttcttgaactgctttagcttgtgcctgtgcttgagcatcaccaccttgattaactacatcatttaattcttcaactttctctttagcattttcagcgttaatacctaaatttggataagctgtatttagtttatcaactgtatctgttgataatgagttagaattatttttaaattcttttattgcatttgtagcaagttgaatcttttcagcattattaatttttgatttagtatctttttcagttttatctgaacttatacctaaagctgaattaataacatcaattgcccctgcatattttccacttttatcatcaactatacttaaagcactttgaatagaacttaatttagacaaataactttcactagattctttactcttttcaagttctttagaaatatcaacttcatgtataaaccttcctgttgggtctgattttatttcagttctttgaccattattatacatatcttgatactttttcatttcttcagtagcttttgtatatccatcagctaactttttaatatcatctgtattcttaacgtcattatctgataatttcttaattgcttcagcttgagcatattgtttttctttatcaattaaatcttgagtagctttagcatttaattgtttcttacctgtatttttatctatagcatccgtagcttgtggatataaagaaattaattgttcttgaactcctgcaagttcttgttctttatccttatattctgttgtaccttgctttaaaccagataattcactttgtaattttttataattgtccaataatgcttgatggtcatttggattattttgttgcaatgactttacatattcgtcattactttgttttaaattagactgtgcattagctaaatccattatcttagtaatagcaccagtaataacaagagaaagtcccatagaaaacgccatttccatagccatagtggcaacttgaagtgctttagttccaatagttgcaagtgctaattgtgcttggtattctgctaactttgcttttgctcctaatgtactcacaccacttgaattttgtacacttataagtcttcttaaaccatctatatgagtttgtgctgttctagcagtttcggctaatgtagttttataactatttaatcctttaatccagttagttaaaaatgtaggctgatatgaagacattgattttctaaattctgcattgaatactgtcatagcaccaactaccgacattataacagtaggcatcgcaccgaatttttggatcattccatttagtccattaactacacttgtagaaccacttagaatatttttaagtgagttagtatcagttaagtttatccatatagccttagtggattctttcaaagcatttaatctaccatttagagaatccataaatctagcttgttcttggtcagcagaaccagccgaatttttaagtgtttcatatattactggcaacttctcggcattttgtagaattgaagccataacctttgcttgattctttcctgctgtttcatcaagaattttagctttatccatatcactaagtttcccagagttccaagcttttgaaatatccatgataatttcatatgtacttcttaaacttccatcagcattagttaattcagtattagttaaatcctttaaatcattttttaatttaaagaaagtttctccacctttagtttttacttggtctaatctcatagaaattgtttttaaacctgtcccaacttcattactattacgaagaacctccgtacctgctgtaattaaagcttctgattggtataaatcattattagcaacagcaagtgcggcacttgatactcttaaaccttcagccaattctccagttcggattgcgaacttatttcctgcctgatttaaggaatcgactacttttgttgtatcttgtgcttcaagtttaaatccttttaaagtagcaacaatagcatctgctgaatcttttgaagacatatcaccaacatttgaaagaatgatactttctttagccatataatctttagcttgatcccaagtatatcctaattgtttgaatgtagtaactgcttcaattacactttcagtagaattacccaaagatttagccatattattagcttgtagtgagaaattatttaacgtattatttgaaacatcatctgcaaccctctttaaatcggtcatagcagaatcaatattcttaatatctgtcaagccttgtcttaattggtttagtcctgcaaatattacacttccaccaatagcatatgaaaatatatttttgaatacattacccaaagtcgaagcatttgctttaactccatttatagcagtagataattgatttacactatttctagctgtatttacttccgaactaataacttttccatcaattatttttcctgcttttacttcagataatattgtttttaatctattaacttcactttcagcagttctcaattctgtaatatcattatctttaataatatccattttagtagctttaatattattaattctgttacttagtgtatttattgcaccttctaatttatttatattggttgtactattatttcctaatgaatttatttgtgttcttaattcatttattttatttattggagtatttacattaatactattaagttgattttggaattgagtaattactgataaatcaattcccattgcacttgcagtattaagttttgtttgcattttagatttaatagaatcaattctactttctaatttccctaattgctgaatattatctgtaacttttacattagttgtagtaaaaatattcttaactactccatcagtttcagacataacttgtttccatttcatcgtttcagtaacaagttttcccatattgtctgtgtatgtaattgttgcatctttaataccaccatttttagttgtattaaaatctatcttagccaatgaatctacagtctttctaatctcattagcacgtctttgtaaatcatcaaaggcttttgctccatcacctatatttaatgatttacccattatatttttaaattgttcagcttctttactagcttgtttagttttattaattacagtatcgattccactcgtatcaactttacctattttaatagtaaaattcatactatttaattgagtttggatatcatttttaatttgagttttatctagggtgaatttgctaattgtggtttttatcccttttacactatctatttgtttctgaagatcagttttaactttattaatatcatcaatttttatcccaataacgatgctatttttatattcgctcatatattatatttacactcctttccgtcttataacaaaaaaatagagtgcaaatatattacactctctataacttcaatattttattttttaaatttgaataataatttcttaattggatttactttgatttctttcaatggttcaatatcttttctcatttcagaaattcttctttcatctgatattcttttatcatttttagcagacttttgtaagtctgaattaaattcattaacccctttttctgcttcctgttgtaataattcaatatgtgcttgtttaacttctaatattttggctctatatgtattaataactacattagatattatatttcctagaaaatacaatattgttttatattcctctggtggattttcttctaattcttttatattttctttagtatatttgtaaaattggtaatcttcattttcagattctactaataattttaataaatataaaagtaattctacattttctatatctacattacctttatcatcagtatatttatttaattcttccagtatttcttgttccatgccttgacttgcatttataattttatattcttcagcttcatatatataatttaatttttttaacattaattatctctcctttatttatgcgtgatttgaaattctttgatctattacatcattcaaatttattccattaatttttatattttgacctactaaatttaaatctccattcttattctcaattgtaagaactccatttaaatatgatatatcagcaactaatacattattactataaatttgcatattatcagcaattgagacttgaccactttcatttacccaaaatacttttgtgccatttgaattaaaaattctagctttacccttatttgctgttaaaccattaagagccgataaattaacatctgttccatttgatgtattatttattgcatttaaaacactacttggatgattctcaattaaagatgcaaattctgtagtatcaactttacttgccaatgcacttgcaatatttaagccactattatcgtctttaaccgttgttaaaggaatataaggttgtccacttgtagtatcaatactggttactttattgactgtaataccagtatttattagttccttcaaaggatctgcatacggaattacattagtgatagttaaaggagtttgcattatatcactagaatattttttagttatgctttgtacaattgtagaaaatgtatatccaacatctgtatttacaatacgaattttttctcccactcttatatccatttgaccatttggataaccagtttcaaaaacatttatgtcttgataagttactgttccacttatctcaggctgactttttttagcaagttcttctttaacagtatttaacaaaacattagcatcacctatgttactatctctaaaagttccttcctgcatacaacttggattatttaatatattatctaaggacatacccaacactttctcataatattcggtattttgcacataagcttttccagtagggtttacaccaattatattaatatcctctcctgttgttacattttttgaaccataagcatacatacgagttattaaattctttgtactaaaattaatatttaatggtttataatttaatccatttcttataaacattcctttgtcaattggtatagttcttaggaatacatatttattaaaattagtttggtctattgaaaactctagccatccatcataagcctgtgctaataaaattaaattatcccacacactcgattcatccgatccgactatactccttctctgtgctgaatctacatcagtaccaccccaaaaataatctaattgaacatttttacaattacttttaattgagttgaataattcttcagcagttttaccgacctcattcattacttgacagaatacagccttcaacgattcttcttctctataacctttaacatcaaatatagttacatcatctgaatttattgtaacttcttttattataaaaaaatctggttcatcatcagacattattttaactaacatctgacatgaattttgacttatttcatcttgtagtgatgaaattttgaagctgatttcccaactctcatttgtgttcatggttttttccaaatcatatgcaccataaacatttgtaaccatttgatgattcatgttatataatcctaacttagtatttttatattttttcctcaattcatctagttttttcaaaatatattacctccttccttattttttaagcaaataaaaaagatacctcgaaataaggtatctaatctaaatatgaataaaatacttgttcaatttttgaatacatttcattaatattaatacaatttaatttttctaaaatatcagctaattcagtatatttttcatgttgttcaatatcatattttttcaatacattccaacacgcacaagttgctccaatagaatctaaatatacagtatcattaattaagttatcattttccgaatcataattaaatttaactatattggatttacatatattacaaactttttcttttatacttggaatattattttttataaataattcctcggaagtctcaaaccaatctattaataatgtcagcatataataatttgctaaataattattcattatgcgtaaaagtctttcatccttatttgtaaaatcacaaacacatacaaatctatatttttgcaacatatagattatattatatttgatgtattcattttcttttatattaatttcaacttctttattttcaaagtttatatagttttctaagttactatttatatataatttaatattatgactatcatctattcccattaaattacatacatctttaacgaatattttatgtttttttccttcaataatatttatcatctttttattccttctttctgtagtatcaaaatagcctgtacatattacagcacaagctatcaaatttatttttcatttataaataatttaatacaatcttccaacattacatcgtgcgaatttaattcctcacacaatttttctaggtaatcagattcaccaaattcaaacctaaaattgaatttctcattatttttaattccagttacattacattcttttttcattaaaaatctctccttaatattattttaatattgacttcccaaacagatagatttataatataattgatatataatttataaatctatctgggtatataaaaattaatctaaatatctttcaagtttatcaaattctttatattcaactttttctgctatgtctattaattcttctttagaacgtgttaaattctcttcatgaataacaataggttttttatttaaaatactaccctgtttttctaaataaaagttttcaattaggtacaaatcttctcggcttaaattatattcagtaaactctttatagattatacctactaaattataatcagaaactaattcttcagcagttaattttaagtttgaattacctgttaaatggtttgccaaacgagtatccttataagtggtacttcctatatatatgttatccccaagatcattaataaacatataaactgtatctcttttatcattaaattctcgccatttcttctgagtttctgccatacgttctttatgtaaaactctataatttttatagtaatttctataatattctctattatttttgtaatattctttactgtaagcgttcatttcctctttatgttctttataatattctctactataattgtttcttttttctctttgttcaattgtcatttccatttctattacttcctttcttgccttccatatatgtccacttaatttttgtagttaattttaggtaaaaaaataaacacctatttaagtgctttatatatgtatattaaaatttatttattttctatatgattttttgcattatgtcttctaatttcattaatcttttgttttaatttctttctctcagccttagtgtgacaatcatttccttttatatattttgcttcaatttttaattcaagttgtaaaagttttagtttagaatcaatatctaaattcttatagttccttctcatatctctaatttgttttaataaagcataataattttgtaccattatatttctctcctttaattttaaataatataattaccacttgtaccatttaccttcctttagtcctactatagctaaacataaagccattacaaggtcatcgtgaaatccacttgatgctccaaatcctccattgtctttagattcaaaaactttcatttcttcaaggattccttcactatgtaacaataatcttcctttttcaaacatttcaattaaatcattgacaattatccctttactttttgggtttgtatcaaatccaactgtatattgaggtttttggaattggtcataagatttatatttactcatgttcatatatttaaattcttgtcttaaacgcataattattgaatgtcccgatgaagccttttctactactaagtaagctttattaaaataccttcctaattcatttataaattctgcatattcataagcctttattttattattttggaacatggcacattcttcaccatctttatttaatacaatagctgtagaataatcttttccaacaccttcggaactatctacaccaatccaaaaacgttcaccttgctttggtttattataaataaaaaaagatttcccgtaatatttctttaaaatacttggtaaatcttccaattgagatttttttataaacttatcttttttattaagttgtaatactcttaaagtattggtaattctttcactatcaaatacagtatttcctgaagttataaatgcctccgaatctgtcaaaggaaattcttgtcgaaaatcttgttctgaactattttgtattttcaatctacgccaacagattatatcaagtgtcattccttcaatttttaatagttctttttcttcctcggttaaatcgtcttcagaaaaataatgaccatttatctccttgaatatttctttatactctttataatcatccacaaacatacaacttgtatctatgtaattatagaaaaatgaagtgtaggcactctctttatttttagctttattatacaacaagttatagtgattcaatccattggctgtgctttcgactattagatttccatttgcttgaattgcttgttctattgctaacaattgtttatctgcaatttcagattttacaaaagcaaattcagatatatgacataatttaagagtatttccccttgatttatctgtatatcccatagtgctacatgaaataattgaaccattagccaacgctaattctgctctattattacgcaatagttcaatctttaatacatctggtaaactattataaatagcttttaatttattgaatattgcccttgtgctttcatcattgtggcttaacatcatacaagttgaatttggttgagtaactgcataatagattgcaagtccacatatagcaaccgacattccaccttgacgagcctttaaaataacattgtatttatgtaagttttttataaaatgtttttgcattggatttaatttaaatggaactacattaccatttttatcagttatttttaaaaaattctgtataaaaagaactggatcacgcaatgctttttgaaattttatcttttctattgtatttttaatcttcgtcaacatttatcccctccattaatttttgtaatgcatcaattttatttccaaagaaacttgattcactaaatttagcgacccaattggcactatttacatcaccttctaaagcttttttcaccatagaattataaattttaaccaagtttaaatccttttgaaatttagtaacatgaattatggcttgttgaacatcttccttttctaaataaagttccatagctttatccaatgtaactccatttagataatttttagaaacttgttcccatttactttcatcttgtccatctgtaaaccaacgaacaaatgctcttagttttttattactaagcatatcttcaatttgtttatttaaatcagattgaggacttctttcttttttttctgccatgaaaattcacctctattctgtcttagaatctttatcattatttttatctgttttctttaattcttctaaaacttcttttaatcttccctgtttctttaattctccaaccttataaacagcatttaaaatttgttctagtttttcatttgtagcagttaatttccccgtttccacttgtgtaatatattgtttagaaactcctaaaaaatctgctatatctttttgggtaatgtcatatattgcccttgtcattttgattctttctttaagttgcattttattttcctcctaatttttctatctctttttttatctgtctttcaagttttgatattacatcttttataggtgtattttcttcaacacctattccatatttaattccacctaattcaaattccattgcaatataattaatttctccagatttcattttttcatatttaaaatccattgataaagtttcttccatatttattcctcatttctttatttttttattactttaggtaagtaaaataaaaagagagtacataagtaccccctccttacattgtgatattaatagtcaatatcactttaaaattatgctattgtcttacgcaatacacagcaaccatctttttggacgagcccacacgccacgagtgtgtttgcaaatacatcagtttttagtttgcttgcatctctttgatcttcaacatgtataccatcgtatttaggcataattgctaatgcacccttcttaattatataagacttacattctgctttaactgaatcataagtatttacatcggaaatcataacaggaatacttcctctgtaataaccgattacaccattaacaattttaccattatattgtacagatgttgtaacatcagattttataaaagaatccatcttataaaatgaaggtgccaatagtgaatgaacaactattcctgcaaaatcttcgttatcttgctcatctccaaataaggtaaatgctgaaattaattcatcatcagttaaggcttttgcttgtgctgttggtgattttaaaatgatattcgcatcaatatcttttaccatttcatcatcaattttctttgcaattactctaccttgttctttttgtgcttgatcaatgaattgaccaagtgccttttctgaatcatcatcgaaaatttcaacaccttttgctgctctaaaaacagttttctttgtttcagtttgtgataattcttcaacgctaatttgatcgcctttagtgattaattccgcatcagaaagtgctttccacattgggaatgtgatactgtcaccctccttagaatttgttaaatagtctattgtatctgctaatgtagatatcttaattcttccagctactttctcactaactataggagcgtagacttctggaattattattgcatttgccatataaatatcattcctttctctatgtaaaattttttataataaaaaagtcactaaaattaattagcgactttttataaacaataattaattgtaaatgttaaagtttgtgcagttccagttggattttttaatattaaagtttctattaaaacattatctaaataaaatattccaccatttgtataatctatcccatttacttcaaatgttaaattcttaccttctggcattatttgtgtttcatatagataattaaaatccttttttaataataatgacattacatctttttgtgtttcaccatcatcaaattgtacgcttataagtgaattagtaaactgtgcatccgcaaatatttgtccattatatctttgcataaactacccctcctatttaccatttaaagtgttaaataattctctattggtattatacaaatcaattttttgataataagtcattttcttaaaatcttctttagtaatatttgtattttgaacatgatttttaggtttgtaagtgttagattgttttccaataatatctacaatttcatttatataagtttctaaatcttcaaccccttcaaattttaaatacttttgaagttgttcatttaaacccttatcttttaattgcttttgtaattgtaattccgttttttctcttgctaacgacttctttccatcctcatattcttttatcatttgttccattttcaattcttgttctgttttttgaacaggtaattgtttctttaattcttctattgtagtatttaatgtacctatttgagtttcaaaaccttgtttttctttactatattttgttcggattttatctccttcagattgtaattttgaatttaaagtttcctccaaataagtatttacacctgataattgttcctcgtttagtcctaattcgttaatatccataatgcatcttcctttcatgtagtttatgacctaaattgccctctatttgagttcaaactgaccataccctagtatttttttattcgtttaaatttttcgaccctatatgagccttatttttgagtttaagtaagtatttttacacatacctatataaccatttatctagtttattaaatcaaaggggagagagccgaagaaaagctataccttaatttaaagactaagttcataaatggttgtataaatatagagattctttattgtctatctctaaagacttaattgccacaatctaacccgtaatattagggtatgaaggaggaaatatttcctttgcaatagttgctttatacattattttgaggacggtgagaattactcactacaaaagcaacaaaacttatatgttaaccatatttacaaacaaagtatggtttgatttgatacaacactttacaaataaagtgagtaaaaaatatgaatatctaattaacagagtttaaaaatataaactctaaaaaaaaccacatagtagaaactatatggtttataacagcttatattttattggtataactcttttaacagtaagccaactatatattggcctactctaactacaaaaagaaagaaagtaaaattatagagtatttatttactcttaaaagagttatacgagattttttaaaataatattgactttgcattttgtttcatgttataatatttttgaataattatatataaattgtaattcaaaaaaaattaattatatataatgttagaaattagatttagattagttgatgataacccctttttaccattaataaagtagcttatcattactgcactcactccaactttttcagcaataaactttgcttttattccattttctttgagatagttttttaagtcttcccttataatgtcttgtttcatgcgttatcaccctctcttaatattttattttatttttaattaacttaatatctttcttcctatattaataattatttttttacataaattttcattaataatggtaagtgatagtcaaaatttacttatttttgtttacttttttatcattctaactatcacgaacattaatgcttgtcaatatttttttagtttttttgcaaggttattttaaatgtgcttgtatatactgttactatcctttaattttactgcatttcctgtgtttgaaactgatatattaacctcacattctaaagtgattttatcttttttagtttctaaatttataaactttcctttaattaattcttttaaacattcgtctattttcattccatttattccagtaaacttacttataactgctctagttaaagaatttcttttaaattggtatattaataattgtttattccttcctttatataatacttccaacatcaccaacacttttagaactctttttgcttgatctgatagatttaatttatctatattattaaatgtattttgtttgtgaaattctatatctattttatctttgtcttcaatatcgtctattccttcaattctaattctcttggctctatcttttggcttctcttttttctctagtaattcttttcttttctcttgtagttctattacatttgcttcaataacattaaattctttatcctcataagacttattatttattctagcttttaattcagcaccgaatacattccataaaaggtctttagcttcattttttaatgcaaaatctttatcacaataaaaagcatatactaaataatcaatcagcttgtcttttttcttagtttccttattaattcctgctaattcatttttacaatatctatagaaatatttaaatctatcatactgctctacttttctatcagaatcatagctatatccttctaaatccatagaatttttttgagttatttcatcatgttcagcttttaattcaattaatttttttataacttctggatatgtagcatttcttacattagttttatcttttattaatgtagtaaaatcaaatgaacctttattatcactactatctattttatctatttcttccttcatatagttatatagcctattcatagtacaatctctatcagaaaataattgttctgtatcttgttcaaatatttcatgatttttatttattcttttttcttttctgtcaagatccttatatttcactcttaggaatgtaggtttctcataacttacctttattgtttcacctttaacctttttttcatattgaagaaactcttctatttcctgtggtatagattcaagaattcctgtctttacataatcaattgttaagcttccgattactgacattattttaatataattatctctttctttggtttttggtaatgaccatagaatacttatcttatttataactttacctattgaagcttccattccattacaatcacactcaattagtttatctatttgatttattttaattggttcttcctttttgttatccttttggggtggcacataattgttctcaaaatatattgtattagtcatttgttttttagccgcatcaactattattttattttcttcaccaacgtttggtattgttaggattctatcaccatcttcatccccattgccaagcctttcaagtgttgtatcatgtattgacattattattccatctttaatgtattggaattctggaatttcatcttgtattactgtgacaacttgatgctcattcgatacatgtggaaaacgaattatatcaacttcagttacattctctttttctctccaataattgctatatacatgatgtcttggaactactccaactacatcttgtctagttattgactgcataaaggctatcatatcgggggacatcgtttggaaatttccatctactttaaccataccttttaaagaattttctttgaatttctttatgtcagctttaattttgtcttgaatataatcatcatagaataaatttttattttttcttaaagcttcataatactttggcactctatccatatcagtttcttttaaaattggttctccgttagcatctgtagaatcttccaacaatcctctatattttaagaattcgtccacatctgtagaaatattttttataatttcaagtgttggtttacatagaactttaatttgttcattagtcaattctaatgattgtattggctgatatgataataatgctttctctttattctttttatttccccattttgcaatattaaaggttcttttatatgttgtagcatcgtcaattttgacttcggtatcaaattcaagattccatttatcataactatcataaaacttttgaaatttaaactggcttttggtcaagattgcatccactaataattcatcattctcattcattaactcttgtctatttccccaaacatcaataacatatctttcttctttatctaaggtcttaacatattcctttaaatcaaaagtatataaattacccttaactcctactattgctctaaattgaaaacttgaaggaatgtaattaattctttttttattattttcatcttttgtaactttatctaattcttttgaccaagttttagccatttctaaatctacaattcctgcaccatcaaaaggcattaatttaaattctttctcttgatctggaactactttaaatttaccttcttcatcttttattactacatcaaaagtttcagtaattttggttgtataatcatcgactactatcattcttggagtagatactggaatcgtatcactattagcaagtccaatataggcattatattttgaaatttgagggtgttccatatcctctggaagtccacatagtaaaatagtcatagctttatcatataatttttcattgataaaaattactttcttatttcgtacatttccactactagccaatattcttttaaatctaatgtgattaacttctataattccatcttcttcaatagttttgtatgatggaactgaaacagccacacaaattaaatcttttatatatgtataaccattttcctcggtgctattatcttcaagattcaatgttctaattattcttattaattcagtatcacgcacaattattttattgctattatcaattttttctttatattttttagccatattaattaaattcgttttatcttcattagatattttaatattatctgctttcaattttttctttatttcttttacagtatttttcattgctttttgaactttattatttgtattccatttaaatataaacataggaatttctttatctttcccattttttttaattgttttacatactccctgtaattctttttttccgttttctaattctactatttcttttacttgttctatttcaaattcacttaattttaattttgtcattctataattcatgttatttattccttctttctttttgtatttaataatttaaaaatcaatttttagttatgagcaatctttgattgtgaaataactaaatcagctttagctgacaacctcgtagagtacaatttcacttacattaatagtcttgtatatagaacataaatagtcgttactcgctcccagcttcgtaactccttttatgtttagctatatccgcttgttgtcggcaacggttgcctccaaataattattttttaagtcgttatcgttcagccttgtattttcaacggttaacagatttttaagctatttaaattgaccttttcgagcttgtaacacgcatggttaagccattcttacgaaacacatatatactaacctatatataatataaatagaaaagtaaaccaacttatactcaatccattggtatgactatgtttaaaagctataaaggtactaatatttaattatccaattgacttttttattacttccatcatcattttttaattgagattgttttagtcttttatcttttgaatattgtttaaatagttcatcttttgaccataattttgaccaattacttttacctatttctaattgctccataacatcacttgacttaacttttatccatttatcttcattttcttcaaaatgttcttttatatattctttgagtttatctgcatcggtttgtttccccttatcagctatgataaaatttttcttagtttctattccatatagctgtttttttactgtcattattgtattaatgctatcggtaaatacatcaaatattgcttctggttgtttatttctttgaactctttttaatccttgatacattgaactagacatatctgaaatcataagttcatatagttcttctttctcaaatccccattcgcttttacttttcttatttgtaaatacaaattttctatttgaagttatcaattcattatctggaagaataacatcattaaaatattcataaagaaagatataatatgcacttgtccatctataagtatgaatataacaacatattttcaaatccttccaatcatttttacctctcatggcttcaaaatttgaatatttgaaattaggataattttttaggtattcttctttttctgctagttgctgacactcaacatctttagataatattaatatttcttgatctgaatatttttcaattaagtattcacttatatcttttctaaaattttcatcaatatttttacttgaagtagtagttttgattttatgaaatattaatttagaatttgtatgatcaatttctcttggacaatcaattactttaaataatccattttcatacattttattgaagttagctgaagcatctaaccaaatattattatttaacatcaaataatcaaatttataattatatgaaaatatttgccttttgggattaattaagcatatgttatcgtcaatcgaatcatatgtaagtaatattccattcaataatttaaataaattttctttttggcattttgtttcgccacatttatatttatcttcaaataattcatttctaatattttgaacgccttgcattagttcctcatataacttatcaacctctttacggtcataatcacattcaactctatgaagttggttttctggtttataatcttcttttaataaagttaatagcggtttcatcaattgataaagtttttttgataaattttgttccgtaaaactatctaatgtagttaaccagtaagtatcaccttgagaaaatgtaaataaactatcctttactggatttatttcttcatcaataatcaatgttttatatttaagaaatatctttctatattcttcatgttctggtcttttggggttacacaatttaatatacatagcatgagttaaaattaatgtatttgcttttgcacactcaaaaaagttactggaacaattttcatcctttatttttttatctggtgtgtaaaacattgcaatcttttcttcttcatctttatttatatttttcgcaacttcaataccttcatctatgaatttacttacaaaaatgaatcttctttttttgtcttggataaatggattatctttaacaaatatgtaatgatctttaattgcttttattgtgttatatgtttttcctcctgaagtttcaatcgagtaaactttgaagaaatctctattttttccatgttttatttcactttgtaaatcatctaaacattcctgcaaactcatttgtttttttactgctaactcttccaaacttaattcccctttctaccaaactcctttttataattgtctattgctgtttcaatcccatcttggttcttgaatatgtatatcttgtaattaggattatttctatcaatatcgtctcttagaaatttgaatccctgtaacattagatatcctgctaacttctgtgtgcgtacaaatttaactaatggcacattttccatttatactgttacctccttcatgttcaactttgtctttctttgtcttatatatttataaaattgtaattttatagctttaggagataaggtttattccctattctcctatgtattttattgtcactgattacttctatactttttaatataaatctcttatcgtctgtgtttctatatttaatattttcagcttactttttaaattttcaaaagcatattcatccgccattttttctgatggtatacttctatattttgctacagcttccatagcatctgcccattttattggaataccatctgacatttttcttaaacgttcactatatttattagcttcatacctatatgaataatcccatttcgcatattcaatccttgtcattcctgatttttttaaattaatccaatgtccaacttcgtgaagaataacgtatgttgcgtatacaattgcctcgtcttcaaattttaaaaagaataagaaactaatatcattaagtacctcttttaactgccaatgattatatttattttgaaattcataatatttttctatatctacattagctaaatatacaccaagttcacttgtattataatcttttccttcgaccaaacaaccttgttgaaaatcatttttttcttcttcagtaagatgtttgcattcagcaaatttttcctcattgtaattatccactaaatgaatcggtgctaatttatcaacacctaatatattaactaattctgaaattttcattttattttccatcttaataatctctccttcatttcttcagtattttttaaatttattaatatatggttgttgtaggtttaaggaaggctacgaaagcctgtccttatttattaagccactctactatttcgatataattgcttttgaatcgttcttgataatccaatctgtatttcatgacccacaattggaactaacttattagtttttgtatgcttgtacatcatgtgatctcctttagttcttactttttcaaatccataatctaaagccaattcttgcatttctttataatcaaatatttttttatactgaatcttattattttcttcttgtataatttcatatttctttttatccgattctgatgctaatttccctgtatcatgaagaatttgcattaatatatctactaattcttctgcataattatcctgcatagatttaatcattatttctattttatttctaagaacattgcatcttttttgatatagtggtagttgccctctattcacatatactacagattttttaataaattctctttccaatactctcatatctttttcaaatttattaaattcttttcctaattcatcaccaatactaggcaattcccctattatttcacaccattctttttcattattatttaatctctcttcaacatttttaatttttgtactattagtctcatataataagttgtaagcacgattatagattgaaaagaatttatgttcttttatttctacaaatctaataaaaaaatcaagaatttcatcaacatataatttctctagcctattaaattgtttaatccaattcattattcagccacctcggtttcctcattaatcacaccaaaaacttcagttatttgttttattctactttcaacataacgctcatctatctcatttttacatgaagaacaccattttaatttttcagttccacattctttgcaataagcttcatttaaagaaggtatgtacacaatttcatctttatttgttaattctttaaaacattcatcacattttggattactcacaagagaaaattttcttagttcctctttattcataatcacatagcaagcacctttttcattttttaaaattttcaccatattattttcctcctagctttttaattattttttcattttacttgagttataaataatatgtatgttagaattaatttatcgttttgaaaaaaacatacatattaattacatattaattacatatttttagtaagtagtttaactgtataaattaaaagatattcccgtatcttttattatgtacttgtttgactacttttttattttcagcatatttaccacttccattcactctatttttcacagaatagattacattttaagaaattcttttctattttttcttaacttttcctcccctgtaaactaatattattacattatagattgaaagtcaactattttttatattttagatgtattatcactctattttatatatttttgcgcaaatcatactctataatataattcatgcattataaatatcacaattgtattttattttcatttaatatataatatatttacattgataatgtaatacataatgaagggagataatttaaatgccagatattacagttacaccagaattagcttctattataaagaaagaacgatctaatgttactccacgattatcagcaaaagatttaagtacagagataggaaaatcagaaacttatataagcacattagaaagaggtaatataaaaaaaattgatgaagatacttttatacaaatttttaagaaaatcaaaaatgtatctgaaaaagaatttaataagtacttggaaaatatatttaaggacggtcttgcaactagagaattaacagatgaagaaaaaaacaaacaaaaatggatgtatcaaattaattatataattagaaaaatacctattcctccaagtgtagtagattttattaatgaatcattaaatgaactgcaaaaaacacctatagatttaactaataaaattaatgaaaacacatattgtgaacacaaagaaaattatgaagataataaattatatatctcagataatgggggttggtcttataaattcaacttatctactgatgttgttaccaaaatattatctagagaaactaaatctattaattacattacaatgctaggtataatctataatatattcttattaaaaggcgaaaatgatagcaactcctcagaatatgctatgaaatttcttcaagaacacaaattttatgatttagaagaaattatgaatgcaagacaacaccaaaaacataaagaatcaaatacagcaaattctgatttttcatttgaattaccaaaatatgagttagaatttgatgattcattaaataatatttctaaatatatcaaccaattaagagatttaaaaatagatttagcatattcagttgtaagaactgccgaagaaaatttaactcaatataataaagatggttttattgatatactctatactataccttttggaaaattattaaaagattgctcaaaagaacaaaagcaggaattcttaaataatattctcaaattaattaaagatactaaaaataaatccaataatgattttaaattggaagactaggcataacaacctagtcttttttctattatgctctttgccataattccctgctaccgtctttataaaacatccaaaaacaatcccagttcatgttataaactgtatcaacttttttactttcgtcctttacaaatccacgaatattaactatatttttgcacttagagtaataatcactggcatttttgaaattatcttctctcatgtctatttgcatttcatgatcttttataatcaaactgccagtccagtcacattcatcaagatacttccttgcaaatatttctccatccgacattcttttacgcccttttaattcaattgtctcattctctatatgtatgattattgtgtcattgttttttatttctactgtagattcttcatctaaatcagatactacatattctataagtcctaaatcttctgctaatacaggtgtttgattattatataagattactttatatttaccttgctctaatttgcttacaaaatcacaaattttattttccatttccattaattccttactaaattcattttcatttacaaaaattctttccataattaatacactctccttaaaattaaattattataataaagcttcaatattgttttctatccacatttttgacactccacgcataattaaattatttatagaatcattaattttacctatttgctctaaagtaacattaatattattttcattggctgcttgaattattagcgaatataaatttaagctcattttataatcccccttgattttagaagtaacataagctacaataaaaattgcaaaatggactggtggtagcatttacgttactgcctttctttatttaaattgtattttcccacctctataattttcatattctcttcgtgcatcctccattgtcatttcatcaatagaccatctaagaccatttaaaaatttatctaattgtttagaatcacattcaactattctacaagcacgaattatataccccttcatagtttcattaaaattacctgaattaactgtattcatttactctcacctccaccctaataatttttgttctatgtcttcatagaaatcctcagtgtagttcctgctactacaattgataataaaaggtatagattttttatgataatttcctgtatactcttctttagtttctacatcaacattccttaacagaagtgcttttacatacccatatacgttattagctttatttctaacagcatatttaattgtagatacaagtttatctactttattattgcaaagctgtaatagactcttagtttggttctgagtgaaattagttgcatctattacttctctttcttctgatgttaattcttctatagaaacttgtccttctattgtttttggaggcttatttccatttttatcactattagttgtgttaatgaaattttcaattccaataatgtagtacctgttgttactaaattctctacttacacgtatcaactccttagattccaaatttttaattgtcctacttattctgttcttagaggtagtattaaacgcctgcatgatttgttcaaatgtaagaaatgaatatccatattgtgtattatggtactcaaagaataactctagcatatactgctcattgatttttaagtcctgagttcttatatattgtctaaattttataaagtctttacttacacccattccttactacctcctttttgtttaatgttgtttcatgaagtttatatattcataataatgtttcatgaaacaattgtcaatacttttttcaaaaaagttatatgaagtttcatgaagttatagtataataactataaagaggtgattgatgtggaagaaaagtctaaatatagacgtgttgtgaatagagaacctttctctacaactgtaaatttaaactataataatttattatcagagttaagcgagaaaactagaattgcaaaatcaaaacttactgatgaagctttagaattattattcgagaaatataatatagattataaaaatgaatccaccgaagaaaagtagttaccttagttagtagctactttttttatttacactatatatttgtagttaatatatacttatagtaaataatatagaaaagaatagtagttaatatagggtatggttttattactttagtggactggtcatgtatttgattgatacttcatgttacatttgtggtatcaaaaaaggactaccttttatagttgggcaatccttttttaattatatttgttttataacaataactacatcataataaattccattaaaaacacacgacttataaatgttttctattctaattttcccaaattgtaattgatttactttagcatcaagaatcatcaattctattttatattcagctttataagcctctaattctccatattcaaattcattccctactttaatatcctctgaatttggaatttcatatccgtttactgtatcttttctgtacatccccattttttacctctatctagtttatttttttaaatttaacacttatactatcccatttatcttctgtcccaccacctgtacatctttcaattactttaattttaacattttttatatgttgataaatttcaaaatctatttctttaccaacgatattttgaaattcagtatatttatcagttggtatatatgcatctaatttataaattccagcatctacttcttttattattattggtcttaaaggaatatctcctaattgcccatcaactttatttttaaaatgttcttctcttaactccatattattcttgtttaatatatctagcactatatccccttctttaaaattatctctaaagcaattaaaaattagttgcattgtgctttctacatctctatctttttcaataaaaaaatagttttctacattgtagttactataattattagcttctctattattcacaaaaggatatccatttctatattctaataatcctaaacatttttcatatttatttctttcatctagtattaattcaagaaaacatctaaactcttttgtatcatccaataatttttgtttattattacatctgaagctactaaatttcctaccattatcaaagttttcttctaagatatattcccattctctatttttactacgctcattagtagtcatgcatacttttttattatgtgtcccatcgtcaaatggatttcccgacatattctttcctcctctcataaaatattaatcagcgtaattctcctgatatatattttttattttatatagagtgtatatacaggattaactccactatgattatatattgatggttctatattttcaaaatcaattgttttattttctaaatttaaaactttatgaaacatattcctttcatcatctgtaaaatttactacagcagttccttgtatcaatctagcttttaaataatatttttcattttcttcccacaattctacttcatatatagcaggtatattaccactacaccaaattacttttttaccataattaattattaattcttgtcttgccatttatatctctccccatgaacatattaactagcagttttataccagttatagtttgtttctacaaattaatgtaatatcctccttattattgtaattcattgcaaaaaaataaaactactgtaataaaacagtagtcaatatattaatattttatttgattggtttttctttatattgttcaatccagtattgataataggggttattccatgttgtcccatcataaaaagttgcatccttaacacacgcgtttactgttgaaattccatgtttttcatctaacttccatcctacacctgctccaaattgtgctcctgaaataagattaatattatctgcatttccagtaaattcaaggttaccaccagaataactgaattgagttttaatttttagtggatatccattactatcataagctaaaaatccaacattcatatttttgaccgttttatcagatttgttagttacaaatgcttgtagcatatctggatagagcgctttccattggctattttgctcagataccctacaactatcgacaattaaaagttgttctgactgtgccttatttattttttcttgtttctctttttctttaatttcagttaattttttattatattcttctaacttattagttatatcatcattattctttactactgaatttgattcagtaagcaatgaaacggccttatcatactcattattatttgcgtatttttcagattcctccataattttatccttatatttacctttgttatcttcaattttcttttgagcattatcataatttttatcttcttttatcacaatactatactgctttagtgcatttaaataatcttcgtcttttaaataatcctctgctttattaaatgatagtctagaattatttagactatcaatttcctcaattacatcattaatgtttgataggctcacgcttaaattcttcatattttcaattttatttttagctgtatcataagtaatgctttcatttttaaattctttctctatttttgaaatttcaccttttagaaatatatttgctttatcttcataatttttatttcctttaatactttcattaaaaattgttgttgcttttcctatactattagtttttattgccatttcaaacccaaatacaggattattaaataatataatgcccacaataaaaattacaaatacaatactacttgctataattccatacttttttcttttatttagtccgttaaccttctcttttaaatttttaaggtaatgatgttcgctttcatttaacttcgtgccacaaccattacagaattgtgctccctcgttattttcatgtccacattttttgcacttcattattatttctcccccttaattccatatttaacataattgtactatcaaatctatttattaacaaatactttgttgcaaaaaaataagactaggattgctcctagtctacaaaatgttattcaattttagctcctatgatttgaataataaaatctttaagattaacaatctctatactttgaatgcccgcattcaccggaaccaactgataacttgtatattttttatctttgaattgttcatcatctgataaaaatttatcattcttatttatttttaatttcatcttaaaatcttctaaatctgatattttttcttctcctttaaaatctatatcataagctataaatttatatatacattgaaatgggtgatttatctttttgtgcattgttccttttatttctatgtatttaggactacttaatagctcaacaacacaatctattccctttcctgtattataatctaatatttcaaaatcaaataaatttggatattgataaattaattgtataaataacacaagagtttcagattcagaataaccagttctacctttacttggttcttttaatataacaccattaggcaagataatactctttttcttttttgcttctctaaatctattccctaaattttttttctcttctttaatagacaatgattgaaactcaagtctttcaaattcagatcttttttcaatagcatcctttatctcttttttattaaatattttattaacttcttcttttattatatctagtttctccatatcagaattatgtatagaacttctatttgctgtcaattgaaaatcgtcacagtcaataaacacttgcatgaatgagtatactccttttcctccttcaagccaattgtcaactttttcaaccggcactcctcccttacatgcccaaataccatatctttcactatccgtatgttttatttgagtcttaccttttcctcgtcttgtcaataataaatcatacattctcttagtttcataaccttctatgcttataatatacttaaatgttgtattattactgcaagttacttctccttgaaatttcctactataatattcataaaatggcttattactttcgatttttttaatatacgatctcatttctacatctctatatctctctggaggaaaataatgtcctaaactaataacttcatattttgtattattaattgtttcaaacactaattctggatcaaccagattattagaattatattctttttcgaaaccatttatatctaaccctgctaaatataatttaatattcttattttttagttcttcatcaaacattgtataaatcgttccaaacactgtataccatttacaataatctcgtaaatttttatgatttaatttaatttttgtatgctctgttttaaaatgtgaatgtcccacaattctaacacaaaaccctttattccaatcattaggtaaacataaatctaattcattagggtcattaatgaaatcagagtattcaatatttccactttcttcaatttgtttaattggatttttcaactctactgcccagcaatcatcttttgttttggaacttatctgaacagtatcagaattaaaaaatatttttgacccatggcctttataacctaacatcccttttataggaactctatttttatcaatcttagatgagtttgctaaatcaaaaaaacaactcactttatttctttctaaaccttctccattattccacatatcaattaccacttctgatccaccgagttttcctctttcatatacacgacaaaatagtttatcagcttttccatctattccgttttgaaacccttctctaaacgtttctaatgaatcagtaaaatctgttataatttggtataattcatatgatttattaatattaatttctggcatattttcacctcactatataaattgattattgacatatttacttagttataaactaatgcaaaaaaataaagctaaggagttttaattgctcactccctagcttttaataatatttctaactacttgttttaataactgactctatttttgctatatctacacaattttgcttaacaacgtttttcatgttcttttgtttttcttccagtttattaatactaatttgaatcttttttaatatttctaaaacctcattgtctatggatatcacctcactattgtaagtatggacacattatggtaattctaatctaatacatacaaaaaagacacatacaactcgtatatgccctttataatatatattaagttattattgttttaaaatcatcataggtgatacatttgaacccatttcaactattttctcatcgtctaaactttgtaaataaatttttgtaatatttgtgtttgagtgcccaaccaaacgagaaatactgtatgaatcaacattttgcctcaataaaaactgacaataataatgccttattgtatgaggagagcatctcagttcctctctaacccttgcaatcttacctgtttctcttacaactctctctactgcttctattgttagcatattccctctatatgataaaaaataataatcatctactatatacttatcttttatatattcagttcttattctttcatatttaattaaaacctttttgagtgctggacttattggcactatcctttctttattgcccttaccagtaaccttaataactgtatctctaatatctaacatttttaatgtacaaagttctaaatttcgtattcctgtttcaaaaaaagttgatattatagctttatttcttgcattataaaagtttttataatcccacactttcaacattttctctgcttctttatcgttaaaagtatttataatggtattcttctgtctaagccaaccaatttttttcattatattttgcttatcagaaatatactcttctttaacgctatatttaaagaatcctcttaagtattttattattgaattaatataaacttctgaacgtcctaatccttgtaaataagttatatatttctttaaatacatctgtaacaaatcttctaattcctcaacttcaaattcacttttacagtaatttataaactttagagtggaattaaaacaagtttttattgttctttgactataatttcttacttgcatgtcgtatttatattcctttaataaatctacaagtaacaaaaaaacacctccaatatcaattaactatgtatatcgatatcgaaagtgtcaatatttaataagtataccttaatccagagctttttataatttaaaagcaaccaaaaacgtactattcatcccatccttcagggaattcagcgttgtggtaaacttcttgaacgtcgtcatcgtcatcaagtaagtctaacatcttttggaacttcttagcatctgcttcatctattgctgtgtatgtatctggaatcatcttaactgaagcttctaagaattcaatgccttgtgcttctaatgcttctctaactgttccgaactcttcaggtgcagttgtcactacaaatacttcatcttctgatgcaaaatcttctgcaccagcatctaaagcaatcatcattaattcatcttcatctttatcttctttttcaatgacaatttcacctttttcttggaacataaatgatacacaacctgatgtacccatgtttccgccgccttttgtaaatgcacttcttacatttccagcagatctatttttattatcagtaagagtttcaactattacagctactccactaggtccataaccttcataaactatattttcataattaactgatgataattccccagatgccttcttaattgcttttgaaatagtatcattaggcatgtttgctgccttggcttttgcaactacatctcttaattttgcatttatatcctggttagctccaccatttttaacagccatcacaatttctttacctatcttagtaaaaatcttacctctttttgcatctgtcttgcccttttttgcttgaatgttatgccactttgagtgtcctgacatatgttttcctccttactttattcgtaataattatctctatttttataaatatatattgcaattaagttcctacatcttagtcttatttcagcacttaacttactaaagttttaaatatagattcatgttaacaatatatataatatctatttgtaacgattcttattacaagttattcatttaattaattattttttctttaaaatacaaaatccaacagctattataccacattttacataagttcacaattatcctatcaccaaataattctctataagctttattaaaatataacattatattacagtcaagtctctagctttttaacacaattttggatctaatccattagaatttaaatgaaaatttatcattatagcatatataaacctaagttctatgttatagaaaatttattgctaaaactacattttcactttgaaataaaaacctccagtagtagttaattatgaataataaattttataattagcttgtattctcattcttttacgaagtatctcgttgagctttaaatacgtaactatagacatcgcaattattaattagacttattctgtgaacatatttccatatttactatatataaatgattatctttcgttagaaatcataaatatatttgtggagaaaacatttgaaaatgagctgttaaaggttcttaagcagagaacccaaatctttgatttggtgagaatcgcttactccctatataaacttaattatgctcctgttttcttaatatatcttagtatttcaaaaaaagtattagctaggattatattttagtgtaaataccccaacattacctaaaaaaagagtataactaataaaccaatgggaattggctatttttaatatgaatgcttataggaatccatatactacagtagtcaatcctcccatgtctaactggatctaagtcctaaattcctttgtacctcttacttgtagttggatggtgattaatgctcagtgccctggtcttatgccataaagtaagtgttgcatcaccttaacctagctattatttttttataaataagattgtttagaataattatgctgctatagataaaaactgattgtgttccaatattatagtaggttcataatttgtatttgtttttgacattccaaagaaaactcttaagagtttacagcctactgctattaaagattgcatcccttttagttgattattacttcgtgtcgtataatgcttatgtagtgccttaaattcttcattagcattaatgaaaggtagtaaatacttaaatagtattgcacgaaccctcgaatttccacgtttagatattgttgttttacctttcttttctcctgattcacttattttaagatctaagcctgcataagctaataattgttgtggaactttgaaatttttcaaatctccggtttccgctaaaagcgaacctataaacattgaactaacacctttaatttcaacaagattttgagcataatctatttttttcagtaattcattaacttcattttctataagaactaacatttgatttatatttaaataattttccagataatgttttagtataatcttctgcatttcagaacatttatcgagagctatagatttttcagctatctcttttaaaagctccacatattttgatatatttcctgtttttacttcttcttttatagtacttactatttttttagaattagtatttaaaatttctctctgtgttggaaaattcttaagaatagctattgatgtttttgtattccattttttaaacaatagcttgtattctggaaagttaatatcaagccatctttgaattttattatcaagcctaactttttctttgattttttcttctctaaatcttattagttctttcagatcagtaaatccactatttcttttgtttatagttgaatatttaccaaataaaattgtttttgcaatggccatagcatcaatatgatcagtttttttattctccattcctagcaaatctctcatagatttaacatcagatgcttcaactaaaactgccatggaatttgatatcttatctacaatatagtcttcaattcttatccaataatgtcctgtaggttccattccaatgattgaatcttttaatttataagtagatttaattttatttatccacatatgaaataaatttaacccttcatagtcagtagtaaaagtaatagctttactaagttctttaccttcagaattaaatgctctcgcgacggagttgtatttagcaacatcaattcctataattaaagttgacttagtatagtgcttaatgatattatttgtttgcattaagatagcctccttgatagttatttaaatatgattgagctcatattttgattctaacagtaggctatttttttatcaatttctatttaagttcattacaggaatgctcagtgaacgaatgtgagtcgagtttccgctaatggttgttccattttagcttgtgaagtgagagtccaaaattttattttgggttctcgaacttcctcagcgaatgtaatgagtcgagcttccctaggaaagttggagcatgctaaaatggctacaacctgctgcttagaacattcagcgatattttcatagcttttcggaatcaaaatatttatgatttcggtaagttaacgcataaatataattttaaaattggatgtctatatataagcaacgaaccataatgagtatactaattatatcctcaaatataatctatttccttctttaaaatatatatcctcttcactttttctaactattacttttccattagtaacttccacaatctcgttttctatatcttcagccattaacttttctgctaatatatttacaactactttatcgctgtattcagtatcttctatatgccaagaattttgaccgcatgtatattgaacttttccaaaaagatcatattccatttcaaaacttaattttaagccttcaactttttctacaactccagctgattttattgcgatgctggcaccttttgtataagctctagtcaaaccacctgcccctaaaagtattccaccaaaatatctcgtaacaactactgcacaatctgtcactctactttttttcatcacttcaagaattggtattcctgctgttccctgtggttcgccatcatctgagtacctttgaatattcatgtcttttccgattatatatgctgagcaattatgccttgcttgcttgtgcatattctttatctcatttataaaagctttagcttcctcttcattttccactctttttgcataaccaataaactctgacttcttttcttcaaatctatcttcaccaaagtcttttactgtaatgtacgacatatcaatctagctccttttcaatcttaaatcagaatatatagtacgcatattgatttaaaacaattttatacatacttaaataattagaatattataataccttcctatagtacatttttactgcatattctgaagaatatatattgtatagaatatatattctaatattgtttaaaatatatattctaaaattcttaagaatattagaatattaacatgaagtgaaacttagcctgagagggaatttttaggtgccccttgatggtaaatctcccactaaaggtagttgaacttatctaggatcgtgccactgttatctcccactttaatagaatatgggaatattacagctactagatatccgataaaatctctcactagttaatttaacttgtcatatctaagttccttagccaaaattaattcttccttaagtattttcatacctttctcaatcttttccttatcggtttgataaaaggctatcctaaaagaatcttgtccatcattttgtgatgtaaagaacatagcccctggagttatatatacatttctctttttaagttttataaaaagttctttagtattaatcttaaactcatcttttaaagttatataaaaattcaatccaccttttggatcattgtaggttaacatatctttaaattcactatctagaattgtttttaaatgcgtatacctttttatatattcatcatttagatttttaatattctttttccacttattactcgaaatatataattccaaggctctctgcattaaacttgaagtagttatatctgtattgtgctttgaattttgaagagtttcactgaatacttctggtgcaactaagtatcctaatcttattcctggaagaaatattttcgaaaaactttttatataaattaccctatcatttttatcaagccatttaaacggcacatattctaatgaattttcatatataagttccgataaataatcatcttcaattatgtaaaaatcataaatttctgcaaggtctaaaattctcttcttcttttctatactataacttactcctgttggattttgaaaataactcattgtataaaaacattttatttcgtttttctgtaatatcttttcaaatttatttaagtttattccatcttcatcaattggcacttcaaacaaattaacttttctccatttaaatactgataatgctcctacatatgttggcttttcaactattatattatcatttatatttaatattcctttagatgctatatcaattccttgttgagcacctgatataattattatgtcttcatcgtttaatttattattccaaaatactttatttatagtataaataagattagtatatccatttctgttgtctgaaagtaacgcatttgctccatctctttctaaaacttcatttataattccttttaaatcatcaatagggaataacacttcccctgtagtctccccagtaaaatctattacatcagttaaatctcccatggatatcttttttaatgcatttgaatattcttttctaaaatttgaagcaacttcttttctttttgcataactaccgcttcctaccttttgataggcataaccttctgatttaagcttattgtatgcactaactatagtgacattgtttacgcctaatttttttgacagctctcttatagttggaagtttgtctccttcttttatctttcttttatcaattaaactttttatataattagctacttgaatatacttagggatatcattatctttaaacgtaaaatctttataaatatccataaaactctcctttaattgattgtaagactatttttttgattgtgcctcataactcttgtatgaatacacattctctctgactaacttttcattagaaggcaaatccaaatttttagtatctttcattattaattttctcttgtataattcctttagtatatcttctatttttatattaaattccttgaactcatcactgttttttatttcaaaggagcttaaaaatgcatttttttcatataaataatccagtaaagacttagcggcctcatttatattttcatctagaaaattctcgatataatctacagcgttttgtatattttcctttgcgcatttatcattaaacaaattatcaactataacattaaatttattatttaagtttatagccatttttactgcgtctttacttacagtgtatccatttaaatttaaatataacttagcaaaactatctagagctcttattaaaacttcataagatgtaaaaacactattgttttgcaaatactttttagttactctaatatcttttataacattacctaaatacaccaagttccaagtttctctgtatttatctaaactatatttggctttattaaaaatgctctcaatttcatcatctcttgaaaatattattttagaagatattagtaagttccttataactcccttattcccattactttcgtatagttctaaaaagctttctttatttaggacctttatatgtaccggtacccctagtatttcagaatatatgtctctaacattatcaaatatttccttatatacaatgaataaatctatgtcagattcctcccaaagatcaccgctaattatgcttccaaatgcaaatatagccaacacttttttattggtcttcaatacatttattaacttttcagaggatttctgatattctaatatggattttgacacttaatttcaccttcttttaccaagacattgtttactttgtttatcagatggctatcacctaaagcatttattcattttaactaaaaaataacagttgcaggcttcttgagatcttgccttttaaggcataagtccaattaaaatttagataaagcctaatcacatctgaatcaaggttttactttataataaacttactaacattataacgtaaagaaatatttatttaaaggtgctactttacagtactactcaaatccataatattcgaataaaaaaagattcttaaatataatatctaagaatcttctgttctattcacaaatggcggacaatctttatccattttctttatctgatgtatgtaaatcttcaaacgcctgcttaatgactctaatatctgattaagttcgtgattcatttcataaacaagctccaatgattcccttagttcttttctctcaccaaaagtattactttgtattacctgtgcaactcctgctatatttaaagatgatatagagataaagtataatgcatcaagtaaaggacgtacctctctagtaaaataagttaaacttatctgctcgactctaattgaagcaacattagtttgagctgcacttatttgtgctattgctgtactcatatttgataattgcgttaatacttgattctgcatatctcttagttcattatttaaatccgatgatacattttcattaccagcggcatcagtcgcattagcacctgtacttccctgattcaatgccctctgagcagttcttagggatcttgcgcttctaggatctaattgatttaatggtccacttgtttccataaactatagtctcctataacaattcttatttaagtatattacggaagaactatatttattattatatttaatcagttaaccttatatcttagcgtattcctgagttttattaaaaacttcatcatctacttctgctaccatatatgttccattatctttatattcttcttcaagtattctagcatttctatgtaagaaagattgaatatcgcctttctcataaggtattaaatactctacttttctataattatatggcaatttttcctcaattaaacttagcaatttatctaaatttattttttctttagccgaaatttctattacatcaaaatttcctactgcaaattctttaattcgcgctttttgttcttcagtagctttatctattttatttaaaactaatattgtttctttatctatagccccaagctcacttaaaacttcatttacagcattatattgatctattgcactatctgaagatacatctattacatggcatagaagatctgaaaatataacttcttctaaagttgatttaaatgcttccaccaaatcatgtggtaatttccttacaaaaccaactgtgtctgtaagagttattactccttttttacttagagttacagctcttgttgtagtatctaatgttgcaaaaagcatatttgcttcaaatactttttccttagttttattttcattttttgctgccaaatcacaaagtgtatttcttaaagttgattttcctgcattagtatatccaactaaagatactttaggaatattttcttttcttctcttttctctttgtacttctctagttctttttattttcttaagctcatcttttaaatcatatattgtttccattatatgtcttctatctgtttcaagcttcttttctccaggtcctctagttcctataccaccacctgttctagataatatagttccgagtccctgtaatctacctaatctatatttcaactgagctagctctacttgaatttttgattctttagttttagcccttgttgcaaatatttctaatattaatgttgttctatctattactttagctcctaatgcagcttctaaatttctaacttgagatcctgaaagctcatcatcaaatattattacattagctctttctacctgcctcatagaagcgatttccaatactttacctcttccaataaagtatgctgcatcaattttacttctgctttggaatacagtttttaaaacaggtatgttgcaggcttctgtaagctctgctaattcctctagactttcttttgtatcagaaccaactaatattgctttttcttctgtttcctctatgacatcattgttcttaattaaattttctataaatcttatcctatctaaaatatttatagacataatttcatttaaagaaagattacttttttcttctgtttctaatttattgttatataaactaagcattcccaaagaaaaatctattatattaccatctgttatagccactgatataattgcatctagctttaattttaatagagctgttaaatctagcgctgaaagattacaataaccatttggatgagtatgtataactctaacacctgataatctcttttcatctatatctattattggaacctcaacagatgtagaatctccaattgcaacagatgtgacattaccttttctatttatagctacactgatttctctttcaataaaactagaaactctagaaataatatttaaaatttcttcattacatatttcatcctttaaatttcttatagaataaatattctctaactcttctattaaagattttctaattccttcaatatttccatatatcattaataaacacctcacattagccaagggatatttaagaaaataacaaaacagtatgtttatctatctcgtgtcatactgcatcgttaggtttaccttgatagttctctatgcgttaaaccttcctactttcctgacgcaaaatatacatattagaaaagagcctgtatgttgcacataagaacttttcattacatctttaactcgctattttcctcatatccctatcttgacaactttcatataattttatactattaattcattaattataactttaataatctacacttgacaatatacattttataaatttagagtaaattatcacataacttgaaaaatatgcaacaatttataaatacctatgagtattttatctgtaatcatatatattgcaaaaataattcttcatcataattctaaaaatattgcaagaattttagccgtaattgtgaattgtgaaatgtgcattgtgaattgcaacataatatattatgtattctaaaaaattaaattcatcaaaaataaacttaaacgacaagttattgtaaaccaaataaaatgaatcatattattttagaacttatatgctaataataagctgtgtatttttaaggaactgtgtacatttgaaaaataaatataaaaggagttttttaaacatggaagataagaaacgtaacattcttttttctgaagaacaaattaatacaagaataaaggaattaggaaaaactattgctgaagattataaaggtaaaaaactttatattttatctttacttcgtggaagttttatctatgctgctgatttagctagagctatcgatttagatgctaaaataggatttatgactacatcaagctacggacatagcgaaacatcttctggatctgttaaagtagttaatgatatctctgataatattgaaggatgggacgttcttatagttgatgatatagttgatactggaattacaatggatttcgtttataattacataaagggtttgaacccagcttctgtaaagacttgtgttcttcttgataaaccttctcgtagaaaagtacatatacaacctgattactgctgttttgaaattgaagatgtatttgtagttggatacggattaaactacggtgattattatagaaatgttccttacgtatttaattgggaataaaaaaagaacctcacggttctttttttattccaattcacaattcacaattcacaattcacaattcacaattcacaattcacaattcacaattcacaattcacaattcacaattcacaattcacaattcacaattcacaattcacaattcacaattcacaattaaaaaaatcccttcgggatttttttaattttccgttcttaaatttcctacagaactttgttccttaattgcaaattgtttaaatctttttatcttgtcaataattatgatatcaaaaaaaaattaggatggtgatttaaatagacgctaatatcattgccactaagtcttttgattttgctcttgatataatagatttatacaaatttttaatccgtgataaacaagagtatattttatctaaacaattattgagatctggaacaagcattggagctaatgtaaaggagggtattcgtggttttagtaagtctgattttagatttaaaatgaatatagctttaaaagaagcaaatgaaaccgagtattggatagaattacttattaaatcaagtaccattgagcagattattggaaaccctatattattaaaatgtagagaattatgtaaaattctaaatagcatagttaagaattcgatttaaaaagaaataagataaggcgaagccttgtcttatttcttcttacattgtgaattgttcattataaattgtgaattgctaattattttgttcatttgtaggaaatccaagagttgtatttggtatttttccaactatgattgtgtctgaaaccggaacttgtgtgctcacctcagcatcttgattccttagtggaagtctaagcctgattttagctgtaacatttaagtatatcttatgcctagtttgattaattccagcactttcaaatttagattcataacttgtacttatatttcctataggctctatctcaacacttatcttagggccaacattataaaaggcacttttatcactcatccagcctaaaggaacttttattgcattgttcttcatatcacttaattctttattacattctgtagacaattcagctgctatataattcaattttccagtatccgcttgaattaaaattatattgccttggttgtctttttcaatttttaccatctcatcatacttaaaatcttttgataaaatatctacactttttttatttattatatctaatgtttgggactttgccattattgtcgctatttctgtcacagagggcatgaccctttgatcaaaaaacattacagttatgtttaaaatgacaataataactataataagtactataaatgatatgtatttatgcgtttttcgtcttgtataatattgcattgtcaacacctttattattgagttatttatttaatcatactataattatgctataatgatatagaatattattaaattatataccttgtaattttaggaggataaaatggcaattaatgataacgtgaaaaaaccaaacaatgccacacgaaaaaaaaagccatctaaaaagaagaaaaagaaatcaaaaaaaatttttaagggcatatgttttggttttatattttgttttcttgcaatgttagtagtatgcgcaggttatgcttttgctattataaaaactacgcctcctctaaatgtcgatgctgtattaactttaaaccaaccttccagtatatatgatagtgctggggactttatggataatatgcagactgatgaggaacgttacgttatagattcaagcaaaataccatctaacttaaaaaatgcttttgtatccatcgaggatgaaagattctaccaacataatggaatagacattcagagaattgtaggtgcagcttttttagatgcaaagagatttgttactggacaaaaaggactacatggagcatctacactaactcaacaattacttaaaaacacaattttaactaatgatgtttctattgaaagaaagataaaggaagcttatttagctattaatttagaaaaagcattaacgaaggatcaaattttaacagcttatttgaacacaatccccctaggtggccatgtgtatggagtggaggctgcatctttattatattttggtaaaagcacacctgatttatctttgattgaatgtgcatatctagccggaattactcaagctccaagttcatatagtgcttataacaatcaaaaggatccaagtccttatattaatagaacacttactgttttaagtcagatgcacaagcttcaatatattgatgacgctcaatatgataaggccgctaacgatgttaaaaatggtggtctagtatttaaatcaattaaaaaggactatagattaaactatgaatggtttgtatatcctgctgtgtctcaggtaaaagaagacctaaaggaaaaatataaatattcagatgaagaagtatctaaattaatggttaatggtggtcttaaaatctacacaaccatggataaggagcttcaagattttacccaatctactttagataattataaaaacttaggaattaataacaaggaaagctacgataaagatggtgttcctttattacaagcgtccgcaacaataatggattacagaaatggtcatgttcttgcaatggttgggggacgtggtaaacaaggtccgcaatcaataaatagagcttataatgatttgcgtcctatcggatcatctacaaaaccattaacggtatatggtcctggtatagatcaaaaaattataactgctgcaacacctataaatgatgcaccaatacctcctgaaatcggaaagaagtattctccagcaaaagatggtccttataatcctctaaattctcctaatgaatattcaggacttatgacctcaagagatgctcttacgcattcaaagaatactggtgcagttttaacagaagataagatcggtatgaaaactggtattgaatacggtgaaaagcttggtctaaagtataacgctgcttctaagtcatcaatggcagctgttgctttaggacaattcaataactctccaagtgatagggacggtggtaatacgtctatcttagctgctgcatatggcagctttggtaacaacggtatatatacagagcctatgctatatacaaaagtagttgattctacaggtaaagttttacttgataatacttcgccaaaacaagcaaaagttttttcaccacaagctgcatatattctatatgatatgttaaaaggaccagtaaatgaatacaatgctactggtgcaaagtggggcaatatgcctgttgctggtaaaactggtactacttctaattccacagatttatggtttgcaggactttcaccttacttatcagcttctgtttggattggatatgataatcctaaagaactccatggtagttcaagtgggtgcgctgttgtttggggaaaattaatggctaaagctcatgcaaagttagaggtaaaagatatagaagagcctagcggaatagtaaaagctagtgtttgtaaggattctggtgaactttcaacccttttctgtaattttgaccttagaggaagcagggtttatgaagaattattcatcgatggaacacaaccaacttcaaattgtacaatacactctggtactaatcgatataattttaataacggatcttcggctaatttaaaccctgcagataataattcaaattcgggtaatgccccagcagattccgagactcctcctgcaactaataatgacgcactagctccacctgtcgttggtagtacggaaccttcgcagaaaactgaaaataataatgagaataataattcaaattctaataatgccagcactggtggtaacaagaatactacacataattcttacggacctggtagtaacaatcagcatccaccaacaaataattaaatagctcaagtatattatgaatttgctaaattttaaatttctataaaataaaaatagaggataatcaaatatcagattaatcctctatctttttatttatttgtaataacttctttttcagcgccatcttttaatatatttaaaacatcaccgctctcagcgctaataaaaaacttccaactaatatttgcacccttatcatttttaccatctatagttacaatgtaacagacttcatatattggatttttttctttttccattctattatctgcataaactaaatcagtttcatctttaactacagtttctttattgtatttttcaaaagaatccacagatattttttttgcttcttcactagaaatatttattacaggatctttacattccctttgcattgtagagttggaatacccatctagaaatccactttctttatcaatatttaattttatttcatcgaaataaaacggatatccattcttttgctttgtatatatgaatgagtaatatggcagctttttagcatcctcattgctattaattgtctttaagaccacttctccatcatatatgttctttaagtacccttctgctaaagttctagcatcttgtaaattaatttttgttgcatttgctggaatttctttttttgcaaaacctattacattattatctttatctaaatctataccaaaaccttgagttactatacttctatgaactaattcattctgactatttagcgtccttcttctttcatattttatagattctaaattttgttcagtatttattgcattaattgaatataacctagccataaaatccttagatgccctaatatcttttgcacctggaccaatcagattatacagtattatgactattattatgatgagacaaactaaaattattccccctataatactcgctttccttaacttcattaattacctcccttgcagacttaacattgctattctattttattataccatatttttatactagtcacattcaaaaaaataacaattccatctgttccaaatgtgctaattcaaaaagtgagaatcgaaaagtgatgctccaaattttacatttggtaagcagaactttctctatgagcatttcatatttcgttcttcgaactttctctgtgagctctttttctttgaggctagcactttgggtgcaactttatagccttagaattacccatcagaattacctagaaactggaacaaaagtatattattcatttcggtgaggtatacgcataagtatagattatagttgttttatctaaattctccacatacaaaaagacctactttaaatactaaatgtattctaagtaagccgttttaaatctaatattcaattcttcattcatttaatgtccttattttatatttctggaaaccataaagcaatttcttctttagcactttctacagtatctgatgcatgaacacaattttctgtcttacttctagcatatctatgtcttattgttccttcttctgcatctgttgggctagttgctccattaatctttcttattcttgctacagcatcttcaccttgcaatattaatgcacatagtgggccccttgttataaatgttataagctcttcataaaaatcttttcctttatgttgactataatgcttttcagcaatttctcttgtagctctcataaactttagggctactatttttaaaccattatcttcataacaacttaaaatatttcctattatatttctttctactccatctggtttaactaatactacgcttctttcaatcatacaaagacctccatatagtgtaattaattcatattattccctaatacatatacattatactaaagattctgaaaattataaatacttttataattgttatctaatttttagatatcttatgatataataaaaaaacaaagaataagatatatgttagattatatatcgctatagtaaagtataatcaaataatgaaaaatatccatggcaactttggatttgttatttattttgatgtgctcgattttatatttaaagcttaagtaagctaagtgttcagtttggattaaaatacaaaaatttaactgcaatatatattaatttaatgcaaaaatatattttataagtatagatttataaaggaattggaggataaacacatgattagatattcagcaatagtacaaggaagagtacaaggtgttggttttagatattttcttcaactcacagcttgcaaactaaatttaactggttggtgtaggaatcttatgaacggaaatgtagaaattgaggttcaaggactagaaactaatgtcttatctttcgtgtcggaaataaaaaaaggaaatggatttgctaaagtttccaatatagatttaaatatacttccagtattagatggtgaaaaaaagttttcagttaaatattagtgaaaaaatagaatgtatagatatccagctctaaaactaaatttatgtggtaacttaccgaaatcatatatattttgttccgaaaagctatgaaaatatcgctgaaggttctaagcagcaggttgtatccactttagcatgctccaactttcagttcgacaagctaaaatggaacaacctacagctaagaacctttaacagctcattttcaaatgttttctccacaaatatatttatgatttctagtgaagatatgggcttaaagttttagcaactttgtaaataggttcatctaataagtctaattcttaaattagatgcctatatgaccactaagaatttagcttatcatacattctataatttaatttctatagaaattattctacttctaaatcttttattctaccttttttctttaatcttaataataattcttttggatcattatttattataagttcttccgggaattctattgattctagcatgttaatagcttctgtaaattccccaatacgagtacaaaagtgcgcatcactatttattattagcttagtctcacgctccttacataacgatgctatttttgtacaattacctagacttccaattctagatgttgtaaatgagctattattaatttctattaaaacatcattttctttagcacactttattacttcttcaaagtcaactggaacttctggatttccaagatgaccaattatatcaacttttccactctttattacgtttataaaagctcttgtattttctgcaatatttccaactttgtaaacttcatcatgtatacttccaattacaatgtccaatttctctaatgttaaatcatccatgtctaagcttccatcataatcaattatgttagcctcagttccataaagcattgtaactccaaaaagttctcttggtagcaccttataattattgaaataccatatatgcggagaatgtggcatagtaattccgtgctctgtagtcccaagcacctttattcctttctccgaagcagcttttgcattttccattaaggttgagtaagcatggccgcttgctatagtatgagtatgcacatctaatgcatatttcattatatcaccccatttatctatttttggtaaaaccatatatgttgcaaaaataattctttattgtaattctaaaaatattgcaagaactttagctgtaattgtgcattgtgaaacgtgaattgtatattacaacaaatatagtttataaagtatttaattattatatttctcaattactatgttatcatatttaaatttttattcaaatacgatcaagtctccgaaaacatttacttaaaaataattaaaaattggatgcatttatacgcataaaataacaagtgcaaaatactataattattttttataataagtatattgatctcttataggctgtattagttcaatataattagcggagatgtagttaagttatacgactatagtttcccgacagaactagaatattatattacttgaattatgccagacagaaccactgttaatgggaacaatgcaaattactatacagaaccttactattatagaattggtatgatgaaaaataaactcaatctattaacttgttattttttattgtatcgtcttcttctacttcctattttacctttatcgctcttatctttgcttttgtttttatataaatatagaactatagcaattactgcaaatattataaacaaacctattattataagcattatcttggcattgccacctaattcctctaccttttcataaactggctttgtagtttcttttttcattttatatgttttaatattaccctcttcatctattattgcacagtctccattaagtttttgaaacatatccgttacacttaagtaatttagtgagtcctctaatactttattatctggtgaggttaatacaagcattgccttttggctgttgtattttgatatatcaaattggaaatttgcaatcttatagctaaaaggttctgttaattgaagcttttcatttgataaaaactttgaataactttcatcatacttaaaccatagtttattatttatctctggaatcaatttattagtttttggtgttccatagactattatatgtttctttttatcatcagccgttacatttgaattactgataactttaaaatccccattgttgtatgtaacatcttttcctaaaaaaccaataacttttcctaatgaattcatttctttagaacttaggctatcaggcacaatcattgcagtatcattaaatatttcatcttttacaaatggtgcactataacttgaaaaataatatccttccgtatcgttatcaccaatatataaatacgaatctcttgtaacaagagcccaaggcatattctcttctcttttttcacaatatgtatcttttaaaattaaatcaaaaccaagctttatatctaaatagtttgtataacttatatcatttggtaaactaagctccaattcatcatttaaagccttactcttatcaagttttttacttcctataggtatattattaacatacactgtaactaaagatttatcaaaatcaaggttatctgaatatctcataaaaattttaagcttatcactttgagaaaaaaccttatttttaggaatactataacttattccagcttctcttctaaaaacaccttttaactgtatttcaccaattcccatattatcaaaagtaatttttccacttttagtatctggaactgtctctacctttaaatctttatttactttataattatcgctactccactgaaatattaactcttggttttctagtgctttaactcctcttattaagttgtcattatcattacacaaaataatcatgttcttaatattcatattttttgaatatggtgaatttgatatttttataagacattcatcactttgattattttcctctatatactcattaggaaaactattatattttccaataaatatagtattggtattttctcctttttgaaaatctccatacttagttaaacttattttatttttatatgtaccatttaggttttgtaaatatgaatttaagatgtatgcagcactaagctctgaatcagtataatcatctggaattacaattaataaatcttctaaatcactatcattatccttatcttttaaaaatggatatggaaaatcagctattttattattagaaataatattgttaaaagttgtttttatattggtatcaccttttattacaaaccaattagctgaattaacatcatctacacatggatcatctgatgatcttaagtaagcttctattcttaattcactagatccagtttttattagctcttttggtatagacaccgttaactgttgaacctctgaatctgctatgtaataaactttttgagaatagaaaggagttccattaacggataattttatataggaatttttactattatcaattaattgatttatagaaaagtttacttgaacttgagctttagtattttcccaccatttatctacattgaaatatatgctatgacttgaaaaagttccattaaaggatatgtcattacttaaattataagtttttatactttcagttgtttctatattatttccttcagatgcagcaaatacttcaacatctgtattaaatatcaagatcgctgtaaaaagaataaaacacatgaaaaaaaatagtaacccaaagatgtgcttttcattgttcctcatgactttatttagaatatctcttttcatgctactcctccttaagaaaatctttctgtcttataccactttgcttcctttttcaatacaacatcccttatatagttgtaaaaaccagccactgaaactatagcccacattttgcaatatgtaaaatagcttaaaaatataatcagcacattttttacatttaattctcctttttctgttgaaattgctaccattactgataaagcaaatactaataatgccataaaccataaaatcgtctcatagcctccaatatgaatctcaattaaatttgctcctccaagcaaaaataaacaatctgatattacgcttgcagataaaaaaaagaaataaaccaaagtataatataaaatatcaaattttgttactcctgcctctagtccaaataaatatttcagattttttattaccacatatatatttccttttgcccatctgtttctttgcttaaaccatactttaatagtctgaggctcttgttcataagttactgcaagaggcataaattttattttatatcccattctgtaaattctaaagctgacttctgtatcttctgttatagcctttgtatcccaacctcccattttttccattacttctcttctaactacaaaatttgttcctggaatagtgcaaagtttaagcatataccatcttcctgcctgtgccatccattgatatgtaagagtttctatgttaacaaagttagttagtaaatttacatccttatttctgcatctaaactttccaataactgctcccaatttcttatcttttattaaagtctgtaccaaatacttaagagcatttttatcaggagtattatcagcatcataaactgccaaaatttttcccttgcttttttgaaggcctatgtttaaagcatttgattttccttttccccctattatattatcagtattaatcactataagatttctgccataataagttttctgaagattttcaagtacatctttagagttatcacttgaattatcatttattactataatttcatatttatcatttggatagtccaattctaatagagaaattactgtcttttttattactacagcttcattatgagctggaactaatattgatacaaatggatagctttcaagctcttcatacatatattccttgtttacttttgaataatacatatatccggctattactaataccacattcataaaaattgttatccatattactatgagtgaatatataactaaataatctaaaatattcataccattatttaaaaaacctttttctttctatatttctgcttactataagtattcctataaatattattaaagctgctccgctaaatatttccaatcttctattagtaaaagttaaatcctttttaattggattttctttattaattgttttattaacagcactttcatattcttctgcattaataaatctatcctgagttacctcttgattgttaagaaaaactcttccataatcattcttaatttcacttccaaactttatataagaacttattttattacttggaataagattaatttctctacttaaaactttatcaacattatttttaaattcttctaaattgcagttactttctatttttattgcatttttactgcttattttttcattattaatatagtcgtctaaatcaactttttgaataaaattggtataagctttgattccataattatctatatcaatgttaatatcttcattgtaatttagaaataaagtatcagtactttctaaaatatttttcaaatcttctctatagagcaattcttcatcaacatttattccaactggataaatccaataattagtataattcttaaaggcttctttaagtttatctccaattatttttccccctgtatctgtgccatttactcctttagaattaattataggaaacttaagtattacttttcctccatttgcctgtgcatatcttaaagcttctgaaaatctgcccatggctttcaagttttcatttacaaatactggggctgcttctataaaaaatttaattcccttatcttttagataatcaatttcacttattaaattatttaaatcattaaaaggagttacattatcaagatataaataagtttcagcttttaatttcaaatcctttttatctaaaagttcagaagattttttaatccagttaacctttcttccatatgattttaattcctctcttaatgcctctatactatgattttcttctcctatttttaaaatgaatatttcattgtactgctctaattttttttgattatctatattaattttagctatgttaatttccttttcttttgataattggcttttaactaaagcacttaataaatttttttcacttccatattccttacttttatcatacaaaataagtattttctcgttttctccataacatttcatgggggtaataaaatactcagcgcctataaaacaaattaaaattgttataactctataaataaaatatttattcatatatatcatattccaattccttctctgccagtctaatgaactccaacggatcttttatagaattatcaaaggtataactgccaatttgaatatcaagcttcacttttttataatgggatcctttagtaaaatcatatttattgatgttctctctaaatctctcctttactactttagctccactcatatcagtaattgtcaaaaacccaaaagtcttatcatctattatatatttaatatcttcctctcttaagcttttttcaagaacctgacttgcttgaatcagtaaaagcctatacccctcttttcctaatatacttctaagtttttctgcaaacttaatctttacaataagtaaggtaacaggaattttatgtcttgtgctaagcttcatatatattggcagctccattaaaagagctctttgatttttaatatttgtttcttcatctatcatgactaattctgaattttcatttattaaactttcattttctgtttgaagagcaaaaatatttcttgaaactaaagacattaaaatagctgtacttggaattagaaaaatccagtaatatgagtaaaaatcaatatttatattttcccagaaattcaaatataatttgtagctcatataaataaaatcagctgtaagagtaacaaccaacgctaatgtaacattagtataataacttacaagagctattatcattacaacttcgagcataatataattttcaaaagaattatctagttcaaaaactttatagctcaaacataaaacaaagaaatatgctataagtatagttattaggatatcaactttttttcttacattaactggttccacatatcattcctccagttcaaaacacttgaaagtgaatacaaaatcaaattttacttattgtttctttcatatacagataacccaagtatgaattagacttatacatatagccaaccgaaagtaaaaacattgttgcttcgcaggactataaaaatttcgctgaaagtgctaaattgcaggttgtcgccactcgtgcttgctcccactttcagtgtgacaagcacaagtggaacaacctacaataaagcacttttaacagttcatttttaaatgcctgctgcgcaaaaatatttctactttctagtatggaatatatttcaaagtataaatcaaacgctcattttcaaatgttttctccatattatgacccttgtggctacaaatatatttatgatttctagtaaagatatgagcttaataacttaaacacatatgttgtagaaatattacaggaatttcagctacaattgtgaattgtaaattgaaacatatatatctatttattatttccggattttgtcttaacttgatgcttttttaattttatagctataaaatatattaaaattaaatcaaaactcatattatacataaaaacatgcttagctaggtctgcatctcctgcacctacaacagatattataatttgagatagtccaactaaaaatatataaaaatatatctcttctttaaaaatcatagtatgacatttgatttttctcgcctttatatatctaacagctgaagaataacaataccctattatcgaaataattgataacacaatatttcctgtgaatatcttgtcttttactacgctatataatgcaaaaaagtatgatttagccccaaagcctttgttttcagatttctcataattccccattgcattaggtcttatggaatatccattatcaaaagctatttttaacattttaaaaaatgcccttggatgtgtaatataataagatattatttttgttgtagtaaattttttataataatcctctataagctgtttatcatataaatttactaaagtcacatcatcatagaaggttgtatcttttaataaggaatactgctcatttaagttaaaaaatttcataacttcatcagggtcttcttcatataataaaattcctctattcattgcatgatatccattaatatattgaaaatctccacttatttgcttatagaataatattgaacttattacaaatccaatagctaaaaacatagctattcctttaaataatttttccttatttttaaatcctattctaagacataatgctgcgattaaaataccaactggtgaaagctgctgctttgagcctaaaaatataaaagaagaaattccaaacaacagtatattcagcttgctaaacttattgaattctgccatatttaataaaattcctatgctaagcaaaaagaaacttatgttaacagcttccccataaaaagaattataataagctaaatatgctgtgtcacaaaatataaaaatggttactaaagttattattaatttatatttttcttcagtaacttgatttattaatgcttttacaattaaataaatcccaatcgcctctgcaagcaaaaacatccacgacataaatcttatatctaaaatgaaatttttattgaacctctggcttgtataaaccgctatcttaataaaaattccctgagttgatataaagtttttttctatatcattattgtatttataaattccataatacctgtaaaaatatccattatataaatcactatcattgggatttaattcatacacaccatttgaacttatcactctatagaaatccccattatctgccatgccaataataggtttaacaaataaagtaaatatgcctattattattactaggaaaaaagctgcaaatggataattgatatttttaaaaatactattttctctatttaaaatacttttcatctttctccttcataaataataatttgatttccttttacttataggatgtgaaacaagttataaattattctttaaaatgtaatctattaatatagataaatcaactatactctatacttatgcgtatatctcaccgaaatcataaatattttgattccgaaaagctatgaaaatatcgctgagggttctaagcagcaggttgcatccactttagcatgctccaactttcaatttgacaagctaaaatggaacaacctacagctaagaacctttaacagctcattttcaaatgttttctccacaaatatatttatgatttctagttaagatatgagcttaagtttttagcaattttactaattggtttatctatatattctgactatttacacttccatcaattgaaaatatttgttttatctatagataaaacaaatataatctatacttatactcaaagaatcacatccatcaaaattaccaatgaaacatttaacaaaaatatatactttaatctttgtaaattatactagaaattagatacatgtttgtgaaagaggcatttgaaattgagttgtgatggttcttagtcgaaggttgttacattttctgcttgtcctaaacttgtttttggagcatgcggaaatgagttcaaccttccacttagaactatccagctaaaatttcattagtccgctggaacaaatttgtatctaatttcggttttgccacacataaatataattttaattttggatatctatatgtacatatcttccattgtagaatcattgcctttattagttcttaaatatatgttatcattctatatgtatatattttaaattcgaagcattggaaggagattttatgattaaattagttgtaacagatatggatggaactttactagacgagaatggtcacttaccagacggatttactgatattctggaccgtttaagagaaaaaaacataaaacttgttgctgctagcggaagaccttattatacgctacaaactaactttggccctgtaggaagatatttatctttcatttgtgaaaatggagctttggttgttgataataatgagataatttataaaagtgttttagctaaagatatggttcaaaatgtaatcagtgaagctaaaaaagtcaaagcaaatgcattagtagtatgctctccaaattgtgcatatattgaaaattattctgaagaatatttaactgagataaaaaaatattatacaacattagaaattgtagatgatttaagcaaaattgatgatgatataattaaaattagtatttgtaatttggaaggcactaataatataactgacagtgaattaaccaatgatcttaatatagtttcaactgcagcaatctggactgacatttcaaataaaggcgttaacaaaggcgttgctttaaagagtcttatggatactgataatatatcaaaagaagaaactatggtattcggagattattacaatgatatagaaatgcttgctgaagctgagtatagctttgtaatggaaaatgctcctgaagacatgaagcaatatggtaaatacatagctgcaagtaatgtagaacatggagttttaagagcaattcttgaatatgctctttaagcacaatcgtaaggcattagtattgtgcagaacttaaagtgacgcgataaacacccgaaatagaatacatatatgttccacaggactagaaaaacttcgctaggtatgtctaaatgggacaacgtccaattaagacataccaatagctcatttttcaatgcctgactccacatatatgtattctatttctttgtttggctatcactttaagttatttcacatatacctttgattatttcgcgcctagataacgagtgtaaagttaaacactatcttatatattgtagtatatgccagaaaggaaggtcatgcttttgtggaagtgttgcattgaatatttaaccgcagacatttccttagtagaagttgtattatttttgcttgtcacgagcttgtctcgggagcatgcaaaaataggacaacttctgctattggaaattcacggttaaatattctggcaaccggaacaaatgcatgaccttcctttcgttgtttatatacctaactatagaatctagcgcgaacttcagtatagcaaactcatttgctgtacttctgtttctttgaatgaagatatgctgactccaatcagccttacttcttctttcaattgctcactatctaatagctcttctgcaactttatatatttcaagctgagtgccaatataataatttaatgttttacttcttgtatgattttcaaaatccttggttttaaatttaagtgttacagtttttccactaacattttttctatttaaaatttcttcaatttcaaaagaaaattctttaatatattctctcaattcttctttattcttagtatcgaattttaaagttctttcttttcctatagattttctttcgcgaattaactcaacttttctattatcaattcctcttattctatcgtatatctcaataccattcttgcctaaatactctatataaaattctttgggcatcttatataattctttaatataatatatccccatattatttagctttgctactgatactttacctaaaccatgaaccttagatataggaagaggaaataatatatcaggaatcatttcttttcttatttctttaattccatttggtttattccattctgaagcaagctttgccaagaatttattataagatataccaatagataaagttaaaccaacttccttaaatactctattttttatataccttgctgcttcaattccatcttttatttttccttgagacaaatctaagaaaccttcatcaatagatacaggctctactagtggcgtaacttcattaaatatttcaaatatctcttgagatactttagcatactttccatatctcccagatacaaagattccatttggacatttctctctagccatgaacatcggcattgctgaatgaaccccatattttcttgcttcatacgaacaagttgatactacgcccctttcacttattccacctactataacaggcttacctttaagatctgggttatctctttgctcaacagatgcaaaaaaggcatccatatctacgtgcaatattacattatccatttttataaaatcacctctttatgattaactaattttcaataatctataagtattttaacatacaaatcatcagttaatgaaacaataatatatggtataaatcctacatttatattaattgctatacatattaaaaagttagctaattttatttgacatatggtataataataaagtattttaagtataatagcgttattagcgatatttttatgtaaaggagtaattattatgggtcttaaagaaaaaataggtagtaaattcagtaactatttccaaaatgcttatatggaaaagtatggtgacagaattacaagcatatctggaactgttttatctgtaaagcttattgaaaaaagttatgttatcttcaatagattaatggttgaaatggttataaagcctgaagttggaaaaaaagttgttaagtgttggtataaaaagaatagatggtttaagaaacctgaattcattgctgtaaagcaaggtaacaaagttattgttatgggtgttacaggtgataaggatagtaagaaggaaaattctcaggaagttcaaatatttaacctattaaatcttacaactaagaaagacttagtgccaatagaccatagccaaataaaaaaatcacgtcaacaagcaaacaacatgatgagaagataaaaaaagggctaagccctttttttattttgtctttattaataaatatacactgttaataaatgctattatccctgaaaagaataaaactataagccattgattaagagataatgctactgtatgaaatacgttttgtaaaaatggtacatataaaactgaacacattagcgatatagatattaaaacagctccaactaaataaggatttgtaaataatttaatttggaatatggagtatctttctgatctacattcaaatacgtgtattaattgagataaaactaatgtacataatgctaaagttcggcatgtttctaaattcattttataatatcttcctaccataaatgatagtaaggtacacaatcctattaatgttcctcttattactattttttcaactaatcctcttgcaaatatactttcctttttttctcttggagattgtctcattatatcttgctctggcggatcaactccaagtgctatagctggaagtccatctgtagctagatttacaagtaaaatttgtattgggcttaatggattaggtagatagaacaaggttgccaaaaacattgttaatacttctccaaggttacaagatagtaaatatcttataaactttcttatgttatcatatattattcttccttcttctacagctgcaactatagttgagaaattatcatccataaggatcatagatgatgcttcttttgttacatctgtacctgagattcccattgcaactcctatatctgattccttaatagcaggtgcatcatttacaccatcgcctgtcattgcaacgatatttccttttttcttaaaagcccttacaattcttaacttatggttaggtgaaacccgcgcaaagactcttactttttttattcttccctctaattctaaatcacttatagcctctatttcatcacctgtcattacttgatctgctgtattacatatgttcaatgattttgctattgcaagtgcagtattttgatgatctcctgttatcataataggttttattcctgcaagtttacattttaaaactgcatctctagcttcttctcttggtggatcaatacttcctgctatacctataaaaattaaattctgctctaacttatcactttttgttagattatcttccttatatgctgctgctatacatctaagtgctctagatgacattgcagtaataaaatcactaacttgctttttcttttgataagtgaatggttttattttgttattttctagtataaattcacatctatctattactctttcaggagctcccttaacgtaacaggtttccttagtcccttccttaattataacagacatcatcttcctgtttgaatcaaatggtatatcatatactctatctgcatcatttacaaaatcctctaaatcattaacatcattaaaaaacatatttattagtgcagtttcagttggatcaccatgaagtgcttcactcatttttttctttgtaaaatcataattacagtcattacaatatacaagagctttcataaactttgtataattacttagcttctctttttcaagttcatgaattctgccatttaaatatacctcttttacagtcatcttattttgagttaatgttcctgttttatcagaacatattacagatgtacatccaagtgtttctactgctggaagttttcttacgagtgcatttttcttaagcattctagacacacctagagctagtgaaacagtaacaatagctgctaacccttctggaattgcagcaactgccaagctaacaccaagtaagaacatctctgttatatcatttcctcttattattcccattacagtaacaattgcacatataacaaggcaaattacaactaggactttacctagagagtctaatcttttatttaaaggggatttttcttcttcaatattttgaattagatcagcgattttccccatttcggtgttcattcctatacaatcaactttaaataatccttttccttttactacagtagttcccataaatccttcgttattcttctttgtctttttaccatcagctttatatggattagcttctttgtttacaccaactgattcacctgttaatagtgattcatctacaactactgatgaactttctataaagaatccgtcagcaggtattctatctccagcctccaaaataacaatatcccctattgttaagtagatagaatttataatctgtatacttgaatccctcaaaactttacatgtaggtgccgccaattctttcagcgcttctaaggatttctctgttttaaattcttggacaaatcctagtattgcattaataactattattataagtattgtaatggcatctgccttatctccaattatcccggaaattatagtagatgcaattaacacccaaacaatgaagtcattaaattgagatagaaatattttgaatgctgatgctttattatggtgcttcaattcattaagtccaaagttcttaatcctcttttccgcttccttagtgctaagaccagatgtcaactctttttcctgtaccacaacttttcctcctaaatatagaactttatataatatatatattttccattacaaaagttatgcacctaaaaaaaataaaagtgcgatagcacttatcaattcctatcaccttttaaaaaaaagtgcgtcagcacttattaaattcttttcacatttttaaaaaaagtgctttagcactattaaattcttttcacatttaaaaataaaagtgcgcagcacttattaattcttttcacatttaaaaaaagtgctataacacttttttaattcataccacattaaaaagtaactacgctacatactctcttaatcatattcttataaattaattttatcttagccaattgatgcagccaactttaaaaatctcaaaattttgtacttgctagacgataatgcttatacaaatcactacaattaataaaattcttcctaaacatcttataaaaatcgcctacctaaatactttcttgaattctctctttaaattattcagccatttgttataatttaatattgaaaccacttaactaaatcactactgctatttacctcaataggatgagtcttcttgaggttatatacttttaagaaattaataagtgctccctcttcatgtaatgtatcaaaggacttcttccctgtattatttccatttgatacatactcttgcttataattatgtctaaacaccactacatcaaagtcatagtaattaattttattatcaagtaaatatggtcttaaaattttatatgcctttttagcttcttcatatttatcaaattttccatcagtaaaaatataataaataatatctatatttacattttcattgcattggttaattacttctgaatagcttaaatccttaaactcttccttattacacctaaatgtatattttaaatcaaaatcagtttctgaaccgtatacctctttaatcttcttttctatctcttgttttccttcatatgtccacttaacctgtaaatatccatctacaaaattatcaagatgttccctgtcttcctgctccacaaaaaactctaattccggcttcccaactggaattacctttgcttgatatttatatccaaatccttcattaccagttaaatagggtttttttacaaattcaaattccatcccatactttttattcaaatattctgtcattccttgttctatgtgtttagacttttggcttgtaatagaacaacctcctagtataacaaaaattgcacaaaccattgcaacaaacataatttttcttaaaacttccatatacatctccctccgtgaattttgattttctattttgcgtagtagttataaaatcagtatgctatttaatattccgacatacagctttagtcacttatcgtaatattttccttttgaatcttccttaaaagcattctcataattaatatttgcacaagacagttgacttaaaatcattgcttcttcatttggaaagttaatctttataaattcccccttaattttagacaattaaaaataacgattcatattaaatatttcatctttatatttaaattactgtatcaacaaataaaattagcactactacattttgaaatactaatccccctcaattatttatcaaatatcatctctatcagaaaatgcgtaagcaacaaaactagtagtgtcattctcattttgataatccttgattcttaaattagataggttgttatagtctccttcaacaatttcttttaagatattatattgttcctcatttgtaagacttccatatccaccaaagtctctaggatatccatcttctttttcattgagaagataaatagcggcatcttgtaatgtgcaccctttaaaaactctaagaaagttttcatcatcactgatatttgcgtaagcaagttggctcaaaaccattgcttccttgtctgttaaattaattgacatctaaaattccccctttaataatcgaaacgacctaactaagtaacttctgctgtttgcattaataggacgtaactcattactgttatacatattttaattaatacttaatcaatcttcagtaaatgtatttttcaacaaatgcaaaccaaataaaatgaattatttttccctccaagtttgctttagttcttgccttccaaaaatatcatacttaatattacaagcattcttctctgctttctcaagccaatcactgataggttttattttttcccagtactcattccttttcttatcatcataacgattataagaacttgagccaaaatactctgagttaattttattatattcatcaacttttttaatgtattcttctttgtcttttttagatacgataagaaactgttctgaaaaatgcctatctggttgtctatttctatctgcttttctacgaatagcatcatctattttcttaaaaagttcatcattatctcgagcattatatacatcatctacaaatactgcatactttatagctatagatggagctgaataatcaaataattcctttatatattcctcagcagacatgccaactcttgatggagttctgtctactaaaaaatctatatctttcaaataaccgtcatcacaatagttaccaattactttagaataataattacttacctccttattccaatttcgaccttcgatattttctttaattacttcaagtgaattcggatatttcgtgtctttaaaaaaactcatttcctttaaatttaatgcttttatttcctttgcataaacaatatcatacgttttactattacttgtagcttcaagattaaaccacgaagcatcttccccaaatccagactcgtttgatgtgcctttattataattaactactttcacagtaaactcttgtccatatttattatctaagaaagtctttacgttttgctccgcctcagaattagacactttgtgataatcataatacattaatgaagcaataattataaatatgaaaaagggtagtatagttaacgttaaagtacgtttactattcattcttcattcttcctccttcctttcataaaaacatatcagcatatcttatagctttatccttaattactccagattttcaaaatatataactacttattttaccaataaggtttttgatttaataaaccaattaacatttaaacttcccacctttaatattgaaaccacttaactaaatcactactgctatttacctcaataggatgagtcttcttgaggttatatacttttaagaaattaataagtgatccctcttcatgtaatgtatcaaaagacttctttccagaattgtctccattcgatgcatattcttgtctatatttatttgtacagaacattacattaaagtcataattatcaattttgttatcaagtaaatatggtttaagaattttgtatgctttttctacttcttcatatttatcaaatttttcatcagaaaaaacgaagtaattaatcgctatatataaattcccattacatctatcaattacttctttatagtttaaatctttaaattcttccttgttgtacctaaatgtatattttaaaacaaaatcagtttccgccccatatacctctttaattttcttctctatctcctgttttccttcatatgtccacttaacctgtaaatatccatcaataaaattatatggatgttccctgtcctcttgctccacaaaaaactctaattctggtttacccgctggaattacctttgcttgatacttatatccaaagccttcattaccagttaaatatggttctttaacaaattcaaattccattccatactttttattcaaatattctgtcattccttgttgcacttctttagatttttgatctgacatagaacaccctcctataaaaataatgattgtataaattgttaaaataaacaggattctttttaaaattcccataaaagcgcacctcttatatttctgtcgcctctattcttaaaactcctttcagctatttcttgtaatattcccttccctttaaaatttcttttaaaaatgtcatcgttattaataatcgaataaaaaaattgacttaaaatcattgcttcttggtccgttaaatttattgacatttaaaattcctccctttaatatttaaaccacttaactaaatcactactggtatttacctcaataggatgcagctcctccaaattatatgcttttaaaaaattaataagtgctccctcttcatgtaatgtatcaagcgactttttcccataagtatttgcattggaaacatactcctctttatatttatgtttaaaaaataatacattaaaatcatacttattaaacttattatcaagtaaatattgtttcataattttgtatgctttttctgcttctttatctttatcaagtttttcatcagaaaaaatgtaatagctaatatctatatatacactcctattacatttagcaagtacttctgcataacttaaatctttaaattcttccttgttatacctaaatgtatattctaaatcaaaatcagtttccgaaccgtatacctctttaatcttcttttctatctcctgttttccttcatatgtccacttaacctgtaaatatccatcaacaaaattatctacatgtactctgtcctcctgttctacaaaaaattctaattctggttttcctgctggaataaccttggcttgatatctataaccaaacccctcattaccagttaaatatggttttttaacaaattcaaactctattccatactttttagttaaatattccatcatcccttgttcaacttgtttagatttttggtttgtcatagaacaacctcctatataaataataattgcaaaaatcattgcaccaaacataattcttcttaaaaattccatatactcctccttccttgaattttgatttttctatttcgcatagtaattacaaaatcggcatattatataatacttccacatagcatctatcatttattgtaatgattttcatttaaattccttattaaaaatatttttattcgtttatttctctttccccctcctaacttagacaaataaaaaaataacaaaacaatatgctatctatatattttccatcaaatctaatcagaaatattccctaatagatgactgctagttttactgcctattgtctgacacaaaatctatacgtcattttgctttgttatttttaacaattcatattagatatttcatctttatatttaaattactatagcaccaaataaaattggcactaatacattttgaaatactaatagtcctcaattatttaccaaactttataccacagtatttatgatacccaattaaacccaattcagtaaagtgacctaggtcataactttttttccaaattaaggagcagaaaaaaagtaataatagacatgtataattgtctattattactttttttgttcctaaaccaaattatttttaattgcataaaccgcaagttgcgttctatctttaacacctatttttaaaagaatcctcgacattatattttttatagtaccttctgcataaccaagcttttctgctatttctgagttcgaaagtccttcaacaacatattctattacatctaattcacgactgtctaaatcaatatgttcaatagttttaaaataatctttctctctctgctttggaatcattttagaaattttagttaatatttcgttattaatcataccaaatccattaataacacttttgataacattgactaattctattgtatcaatttccttcaatacatatgaatcagctccatttttaagtgccatagtaataccttcatcctcattaaaagtagttaaaattataacttttattttactattataatttttaatgagcaatgttccctgagccccatcacaatttggcatctgcaaatccattaacactacatctggattatgcatcttacacaattccaatgcttcatgtccattcagcgcacatcctacaacaaaaacttctctactcctttccagtgtatattttaatgcttcagaaaactctggctggtcatcgactaaaacaatttttatcatttatgttacaccatcccctattggtatttctactttaatgttaaatccactttctccatcagaaccaaaaactatatttccactatattttcttaccctttcctccatccctaaaattccatatcccttattgatttcaatacagccctttccgttatctattataaacagttttaacattttgtcatttattttgataattatatgtatttcatcggcatcaccatgtcgaactgaatttgtaactgcttcttggcaaatacgaaaaattgtttgagaactatcatcattaatgtaattatcttcacattcatcggttatttctatttttatacctgaacttttaaaatccaatgcaagtctttctagtttttcaaacaacgaatttgccccctgtttttctggcattatatcatacaaagaaagccgtaattcttttaatccttgccttgttattttatttgctatttttatagattcaatcattctttcgttatcatgtccaaaatctaagatagcaccctcttgtacttttataagaaatgttagtgtatgtcctagagagtcatgtatttctcttgccactctatttctttccttcagaactgctaattcctccaaaactaacatatgttcctttaacttctcatttgtatcagttaattgaacgttcttttttgcaagttggtctacaagttccctataagaagtaatattagtaaaagaaaccaccctcccaatatctcgtttaaatttatctagcaaaggttaaatagcaactctaaaaacttttccatctcgtatatcaaccttgatctcgccaaaaactggttctaaagtaccttgcaatattgccctcattaacagttcatcatatatatctcctatcatttttctcttcagatatgcttgaaattcagccacagtattacccttatattcattaaaagtctcaataaatgaattatttttcgaaacaattcgtccattattgtcaatcaatacgatagaagcttcaaccgtatcaaatactttgcgaactcctgtaggtattgcatttaaaaatctatatttaaatattgcaatagcaatcaataaaagtgatatagaaaagcttactggtgtaaaatcaaatttaatctttcttgaaacatatagaaaattcgctataattggtattattgcagctattattaaaatgattgactgttttttctcatttccaatcttttttagtgaatatcttaccataataaaagtactcaaaaacacatatatataggttaaaaaaagatttattccaaaagcaataccatatattatcctatcaatctcaaatactttataataaaggccatgataatcatttgtaagaataattatatattctgttactcctattaaaaaaagacttcctattaatttcttattttgagcaaatatattatctgtatataacatagaaaaatataaccatatgattcccataaaacatatagcaaagccttctaaacatactccaatatattttatttgaaaatctttagaaatgatttctataatatatcctgctgaccatataaagattaatacctgacaataaataaatgaatataatagctttgaccgattcccaaataaaacaaaataaatggatataaatatagaaagaagtgctgaccctgataataatcctacccccattgttacctgcatttaatctaacctcacaattttataaatatatgttacttcttatttacgtaaaaatatcaacaatgattcactaattatttataattgaattaacaactcagaattttttgagcttctaaaacaaaaagggaaaaataatgctttatatataatatatggttatttttctaataaatatattacttgtgatattatagcatattattactaatatatcattcatatgctacgaatttcaatgctgttagcgtataattttagtaaacaaagataatgaaaaatcgcttaaatggatcaaatatttatattactatctggttagcagtaggcatgagagaattctatatagacaagaagatgtaaaactcacttcctctatcgaatgcttggaatataggagattaggagctatagaaaataatatatgtgatgtaattcttcaaagaatgaaaagaagatttataaatgttttgcacctagatactgaatccaaatcaaaacatatatttttaattattatatttaccagaaatgaaggtcttgcttttgtggaagtgttgcattgagtatttaactgtagacatttctttagcagaagttgttccgtttttgcttgtcctggttttatcacaggagcatgcagaaatgggtacgacttctactgttagaaattcacatctaaatccttagtaacccgaataaatgcatgaccttcatttcggtatttacatatataattttattcttattttaggtatctagtgcacataatacatttattgttttaaaaaaagaaaaaatcccctaaaggattttttcttctttaaatttatttcatcgagttaactacatttgtaagtggtggtattacttgtttctttcttgatagaactcctggtaagaatgccattgaatccactaattcaatattgaatgtcttttcaacataatcatgtctttcacctgcaactagcacttgtgaaccttcttttaatatatctgttaatagtaacattactacagcataacctttgctatctgcttcactcttcatgtaacttaacatttcatcttttaatggcataaatccatcgatgtccattgtgtttacttgagctactccaactcttgattctcccatattaaaaggcttaaagtcttgattaaatatttgagatacagtctttccttttaaagaagtaccagctttaaacatttcttttgcaaattcttctaaacttgaaatgccagctatcttggccaacttatgacatatatctttatcttgttctgtacaagttgggctcttgaataataatgtatctgaaattattgcaccacacaataatccagcgacctctttaggtggtgttatattacgttcaaaaaagctttttccaactatagttgaagaacttcctaatggttcatttctaaagaatatagggttacttgtttgtatatcagcaactctatggtgatctataatttcaagtacttcagcatcttctaatccatcaactgattggcctctttcattatgatctacttgaataacttttttcttatgctttgcaataagatgatatcttgaaacagttcctattactcttccatcttcatcagttacaggatagctatgatatctagtttcagccataatgtctttgatatcatcaactaaatcatctttagaaaatgatattaaatctttagtagccataacatgacttacaggtatactttgaattaataatcttgaagctgtgaaagaatcatgaggtgtacttattatagtaactcctttttctttagctttagaaagtaaattttcagcaagcttatgtgctcctgtaattattattagtgatgtattaatatcaattaaagcttcttgtacatctggtctatctccaacaattgcaatatcatccttatctacaatttcttttaagctatctggttgcattgctgtaacagcaatttttccagggaatgttttgcaattttcatttatatatacactagtagcagaaagcgtttctaatatattttcaattgatgtattactttttcctaatatattattatcccatatatccataaatgatgaagttaagtttgaaatagaaagaatccctactaatctaccatcatttccaactacaggtagtgattttaaatgattgtctctcattatattccatgctgcttttaaagaaatattagaagttattggcccaattgtatcaatatctaaatcttctacttttaatctaactgtttctaaaagccttggagccttaacaccaaaataatctaatataaattgtgtttctgcatttacatttcctaatctcacaggtatagctggaatattaccagtcttatttttaaactctgcgtaaccatatgcagcacaaatagagtctgaatcaggatttttatgtccagttacgtaaactacattttccaaaataattcctcctaaattttttgttttactttagtacattaggcacataaaaataataaatttgttattttttgattgtgccttatatatagataaccaaactaagacctgaacttatgcatataactcgcccaaatgaataatatacttttgttccagtttctaggtaattctgatgggtgattctaaggctataaagttgcactcaaagtgctagcctcaaagaacaagctttgaactagcacatttggaacaacttatagccaaagaatcacatcaatcaaaattaccaatgaaacattccatattatgacccttgtggttacaaaaatatattacccatttctagttgggatatatttcatagtataaatcaaacttataattggcttatctataaattgacatattagaacaagtatattacttaattcatacatatttattttacttataaagttaattattgtaaagactttattcactgcacaatgcacaatgcataattcacaattaataaataaattttttgaaattatataaatatccgactttaaaactagactcatgttgtaacttatcaaaatcataaatattttgatcccaaagatctatgaaaatatcgttgaaggttctaagcattggttgtatatactttagaatgctccaactttcagtttgactatccaaactaggacaaccaatgctttggaatttctttttccaatccaattttcaagagaaattataccacgattgtgcattgagaattgtgaattaaaaaaggtggctacgccaccttttatctcatattatttatcatactccaaagatcatccgctgtcgttacagcctttgagctaagctgaaaagctctttgtgtcaatactatatctgaaaatgtttctcctgcatctacattcgaaccttctaacatgccttgttctatattatagttactacttaatgtaacttgtgcatctgagcttggaacaaaataactatttcctataggtataaagctcttatcacctatagctgtaaatacaggaatggtacctattttagctacttgtccatcaacttccatggatattcctccatctttatctatagacatcttctctctatctaacgctggatttccttctgaagccccattctcatattgaacatatactttcgttccatttgagtctactaaagccccatttgaatctattttaaaattaccatctctagtatatactatgcttccatcttcctttgaaagcgcaaagtatccttttccatctattgcaagatctgtttttccacctgttgttaagagattcccttgtttattgttagcatagtttacccctagtttaacaccagttccagtaatagcctttttttcgacaagcggagtccctcttctatccagtgattcagttagcaaatctttaaaatttacatctgtactcttataacctgtcgttgaaatattaactaggtcattagaaagataatcaagcttctcttgatacgcattcattccactctttgctgtagcaaaaatattaaacataattttcctcctttacattaggtctaactcctaaaaatatgtaacacttatacaacatattcataacaatagagctacattttaaatgatcgaatctactcaatatgaaagaatctatcatcttctcatgaaaaatttcaggctaattttaactctattattttagtttatataatatcttactatactcgacctaattcacttgcagctttttgtactgtttcatcctgcatttttacaaacttttggtttgtttcaaattgtctttttatttccataagttttactagttctgttgacggatcaacatttgagctttcaagaaagttctgtcttacatttacttttgcattataaatagggttatccatagtactatagttatcaccaattggttccaaattattatagttttgaaagtctgctgttaataacttgtctacggctccaactccatcgatattaatattattgtcaccatctattgaaaactttgaatcaccaacatatattggttctctagcacctgtagaattatttattcccattacttgggatccatcatttgttattagatagccttcattattgattttgaaatttccgtctcttgtataaacttcttgatttccattttgagccacaaaaaatcctctaccatctatagcaaaatccgtcatactatctgttgatttaaatgcaccttgtgtaaaaactgtttcaacatcattaacttttacacccatatttaaatttccaatattatttttaacatacttgtctcctacaagcttttgtctgttagatatcatcacatcttcaaagctacttttcgtaagctcacgttttttatatcctgtattattaacattagctatattattagttactacttcctgatcattttgaagcgctattaatcctgaaacagaagtatagaatcctcttatcactttaattgtcccctttcaaaatagatttacgttcactttcataaatcatacctaaagctctagccttttcctctatctggctatctgaaagactagcagtatatttatatccaaacataaatataactcctaaaaccaatcctatccctatacctaataagatcttcctatccatgagaaatgtgaatttattttttattttttgaataagccttttactaataatacttcccccttactcacagataattcgcgacatatttcatcttctgttaatcctgcatttaaaagtctttttatactctgagttttgttactatctacgctttctgaaaaattaatttcagatatcactccaatttcttcgtctatatcagtatctgttaaagattcagtatattcctcatctagatccattatactatcatccacaatgtacagccttttagattttttataatcttctctatcttcgctataatttatactgtcatctatatcatatttatctagaaactcttcaatttctagatcttctttattttcgtatctttcttcaccattcttaagctctttcaaatcactttttattttaataatttcttcttgtaattcagttagactttctgcaatatctcttcttaaaagtcctatttccattttataatcatttaattcctctttactatcttgtaacacactttgaaatgatatatttaatgcatcattttctttatttatgttattttctcttttgatagcacgataattataaactattaaactgaatcctattatcagtaatattaatggcataaaacacctctgttcaatgcacaatgcttaatgctcaattcacatttcacaatgcacaattatttgttaaattcacactgctcagttcacaatgcatagttatttattgaatgcacaatacacatttattcatttacagttttcagtccacaatttattatgtcacacttcatgttacattttcacacttcgaaaatatattttactttttaatcacataacaaaaattaatactctaaatcagaagtataattccaactttttatattccagtgcttaaatttttaacgattatctacaactcacaatctattttaacctaattaacacatatatctctgcacaatcttaattatgcaatttgaattgtaaattgtgcactgtgaattgtaaattatgtattaatcaatataatgcaattttctcatgcactctctcaagctgctaatagctctactatgtaattggcaaactctagattcagaaacgcttagtactgttcctatctcttttaaagttaatccctcataataataaagatttaatactattctatctttttctttaaggagatcgattgcctttgttaaaatctctagttgctccttatcttgcaagtaagcatcaggacttggactatttttatcttctataattccaataaggtttacatcttcatcatctgaaaaaattacattttctaacgataccattgaaatataatttatgtaattttcaatttctccaacttcacttatagatatcccaagatattttgcaatctcatcatttgtaggttcccttaatagttctagctgcaatgtgtctatcgctttattgtatctatttagtttgtccattgcccctttagatataggtctatttttcctcagctcatctatcatagcaccttttattcttatagacgcatatgatgaaaatttcattcctttcgtactgtcaaacttatttaatgcatccataagtccaaccataccataactaactaagtcctcatattccatatatttgttctttccaaacataaccctcgaggcaatatactttactaacgggatatattcttgtattatctgctcttttccatcaacgtcttttaatgcgtgcatatccttattacctccccataaactcacttctcaatgtatattcgcaaattctttcaaattttacttttaagcccttagaacaaacctggacttttctttaggtacagattttttaattcactaatttacgcattagctctttgctttctcattatttcgaaaagctcttggattattttttcactttgagctggagtaatatcaataaatcttagaccacacaatttttctttatctggagtattttcaattcttacaatatcacacttaatctcgacttcaattttgcttaactttaggctaaccaagattaaatcttctttagtaatttcttcatttattttgaatttcaatccgccagcacttaaatcaaccattaatccatctttataaggtatcttaggaatatcttcctcatcgatcccagtaatttttttatattgaactggatttaataacccaactctgaaaaaattccttctttgtatttttacaatattaaatggtgttgagattttataatatattatgcttccttctttacctcttgaaattacttcacatgaaaaattaaagcatccattttcacttaagtaagtattcatttggatcttttcacctgaatgaagcattaaataatcaccgtcacaaacgggaacattcatttttaaaaagtcatcctctacatccattattagagctttatatgctttttctcctattattacttctactctatcattaactttcaagttaaaattaagcaccttaaaatcctcctatgaaaatatattaaataatctcttgaacattcctcttgctccgtatgatgaatccacttcttgtcctaaaagtttcgaagctattttttctatatctttagatgcatcacaattaggatataatataacaaagggtttttgctgcctgacactttgtactaattttttatcttctaatatgcatcccaaatattcaacatccatctttaaaaatttagtaactgctctattgaatttattgtaagtttcttcgccttcttctttagtaaaggctttatttacaattatttttgccttagtcttaagattatagtgatctgtcgctttaattaaactatatccatctgttaaagacgtaggctcaggagtagttacaataattaactcttctgaagctgctataaaagataagacatctttattaactccagcccctgtgtccattaatatataatcatactcatccaacatttcaagcttttctataaataatttcttctgatcttcttctaattcttgagccttgcttaaagctgatccagctggaattaaatcaactccattggttcctgttataattatatcctttatttccaaaccagtaaatataatatcaaatatattatacttgggatataaccccatcaatacatcatcatttcccatgcctaaatcagcatcaaaaatcaaaactttctttcctttgttttgaagtaatattgctaggttcacaacaaaattactttttccaactccgccttttccagacgttactgttataatttttgtagttgtcttatttatttcctgttcttcattgttaatcaattttcgtaatgattcagcctgatctagcatagaatctcctcccctaggataaaattagcaatttcttcctttgtaggcaccattatatcatctggaacattttgccctatagttacaaaactaactggtttgttagcaattttagcaatattatataaagaaccatacacagtagtctcatcaagtttagtaataatgatattatcatactcaagtcccgaatagcctgtaagtatcgattttatatcactatttttagtagttgcacttattaccatatttacatggtcaggattcgctttttgtacaaatgctctaagctctgaaatttgcatagcgtttttactacttcttcctgttgtatctataagaacaacatcacaattattcattgcttcaatagcatcttccatttccttcattgtaattacaactttaaatggtatattcattatttctgcatatgttttaagttgctcaatagctccaattctatatgtatctactgtaattaagccaactctctttttttcgataagtgcaagtcttccagcaagctttgctattgtagttgttttacctacaccagttggacctactaatactacacgtccactcaagctcttagtggatactaagatatctctctcaaaaacttctctcaaagcttctacttcatttaaagtctcgccagaatttatattatctattgactctataactccatcctgcaattcttcatcaatatccaaactttttagtctttctttcataaagtttgctgatacatcttcgttggaagtattttttataactttgcttaataggctctttaattcattaacttctttatgtattgattctatatttgcatcattatttataaccttatctatataatctatgtcctttttttctttaatgctattttccatttttatagaactacttttaatttcctgtttatttatagtttcttcgtatctgttattactagatgcttccttttcaagattagcattatgttctaatatcttatctcttatggtatccgcattaggaatttctcttaactcttttgaaactgatacctcatcctgcattaactttttaatactttctaatgaattttgaaactcttcatcccttttattgtacttactgctgtacttattagaactactattgtcatcactttgtgaattttcaatggctgctgtaacctctattactttcttagaaaataagcctttaaatcctggttttctaacttttctctgacttattataatagcatcttttcctagttcatatctaatccgagtcaaaccttcgttcatatttgctacgagatatttttttataatcatctatattcttacgactccttcactattaatttgaacatcattaggtacttcatttaaagaaattaccataatgtgaggaaataccatttcaattagctttctaaatacaggtcttatatttggtgatacaagtataagaggctgattgttgtaaaaataaactgattctacagtattcttaattcctgtaagtatttttgtagttgtatctggatctactgttgggaatgatccttgtactgatttttgagtattattagctattatttcttctatacttgggtctaaagttactactgtaattgttctattttcatcaaccacttgattacaaatagttctagctaatgagaatctaacatattcagttaggacctctaaatctctagtatttttagcgttatctgctaaagattccattatcgtaacaatatctttaatcggaactttttctctaagtaaattttgtagcactttttgaagttccccaatacttaacaagtctggtataagttcttcaacaaccgcactatatttttctttcgcattatcaacaataagtttaacttcttgccttccaagcaattcatatgaatggctctttatagtttcagttaagtgagttaccattaccgttgttggatcaacgacagttaatcccttaatttcagcttcttccctttgatctttatttatccatactgctggaagaccaaaagtcggctcaattgtttttataccaggcatctctgaattttctcctgttggatccatgcaaagaagcatacttggcattaattctgaagaaacaaccatagttcccctaattttcactatgtactcatttgtctttaattgaagattatctcttattcttataggttgaacaacaatacccatttctatagcacattgtcttctaacagatgcaattctttgaagtaaatctccaccagatgcctcatctgcaagtggtataagtccatatccaatttcaacttccattggctctacagaaatcaaattcataacattttctggttctttacgctctgcttggataatttcttcttcttctgatacaaattcctgtatctctttagctgctgcatctttataaagcaagtaagttaaaacacccattgctaaggatgctgcaaaaaatggaattttcggcatactaggtataatccccataaatagcataattgcacttgcaattcctgtagccacaggaaaagctgttaattgactagataatgtatttcctaaattttcttcacttcctgaacgtgttaccaaaatacctgaagctgttgataccaatagtgctggcacctggctcacaagaccgtctccgacagataaaatcgtatatgtttgagctgcagttgcagccgtcatatttttttgaagtactccaatgataattccacctattatatttataatagtaattataatacctgctattgcatcacctttaacgaacttagacgcaccatccatagccccataaaaatcagcttctgattgcaagtcttttcttttcttctttgccatagcttcatctattattcctgaatttaagtcagcatcaatactcatttgcttacctggcatagcatcaagcgtaaatcttgcagatacttctgcaactcttcccgcaccgttagtaataaccataaattgaattactactataatcaaaaatattataataccaactacataattaccacgtataacaaagtttccaaatgctgttataatagttcctgcatctgcttctgtaagtattagtcttgttgatgagatgttaagtgccaatctaaataatgttgtaaccagcaataatgtagggaagactgaaagctgcaatacattagttgtgaacattgtaattaaaattatgattattgaaattgttatatttaaagctaaaagtaaatctattacctgtttaggtaaaggtattattatcataagaactatagctataacaccaaatgcaattaatacatctagattatcttttacctttaattttctattgccaaactccaaagatcaaacctcccttttttgtcaattcacaattcacagtttttattgtgcatttaaattttatttcttcttgagcttcattactactaccaatatttccgctacagcttgatataaatcttgcggtatgtcttcatctatttctaccctgtcgtacatcaaccttgcaagaggcttattttctataaccgggacttcattttctttagcaatactttttattttaaatgccacataatcagcacccttcgctacaactttaggtgcctccatatcttttccttcttcatattttatagcaattgctaagtgagtaggatttgttattacaactgtagcatctgcaacagattgcatcattctcttcattcctagctctctttgcctttgcttaattttcccttttagcttaggatctccttcagattgtttgtactcatctttaatttcctgcttagtcattctcatctctttattatgcattctaacttgtaaaaagtaatcaatagctgcaataatcaccagcacaatgcatatctgcttaaaaattcctacgactaaatttttaacttcttcgcttaacaaaggtaaatataaatttgaaattcccagtatactctgataatttcctgctatgtatttataacaaataattgatattattgttattataattaaatttttagataaatctaccatacttctttttgatatcatgttcttcaaaccatttaaaggatttaattttccaaatgatggttttaaaggttcaccagttattataaaacctgtttgaagtaagcttgcaataattcctccaaccattataggtaatgcaaaaggtaataaataacttcctatttttataacagtagtaattgccaaattagaaatagttgcattatcaaaatcttttatcatgggaaaattcaaaaaatagattagaacatctttaaatccatttgttaacatcccccataaagatgatattaataacgtgcaaataaccattgtaattgccaccgatacatccttacttcttgctatctgtcctttatttctagattctgactttttcttaggtgttgcttcttcggtcttatcatcatcagcaaaaattaaaactaaaggtactgcaggtatcaaattaactatttcccggaaaatacttggtagattgtatatagccgttccaattaacttcaacattaatggaagtaatataatatatgtaataagtcctaataaattttttataggcattccaaaaatcatgattggaattgttggtactgttctggaaattaatcccaaacaaacatcggttataacaattatcaaaactattggtattgctattttcacacctaaagcaaaatattcaaaaatagttttcataacacccattaaggtttcttgatagactatagttttaccaataggtactatctttgtgctttccaccagcatatttataacaacatgatgtccatcaactataaaaaagaaagctaaagaaacaaaatatgataaatttccaagtaaagtcgatgtagtctgagttgtgggatctagcactgataccattgagaaacctgcatgtatatccatccattctcccgcaagctttaccacttggaaaattaaattagttatatatcctaatattaaaccagacattatctcacttatagcataaaacaccagcatgtagccactatttaaagcactcaatgtagaatgatctatccctgctacaattccaaatgataatataagtgaaaatactccttgcataatttgtggtgttccagttgggaaaaatatttgaaccgctataaaatatgaggttatcctcaaaaaaattagaaacaatgcaagaaagtaggatatatccaccatactgtcctaccccctatgtaataacttttgaaattaaatcaaaaatcctatttgtgaaagacatgattgtttcaagcatccaactccccaaaaatatcccaacaattgctgctgctattaatttaggaacaaaagttaatgtttgctcttgtatttgagttgtcgcttgtataatacttattgctaaccccaatactagaactactattaatataggggctgatactttcgccgctgttattattgtatccttaactacagcattaagcattgtctgcgtcatcttatttcacctcacataaaactctgtatcaaagatttcaccagtaaataccagccatctaccattacaaataatatcaatttaaaaggtaatgataccattgtaggaggtaacataaacatacccatagacattaaaacactagataccaccatgtctataactaaaaacggtaaatatattaaaaatcctatttgaaaggctgtctttaattcacttatcgcaaaggctgggattaatgttgtaaatgaaacattctcttttgttaaattctctttatctactccacctatttcaacaaataactctaaatccttttccctcgtttgtttgagcataaatgattttagaggtttagatgcctcttcaaaagcttgatcctgagttattttattttctagatatggttgtattgctttagtatttacctcattataaacaggttgcataataaataaagttaaaaatatagcaagccctgtcaatatttgattgggaacagcttgttgtactcccattgcactcttaaggaatgaaaacaccaccactattctggtaaatgatgtcatcattattactattgatggcaataatgatagtatcgtaaaaaatatcaatattttaatactcgatacataatcctgcggtgtgctatttccatctccaaaagatacatttagttgcggcacgcttgtactacttggagctgcagatgcacttatagtgcaaaatatcataattccaagagccatcatgaaggtaaatgcaattctctttttattatttttcatgcttctcttcctttgattttatattctttgcaatcttagaaaagttctttttagattttaatactaaattagtataatattctgccatttcctgcgatgctttctttttatcttcttcaatattatcaatttcttcttttgataactctgataatttttccatattccttgcagtactagtcattatatatcctttttctccaattttaactattaatatagaattatcttttgttacttgtaccctttcaataacctttatatatttattattattaataacattaaattttgaatttgctaacttaaaacttaaaaatattaatcctaaagtaactcctaaggctaaaataagttgtacaatcattcctaaaaatccaaaattcatatctcttacctactgaattatcatacttttaaatctaacatcagtaatcttaccttttgttaaatccttattaatagaatcaattaattgtctttttatagcttccctatttgctacattatttaaataatcagccttttgccccttaaagaaaaatataatatcgtctcttacaactacttgattagctgttaattcttcctttagcttagttttggtcttatcgtagcctaaagaaagttcccctttaaaaaatcttttaccaccttcatcacctaaatttactgtgaattcagctaaatccatatactcattttcaacaacaacttcttgggcatccactgttttttgggttttcataaataagtatactccaccaaaagctgctgatcctaatactaataatcctaaaacaaataaaactatcataagacctttgccacttttacctgacttttcacctttttctttttccttgtccttaccttttcctaaagccactattaccactccttaccacttgcaacaattaaagtatcaactttttttattattagctttattttaataaactccctataattatattttataagtaaaaattttgtttttgtattttataaccgcctgtctaacttcttctacgctttcaagtactatatattttcttccattggttaatgtaattattgtttcaggcacttcttctattttttctatatgatctgcatttaatatgaagtgctcatggttcatcccagttacatctatcataaaattctccccctttaataataaactgtacagttcacaatacacacttaattattattatattcactatattatttaaagtatataggtttttgataatacaataacttaccaattgtgcattgtgaattgtgcactctaaaccatattattaattaagtaaaatattctattaatatttattgcaagttgggctttcacccaacctgctttaatataatattatatatcttttattatctaggctatctcataagcccagtaattgtttgtagaatttcatctcctgtagttaccatctttgatgcagcttggaaacttctagttgctgtaatcatatctgtaaattgttctgttaaatctacatttgaaccttcaagtgctccttgaattaaagttccaaaccctccttgattaccagttggactagttgtcgaagatgattcactagtagttgcctttccagttttataaactataggtcctgaattagaagaatttatgcacatattgccaccaagctcagtcaatccctccggatttttaaaacttgccatagcaatttgaccgattgcagctctcttaccatctcctaatatagctgtaataacaccatcttttccgatttcaaatttcttaacaggctgtgttactgcatctgctgcacctggatttcctgaaatagtgacactatctggtatcaccaaaggtctcattgtattatcagacactgttacctctttagaatctgcatttacatagttggcatttataatattatttgttgaatcataaactaaactcttagccccatcagttccaccagtatttttagcgctagttaaataatatcccattaccctatgtccatcagatgttaataaatttccttggtaatccagcatgagatttccatctcttgtaaacaaagtttctgaaatttctccagtagcatcaggagctgctgtatctggttcacctgtagtttgtttagcaccaattccagaattcaaatcgcctttagatactactaagtatccatcaccatcaatacatacatcaaggcttctacctgttgctaatgcattaccttgtcccataactttattgatacttgaaacttgtgctcccaatcctatctgcttagcatttgtacctccaagtactgaagttggtgctgttgcctcagaagaattttgataaagcatatccttaaatcttgcacttgaagacttaaatgctgttgttcctacgtttgctatattattacctataacatccaatttagtttgattaaccttcattccgcttatcccagaatacatacatcttaacataaacatacctcccaatctttttgattataacttgtctctatcgttcaacaagcttaggcttccgtaaccaattcataattatcaattcacaagtcacaatgatggatgaaatgccaaggcatttcttttaattctcaatgctctttttctaaagtgaagagttctcatttgtgtttcctactttttgtagatgtatattttccaaagcacttagagttttgtcccttcattgttcactgtgcattgtgcattgtgcattgtttaaaggtccagcctattataaaatcactacgctatctacgttcgtaaatatattatcttttgctctatccttttctacagctgttattaaagtcttgttttcaacactagcaattaatgctatatctttatataacataactgtatttttagaatttttatcttgagctattttaaaacccttttgtatttgttccatatcttctttagtaaaattaatctcatttaatcttgaagcagcatgttttgatatagtaaaactctcatctttacatttaacaccatccagtacatcctgaaatcttgcttccttctgtttgctattaggattattacctacagccttttgagaatttgcaaattgcccaatattccctacagaataagcttgtccattaataattctataactcatttatacacctgctattttggctagaattgcattttctgcagctgtcgaatcattagttgcacttgaaattgtatttattgttccatttgaagatgcactcgtagtattgcttgctgttcctgtattagtgttagtgattgtagcattatttgctgtttcactgtttgtattagtacctgtcgagctagaattagtagttgttccgctgccactagaattactgttacttgaactgtttgtacctgtttcgcttgtactttcattaggagtagtgttatttaaatttactttcatatcatcatctgctaggtcaccagctcttactatatctccataatcataagttttagtttctcctgttggcttaccgttgtcatccaaaacatcaacttttatctttacagtaggaccactgacaatgtcaatataagcaccagtaatctttccttttattaaaacagtcttcttattatcatctaaagttgcaatcacaactttttcttccttattagctaaagctgaagcggctaagaaatcagaattaagagcagttctactattagcatttgtatttgaatcagttgtttgtacagttccaattatattttcaactgcaatttttgcttctttcccattaactaacattcctaagtatgttccgccagattctttcaatacctgagttacgtacccttgtatataagaaccattatcgtctttttcattagttattactgttctaccaatcatttgttgatacgctgaatctgacatagtggtatttaaattctgcatttgttccattgatgcgaattgagccatttgactcacatatgcacttgaatcttgattttgagttggatctaaattacttaattgagcagataatatttttaaaaatgaatttttatccatagtattatcagttttctttaagatcttagttccattcgcagttgtacctgagctggcaacatttactgtcgaatcatttaatgggcttaatttagtactcacgcttctacctcctatgcaaaaaattctatattactatcattagcttcaatattttccactaaatcttcttcactacctgctaagtcatttcctgtattactatttcttgtgctatttcttctctgctcctctgaaagctgtccaccaaaactttgctctctaaaaaatgtagtatcgtcttgataaagttcaatatttacatccgctatttttaaattttgctccccaagctgctttttgatatcagataaattttgagaaattaaagcagttgtatcttttgaattagcttttagatttgctttgattactccatcttcctgaacaagctttatagttatctcacctaaatttcccggattaacttttactgttaattccttaagtgaattagtattcataaacttaacgtcttttattaagtcatcaacaaaagtagctttattgattgtaagtcctctagtgttatttactccttgattctgtatcgctgaagttctagatgcaaacaaattaattttatttaatgagtcatctttattatcatcaattaaagagtttaagaacttctcctcttttgaagttgtaggagtattattttttgatgctgaagaatcatcatttccgccattgtcttgagaataatttttacttaacatatcttcaagtgttaaaactttattacctgcattctgcttgttttctagcaaatcagatatttcagacattattcctcttaaattgcttttagtagattccgtggcattttctttaatattaccattcaaatttcctaaaagtttttccattaagtttaaagaattagagtctaacttactatttacggaatcattttttaataatcccattattttttccatgatactatttaaaccaccattagatgatgccccatttgcatttaagtcatcttgttttattcccaatttagcaagcaagcttaacaattctgataatatgtccttcattttatccttagatgctgatttactttccttttctaattcctcaagcttttcatttaattcttttgtatccttataagtatctttaactccagttgaattttgtttttgatttgcagaagatacatatccattatcctcatgatctttataatcactttttgatttcaatacatttttaaaatcatctttcctaggagtgtatgaattattcaatgttttagtaaattccgaagcagatttgcttgcaaaatttgtattagaagcaaatgacttcaacatgctatctaaactgtttgatgattcatttgaattttttgtagctgtaaccattattttcacctcctttcaagcagtccaattctataaattgaaatttaattaatattaactccatctttacctctaaatcatatattaatatttttaattcttctgatttctcacatatgcataaagagctaactcatcaatattaatttgttctattctatcctgctcttttacatattcagaatacttcttttcttttaaggtctgaacagtctttctttccatctgtttagccgttaaatcttttcttctattttcaatctcctgatttttgacagccaaatccttctctgtggattttattccactttgaactccctgtatgtagtatctttttaatttctgatatacaacatcctcatttggagatataccattatatttctggtaatttgccttaagttcttctaacttttcttcaatcttctttttttctctctgactttcagtaaataatcttttactttcttcttctttttccattctcatttcaaggagcttttctaagccaaacttaaatttctcagccaaaataacacaccttctttttataattcacaatttacaatgcacaatgcacagttcacaattcacaatgctaaattcacaatttaaaattcacagttcacaatgcacaattcacagtttatcattgagcattcgtcattgttactttaaatacaacttgccacttcccacttgtaactttcaacttaccatccatcacttgtaacttgtcactttactcctgtatctctcaagtttccactcatcacttgtgactttcggtttgcaacttgtaactgctcctgactatttaaacattgatattaaagaattttgtgtaccttcaaaagacgttttttcatcaattctctgacacagaaaatcatttaatgcatcattgtagttgattgccatatcaatctttttattgcttcctttaacataagcccctatatttattaaatcctcagagtccttgtaagttgctaaaagatctcttgccatagatgcggcttctttatgttctttaggtgctattgtgttcataagtctgcttacactatttaaaatatcaatggctggataatgatttttatgagctaaggctcttgataaaactatatgcccatctaatattcctctaacagcatctgctataggttcattaaaatcatctccatcaacaagcactgtataaaaggcagttattgaaccatctatagatgttccagacctctccatgagtttaggtaatttagcaaatactgaaggcgtatatcctttagtagctggtggctcccctattgcaagtccaacttctctttgtgccattgcaaatcttgtaactgaatccatcataagaattacttttttacccttatctctaaagtattcagcaatagcagtagctgtcaatgctccttttagtcttattaaggctggcttatctgatgtagcacaaactacaacagattttttcataccttctggtcctaaatctttttctataaattctagaacctctctgcctctttcacctattagtgaaataacattaacatcagcttttgcttctcttgctatcattcctagtgtggtacttttaccaacgccactacctgcaaagataccaattctctgtccatcaccacaagttaagaaaccatctattgctcttactccagtaggcattatttcctttattctttttctctttaatggatctggtgcatcattttctagtggatactcttctccatccatagatatactatcgcagtctaaaggattcccaagtccatctattatatgaccaagtagcttatctgaacattttacactcagcggcttacgttgtggtacaactctgcatccaggcgaaattcctataagctcatcaagaggcattaatattacaaattcatctctaaatccaacaacttcacaatttacaggaacatttttctcattatatattatgcaaagttcaccaacaaaagccttaatgccttgtacttcaatagtaagtcctattactttcttaacaacaccttcactatatattgttgaagtatcacttgcttttttaataagtctatcaaaatccaagtctaaatccagcatttataactactcctttacagttcccaatgcacagtgcacaattcacaataattgataaaccctaaagttttttagttttttaatttttataaaaacttgttcctaaattgtgaatcgtgaattatgaattgtgaattatttatcctaatattgcttttcgtatttgctccattccaatatccacgcctacttttactataccactgtttttttctaaaactgcatttcccggttccataaaatcatctgcaagtacaaagatttcattttttatattatatgataccttccatctttccacctgcgattttaattcttcagcatgggttgaattcacctttaaaataacattttcttctccttttgagatcttaaaagcttcttcaataatattattcatcgcttcattggtacttagtgtcttctttgtaatattttctgcaatttctagtgccaactttactatttcatttttcttactttctagatatctctcgtaattttcatgagcagattttagcatcaattctgctttattaacaatatctgccgcctctgcccttgcactttcaattgtttcatcataagctttcttatatccatcatcatatccattttctaacccttgagcatatcctttttcatatgcttttttctctgaagcattggcatccatttgtgctcttaaaacaataatctgcttttcgtttttagcatcctgtattatcctttgaccaatatcttcatacctttttagaagttcttctggatcaatttgtggagctttcactacaatttcttcttcctctttttcctcttctatttcttcagatgctgcctttttactaacatactctgttgaaatgactttacttgttcctgactttgcaaagtccttttttattaatctatacgatgattgcatcttctccacctcttgcaatgatgatttcattagcatcatctaaccttctaataacagaaacaatcttttgttgcgctttttcaacatccataagccttactggccctaagaattccatatcttcctttaatgaagcagcagctctcttagattgattcctgtatatagaatttgccacttcatcagaacatcctttaagtgcaagtgcaagatctccaacttccacctctcgaagaattctttgaatcgatacgtcatcaagcgaaataatatcttcaaatacaaacatcgaactcttaactttatctgcaagttctgcatcttctctttctaagccctctgtaatattcttttctgttgttctatcaactgcatttaatatgctaactaaagtttctacaccacctaaagttgtcatttcagttcttactaccgaagataacttgctctcaagtacagcttcaatttctttaattaccattggtgacgtattgctcatagttgctattctataagcaacttcactttgcgtctcttctggaagctctgccataacttgtgctgctttatctggctgcaagtagcatagaattaaagctatagtttgaggctgctctgatataattacatttaacaattgatgagaatctgcctttcttgcaattgaaaaaggtctatattgagccgttgcctctgatactttatcaagtatttcgcttgctctttgagttcctaatgcttttgacaataatgttttagcataatccataccaccttcaattatataatctctagctttattcatttgataaaattcatttaatatttcttccctttgttctggagtaacagacgtaatattagcaatttcataagttattttttgaatatccgcctctggtagctttttcaatatcccagatgaggcttcaggtccaagagttataaataatattgctgctttatgcacccctgtcaattgacttggttcttttgacatagccatcacctctcattttcagtcaaccatgacttgattatttctactacttgatctggtttttctgttgcatatttctttatctcttcttctaaatgtgatttttgagtcttagcctcaaattctattggttcaaagacatcatctggttctttaggtaatatagtatcatcaattaaagtatttaataattgttcattttcttctttcttcttctttcttctctttgcaacgaagaaaataataatacctaaaagcaatgctcctaaaattcctgcagcaatcatcatcttattcttactagctgtagctgcctctgcattcatagcatcaatttctgacttagcttggtcttgagccgttgtatcaaatgccattccaaccacagaaaccttatctcctctaagtgtatctaatccaattgcatttccaactgcattttctaatgtttgttgtgttgcggcatctaaatttccatctaccataactgacgctgtaagccttttaacttcacctggtgcactaataactttagattcactcttacctacttcataatttgtcttctgatcctctttatttgaagttgaaggattattatttgtagctgtagttgtgttactcatattattatcaacaggactttgacttgcagttgttgatcctgaattatttgtttccttagaattttcttggcttacaattactttattcggatctactactgtttgtgtcttttgttttgagtcaaaatctaaattcacattaacagtagccttaactttacctttaccaacgattggctccaataaactaacaattgccttttgcattctatcttcataagatttttcggcatcttgttgctttgatattgtttcagagcttactgaattaccttgatcagaatttatatccttagtaagtaaattcatgttatcgtctataacatctatgttttctctaggtatgttttcagttgccccagatactaacgctactatcgatttaacctgatcttcgccaatagttgtccctttttttaattttagataaactgctgcctttccaggttctttatcctttacaaaaacagaatccttagcctcagttatatgtactcttgcttcttctacttgtggaaaactttttattgtcttttccaactcaccttgctgcattctaactttttttattttaaattcttcatccgtcattccaaaggaacttccactatccattaattcatagcctttacttccagatgtcaaagttggtgctagctccaaccttaatttatccacttgatccttaggaacccaaatcgtatttgtgttactatctattttagtatcaacttttttttcatttaaactattaacgacagtttgagcatcagctgcatcaagatcagaaaatagtacttgatatttgttagaagatgagtaaaaaatcccacttataattgcaataataactgccacgattgctactattatagcagcttttatcttcttattcttggatttaaacttttccaaaagccccttaactttttctaaaagttttttcattattaagctctcctcaccttactacaattgcaacctcgataattgattatatccttccaataacttgtctctagtttgtgctaaaaactgaagactcaaactagcctcctgattcttaaccataacttcatcaatattaacatcatcacctttaataaactttgttgcagtttcatcagcttgtgtcatcttaccgttggtatcatctactgccttttttaagacatctccaaaattaactgagttattgctttcattattgctcttatcactattgatatctttaaatttattattaaatataatttcattttgtgcaaacttatcttctattctcatttttcatccccctacttaccaatttctaaagcttttgaaaacatgctctttaaagcattaaaagtatcaacatttgcctcgtaagatctagttgctaccatcatatctgccatttcatttaatacattcacatttggcattgtaacgtatccattgctatctgcatctggatgcgttggatcatatacctttcttaaaggtgatgaatcattttcaattttaactgctttaactcctgccatatctttattagcatcaagagcctcttgaaatacagctacttttcttacatatggacccttaccatttgcacttcttgttgtgcttgcattagccatattagaagttatagtatccattcttaatctttctgctgaaagacctgttgcacttatctgcatagaagtaaatgcattcatttatactcctcctttatttgatcaataattccaaatttcctagcttgtctaaatataatttctaattatgtattatttttcactatttaataacagtttttaaattattaaacttattatttatgtcagttattaacgcattatatttaagagtattggctgcttgatttaccttctctatatctaaatcaacattattcccatcacttctcatactggtactcttatcctgttcaattgatatattatcaccactatttgaatcactacttgaaaagtgacgtggattagtgcgttttagctctaattttgagaattctccctgattctttaaattttcctcgaatactacattaaatcttttataatccttcgtatttacatttgccatattattagcaattgttttagctctaacatttgatgctttaattccttgtttaatcaattcataagtagcatccgaactaatagattgtattgccataaattcacatccttacattttgccttctgcttgcataaatatctaaaactttcagtacaaatattttattttacacattattagaaatatgtaaaataaaatgcttttttcctcacaattttcacctaagtaaaatattacattttattttgaccaattaataatttaattatagaataactatgcaattttatctataattttttgaaaaatgttttccaatttatttactaattccgattttttttggttttattgtaatattaccccacatattaaaccttttaaaataaattaaatgtcatttttagactttccgctgtatttatctgtactttggcctgccatatatccacaaaataaaaggtgtctataaattataggcaccaaaaatatttaaagcaaaataaatataaactttattaatatgttgcaattcacaatacacatttctcaattcataattacggctaaaattcttgcaatatttttagaattatcatgaagaattatttttgcaacatacatataattatcttatgcctagttttgtaatactcgcatattaacaaataataaaacaaatcaaacacaatgaaagatcttattttccaatattattcattaagattcgagataacattaacacgacattaaataagttcaattagtcttcaatataaattttttcatgaagctaagaactaagtttcactttatattttggcaacctgacaatcatagaaaattaaatttcccttagactcatggctttgcggccttatttttcaacaagtgtgctagtatcaatataatttgtccttttaaattataatgtattttggtttatttcaccacaattatttttaattttcgataaaatcatctaataaattataaatttcattataattcattcaataattttcgataatcaaattttgtataaatataaatctaatatttcacaaaactatccattaaaattgtttaaatcatttattttaacgtgagttcgatggaaaaatttaagggataaaaaatcccatcaaaatgttttattatataagtgcgaccaaataaataaaacaaaggatgggattttatgcaaaacttattagtagaaatattttatgatgtagacaatttttgtattggatttgaaaattactgtaaaagtcatttcctaacggaaaatagcgaccgcaaatttgcaatgattaaaagtaaaactttatcattaagcgaagttatgacaataactatctactttcatttgtcaaattacagaacttttaaatcatattatattgagcatgtgtctactgttctcaaaccgtattttcctaagcttgtgagctacaataggtttgttgaattaatgcaacaatcattagttgcactactattatacatgatgaaatttagaactggcaagtgcacaggaatttcttttatcgattctacaactttgaatgtatgccataatagaagaatacactctcataaggtttttaaaggaattgcagaacgtggtaaaagttcaacgggctggttttatggttttaagcttcatcttgttgttaacgataaaggggatattctctctttttatctaactccgggaaatgtagatgatagagaaattaagactatagaaatattagcaaaagatttatttggaaaactttttggtgacaaaggttatttatctaaaaagatctccgatattttgtattccaaaggtattcagcttataacaaagataaagaaaaacatgaaaaataaattaatgttaatggaggataaaattcttcttaggaaaagagctatcattgaaacaataaatgaccaactaaaaaatatatgtcagatagagcataatcgacatagaagttttactaattttgcggttaatatagtttcaggattgatttcgtatagttttcttcctaagaaaccttctcttaagttggacaaatatctaactatggaataattggaatatcgaaccacaagattacaaggatacttttttgctttttttcataaccatatttacccataaaatattctagcttttcgaactcacgttattttagttcaaaaaaatataaaaaataaataaactatagtaaattttgataatcaaagtttactatagtttattttgtattcattccacttaataaattatttcacattagccaaaatatttaagcaatctttaggaaaattattactttgtgccattagtccaattgaggaattgactaacaactgatttttagaatagttcatcatttcctcagctatatctgcatctccaattctactttgggcagtttgtacattaatatctttattgcttaaataatctgatgtactctctaatctattctgtattgatccatatttacttcttatcttactaaccatttgagtcgctttactaaccgcttcaagcgctgtatcagcatcgtttatatccaaatcttcaattcccaaattctttggagtcagatcaaaaaatggtacatccatactttcaccattcatatttccaatggaacctttaattgtcttggtgggatttgaatctaaagtagattgactaggcgaagtcattttaataccattaaattctgtattgtttgctaaatcgcttatatcttttttaatactatcaatttcattttgaataatttttttatcattagcagttaatgctccagattcagcgctaacagttagttctctcattctatttaaactattatttatttcttgaagagaaccatcaaaagtttgaagcatagagttagtgtcttggatatttttgcttgcagcatcattagttaaaatctgtattttcaatgtttcattttttcctattttggctggattatctttagcagaactcaatttacttccagtacttatgttatttaatgctttagattcatctgtaattctacctttatacgtcttatatatgtttaaagaaaacatattatgagtaagtctcactttaaaaaacctcctttttctttattgcttataaaacaattatactctgtaacactctttcttcttcaagcggaagataacacacctacaagctcccggataaactcaactaaattcagctagagtataaaacgtacctaaaaagtttcactttatacttttgcatctatattagtacctctacttgcatctacagccatattactattattcatcatatcagcaatttgagttgttgcagtttcaacactactattcatagccattttcataactgataccgaaaccgcattttgaactgctgattgatgcatatatattgacacttcagctatatccataagatcaaatcctttctcttaataactattaatttattatcgtactcctaaattattcctttagcaataattctactgcaatttttttcatttatgtttttttcattaggtagataaaaataagcattaattgatatttttcattaatgcttattctaatattctccactcgctaatgatttcacttttaaattagaaacttatgttaattcgcttttttgctgcttcataatcaccgcacatagaatagtattctacagccttttctttaatacctaacacctcatatataacccctatgttataatacgaaacaaatgatgttattccttcaaccttgctatgttcgaatttagtacatttaaacaaacattctattgcttttgtaaattgagcattgttcatatatattaaccccatgataaaataaaaatctgaagaatttgagtaaagctcaaagcaattttctaggacaagagcatctgaatatctaccactattgattaaagagtatccatatgtttctaccaagtcttcaacatattccaattcaaagtccaattgaaaggataatgccttttcaaaatatgaagtagcagtcttatactcttttagcatataatatgatttacctagttgaaagtaagtataagggtcttctgaatcatttttcaatgctaacttcaataactctatatttctatctaatttatttgttctatttaaaacttcctttacatatcctaaatgttctgcagttatatttacattttctgtttcataaaacttattatcaaaagctacaatctgttcgtgaattattccttcataatgaaaatattttttattaaagagcctatttaccctttccatataccttttatttccatttgaatcttccattaaactaattctctgaatcctgccgactctatttgtatttgatgaactatttataaattcatatatcatatctttatcaaaatttataataaattcatctgcatctagtacaagtatccactcatttgaagcttttaatattgaaaaatttctagctttagaaaaatcattacaccacttaaaatcataaatcctatttgtaaatttcgatgctataatctttgtgttatcatcagatccagtatccactataattatttcatctaccaactgagcaacttttgataaacaacttttaagattttctgattcatttttaactatcatgcataaacttaacatatttcacctcaacacatcatcattgtttctattatctgtgtaacattaattatttcttattacatcatttaatgaataattaagttatttcatatagcaggttacatagttagagttttaaaaatgaatgctttccgtacttttaacttaattattgatgcattgatgcatatccatctataccttaattattttacgttagttattatgttacataccttttctatctcaaaatcctttaatcctacagaacttggtaagctaatcccttttacctcaagttcatttgttatgctcatatcaccacatttacaatgtttaaatggtggcatattatgaactgccgtaaaaaatggtcttgattcaataccaacttcactaagcttctttattagctcatctctagatattccataatcgtcttctattacgatcgaatacaaccaataaacattttgagcccatgctttctcagtaggaatacttatgtcttttaaattacttagcattttgttatagtgattagcatgttctctcttagctaatatgtattcttctattttttctaattgggcacatcccatagccgcaagtaaattcggcattctgaaattataccctacttctggatgataaaatgctttattctcagtaataattttagtctgagtagataaaaatttagctctttctcctaacttttcattattagtaaccaacattccaccagcaccagtagtaataagtttattaccattaaagctaaagcaacctatatgtcctatagttcctgatgatttttctttataaagagaaccaagactttctgtagcatcttcaacaacatataaattgtattttcgagctatttccatcactttatccatatctactggatgcccatatatatgaataggtaaaatagcttttgttttttccgtgataagttcttctatcttatctgcatccataacataagtatccctacatacatctacaaataccggctctgcacctacataccttatagtgtttacaggagatataaaggttagagatgatactataacttcatctccttccccaatgcccaatgttctaagagcaagctctaatgctgttgttccattcatagtaactacagctctttttgaatttatataactcgcaaaattttcttcaaatttatcaacataagaacctgctgaagaaacccaattagtatccaagcattcttttacatatttccactcatttcccttaatttcaggaatacataaaggtatcataatcacaaccccaatcatatttgataatatgtgttattcggcaaatattatatttatcatcaaaacgcacattacgctagtaaaaatattaattaaacattataaatatccgccttaaaatactttaaattatttttaatccattcaatagtttcttttaatccatcttccaaagtatatttaggggtccaatctgtaagttgttttattttcgcattatcagcccagagcctattcacttcacttttttctggcctaattctttcttcgtcacaaattatttttacctcttcaccaataatatcaataatttttttcactgtatcgcctattgatatttcacaattagaacctgaatttataatttcacctacagttttttcactttcagcaattttaataaaagcctctgcagtatctttcacatagctaaaatctcttgttggcgttaaacttccaagtttaatctcagttttgcctgataatatctgagatattacagttggaataacagctcttgcagattgtcttggaccatatgtattaaacggacgtatagttgcaactgggagattaaagcttcgataaaaactttcagctattttatcagcacctatttttgaagcagaataaggagactgtccctgaagagggtgaccttcatcaataggtgcatacaatgctgttccatatgtttcagaagttgatgtatgaattaccttttgtacatcatattctctgcaagcttcaagaacattagtagtgccatctacgtttgttcttacataggccattggggatagatacgaatatggaatagcaattagtgcagcaagatgaaacactacatcctgtccttttataattcttttcattccatcatattctcttatatcccctgtaacaacttttatgttattctttatcttattattaaatgtatctatccatccccaattattaaaagaattatattggactaatgaagttacatctgcgccaatttctacaagcctctctgtcaaatgactccctataaaaccttcagcacctgtgacaagcacttttttaccttttagattcattttctccctctctccgaataaaaattttaaaataatgatacactctttattatttttttgtcaaatatactttatttactataatatttcttttaattagtttattattaagttcagatatatccaatattattttaataatattgatttatattcctcgaattcatcagtagctttctggtaatccatatgtgtacccaagtctaaccaataccctttaaatctgtactctttaatcattttctctttatttatcaattcttttatcaattccggaacatctactctttcatttttcttaattaactttatcacgtcggattgtattatatacactcctgtgctaatgttatatctatttataggcttttcaatataatcaataacctcgttattttcatttgtttttatataacctaattcaagcttatattctttctcatatgctacaatagtataatctgcctttgaattcacatgatattcataaacttctctataatttatgtcacttagtatatctccattcattagcaaaataggttctttcaacgatatattgcttaattttgttaacggccctgcagttcctaacggcatatcttcatcaacataagttaatttaacgccatacttagaaccatcttgcaaataagcttttacaatatcccccaaataccctatagatataataatttcattaaatccataaaatttaagttgtttaataattatttctataatactatgttttcctataggcataagcggtttgggtaaaattgtagtataaggaaatagtctagcacccttacctccagctaaaatcatcgctttcactttatcaccttctattatcaataaatttattatttctaaatttttatctaattaggcttttataaacctttacttatttctaaataatatttcgtcaagatgacaacttccatattatctcatggttattttcacagtttaatctcaatatttctctagattattggctacatatagcaacttatcttcaacttcttctatgaaatgtattttaatatctctgcttaacgtctaataattatccataagccaattctttataacactatctatcacttgaattttttgcatatgttttaatttattttgcttttttatattttaaaatacattctctacttgaagttatattaattttcatctactgaaaaaaataattcagttaaccctttataaatatcatatttaggttcccaatgtattttatcatttaacttattaaaagacataacacttcttttaatatctccatatttttcttgcatataaacaggttctatgtctttagatagtatttcagatataatctttaataataaattaatagatatgttttcattggtgcacaaattaaaaataccagagatatcttccttaattgccataataattgcatttactatatctgttacatatataaagtccctactttgttcgccatctccataaataataggattttgattactttttattttcttataaaaattaattatcactccaccttctccactagtttcttgacctacaccatatacattcgaatatctaaagcatatataatccaaattatataatttcttatacacctttaaataatgttcaattgaatgctttgatactccataaaatgaattcatatttaatggatgtttttcatcaatcggtaaatacaaaggctcaccatatactgccgctgaactggcataaataattttcttaactccatgctttctgcaacattctaacaaatttatagttccaataatatttatatctgcatcatttatagggtcatttattgaatctgcaacactaatttgtgctgcttgatgtataacaatatccggctttgtattaataaatacactaaccaaattcttatcttgtatatccattatgtatagtggaatgctaggatgcaatctttctttctttcctgccgataaattatcaactactgaaacattaaaattattttcatagagtgaatttgatatatatgagcctataaacccagctccacctgtcactaatatattcatcccacacctccatattaataaactagacttataatatttttataaatttttgttttaaatcaaaatatttattcataaatttcattgcattctccttatcaaaaatttcctcagccgttttacttattattttatcaatctttttacattggacattatttatatacttatctttaataagtttggacacagtaaaagaaattctaattggcatttcacttactcttttttctatacttctagaaattgcattctcatctcctctttcatatcctaaataagtataataaactggaacaactttctttattaagccagataaaaccaaaaaatttgtaataatagcatcctcgtcataattcaatctttcaatacctgcttttctcaaatgtccactaatataaatataactctccattaatttgctcttcgaaataatagtattagtcattgataatctaccactcaaattatatatttcttcagatatataatctaaagccttaggcatcaagaagttttgccaaaccgaaccattgaattcaccattattcattaaagcagatgaaaccggtaaaataacaccgtctttaaagttttttatatcatttactaatcttttaatcccattacaatatacaatatcatccgaatcatgaaaataaatatatttcccagttgccctttttattccaataaatcttgcattaaataaacctacgttatctcttacactctcaatactatatctatggctaaaaccgtttagtaaatgttcttttagtattttttctgaattatcacttgatccatcattaacaaaaataacttccaaattttcataattaattctatgtaaactatctacaagttttttcatatatttttctgaattataaaatggaattatcacagaaaccttaggtaaatcattttctttaataataaccttattattattaaattcaatatactcattatcatttaagcttttaaaatttttaacatattcttcatcttttgttgcaattacaattaaccaagacccaatattgcttttgttcagaaacatactttcaaagttttgagcaattgctattggaacggcttgtggattaactctttttaaatataaaggttcatcgatgcatccaatcacacattcatacagctttgttaatccagcattttcgagataataatcaaatgattcaaaatcatcctcataaccatattcccaggttcctgtagcttgtgaaaacttttttgataatttataaattttagcttcactatatggtattccaattatgacaaacttacctactcgtcccatttctttaaccatttttaatatttcttcttttttaaagtgttctagaactcccatattaaatgcgatatcaaatatattatcctgaaaacttaaattgaaaccatcatctttctgaaatttagcaccatcaacattaaaatatttcgcattatttgatgctaagtttaagctctccctacttacatccactccaatacatttagctcctcttaatgataattctatagaatattgtccaccgccacatcccacttctattatctttgaattacttagcataaaatatctattcaaaatctctataaattctgatcttaaagccattccgcttaaatcatttataaatgccattggattaacattcgaataattttcccataatgtatcccataccttatttccaccactttgattttttatattttgttcgctttctgaatttttagttttcaatttaaaataacttttatcataaatcgcggtccatctactaatattcttttcccatgcagaaaaatcccaaattattttctcatttttttcacatttagattttatatttttaaaatttctaactatgcttaatattgtctttcctacatccttaggagatgacacttcataataaaaagctcctgtatccttaactggtttatacggcaaccattttcctgttataaccacgctcccgccacacatttgttcaagcattgatgcacttaacacgtctgtagtttgaacctgaatcataatatctgaaactaatgcccatttagcaacatcatcattctctctaaaatcctctaatattttataattaaatggccatttattaagactatcctttatcgttgctatgtacccctcatctcttgcatatgtcattggaaaaacaaaaaataaattcttcggcaattgttttttcatatttttaatagtatctataatttttatatgattatgtgcaggatttgcactatatccacaagtaataactatggaatcttttggtataccgaattcttctttcaattgttctttaggtatatttttaaattttttaatatgctcaagaacaactaatccaaatctattaatatttgttttatttcttaagttttctccataatactgcaaaaattcttcacaagtaacttcattctcaaatgttataatatctgctttttcaatcaactttctctgctgttctttttgttcattattagttctataaaaatcgctaccccatatagaaataattaatttattacacttgtttctaatgatttctgaaatttctccataaaatggatccaaaaaatgtacatgaattatgtcatatgattctttagagattagaatttcactcatcctatttaaatcattatatgtatatacatttttaataactccattcctaactttttctttataactattatctacagttagtatatcaaatttaatatccattttatcatacattttttctgtaaattcttttgtatatacagaatagaaattacataaaatcaaacatttttgcgtatcattcgtttcatattcatttttacttaaactatttttaaggaattcttctacatcttcattcaaattcaatttcactataatttctttaattgtttgtttaatattttcttttgcttcataatcatctgtatttatatacgcatttttatagtattgcaatgctaattcatatttatctttattgtaatatatatatcctaagttataattcaaatcaaaattataactttcatattttaaagcatttaacaatacatcctctgcctcatctatttgacttttcatcataagaataactgcttttattgaatatacttctacatcattatcaactatctttaaatagtcatctaccaatgtattagcttcatctaattcattatgattaataagaatttgaatattctcttttatctgatttttcatactttctaaattttgttgcattttatcacttcccatttatgtttttatacgacattcagcatatttcccctacccattaatgtctgtacctccaaacattacagctatttgagatttgaataacaatatctcaacatctccttttacaattgattcatattcttttattattgtctcagcttgatctatcttatttgcatcgattaaattttttattgtatttttaacctctgtcttatatatttcaaactcattattttgttttacattctcattttttatttcttcactcaaaagttttattccatttttcattatcggatgttcctttaatgccatttttaaatactcaataaatttcaaattatcattatttttatgtttaaatgccttattaataaatacaaaaaataattcttctgaatttcttaataatattttactttccatcgctaaaatatcgtcactatacatactttttatatatttaatcccatattttaagtattcgaaaaaatattttttataattctcttctaatttagaagttattaatatatatttatataaaatcattctaatttttgtaatagctatattctcttcctcttcatctaaaccatctaaatatgatacaattatttctctaaaatcttcatgattattagataaatattgaaaaaatctatttatattatcttcatacaaagtatttaaaatttcatttaagttcttatttgtcttaaaactaatatatataatttctccgtaaaaatctggacacccatttaaattaaattcctcaataaagtaatttaatttattagacactccactaacactttcttcaaaatgaattctaataaaatttaatgatccatagttattttctatagaagaaaataattcatttaatttccatttttcatttacagaaattaatttagacttttcctctaatacaatttcaaattgattttttaaattttcttcatatatgtatttcaaataaatattcttaatttcttcatatttttttaagtatatatatgaatcaattaaaatctcaacagaaccttgaaaatcaaacattttatttattttgaataagtactttaatgcactttcatattcttttttttcaaaagaaatttgtgacattccataatatgcatcatctatattctccatggaatatgttcctatactctcatcatttgctattgaaaggttatgataattttcaagtaagttaatatatttattataactaattgctgcattttcataatcgcctagaagtttttgtgattgtgccatacaaaaccataaatccatatagtcttcacatattgatatgccttctttacacgctatttctgagtttttatatttaccatttttaaaataagtcacagctaattggtaataaacatataaataatctcttttatttaaattacttttaattaatacattatatgctttaactgcttcttctaaactttctttaatatcctcatgttgtaaatacgaaaccgagagttgaaatctataatatatgttctctggattcttcaaaagttcgctctttaaaagagttgctgtccttgcaaactttttttccattaactctttgtccctcatattgtatccataatgtttaataatcaaaggttcaaaatttttagtaggcaattcatacgtaggaatattatgaacagccccatcgtatttaaaagcaccgttatttctaaataacctcaatgttgtacaatatgctttatcttctaaattaaaatccttatagtttacggctctaaaactagcagatttaaaattaagtttttcatctgaattcagaaaatctgctatacaatttgtatttacccactcctcatcagcatctacaataagtatccagtcacctttcgcataactaatggttatatttcgcatttcggaaaaattattattccatttatgaaaatacactctatctgtatacttttttgcaatttcaattgaattatccctagagcccgtatcaactataatgagttctgaatctataattttaataataggctgcaaacttttcaaacatctatctaaacatttttcttcatctttaatcatcatacatatacttaatttcacgtctatcaactccatattttgaagattattttttctttattatttctttctgtagcattcttatattttttaaaacttctatattttcggcaggatttcctgccataatttcattatcagatacactttttgtcacaacagcacctatgccaattgtaacattattaccaatgtgcaccttttgaattattgatgaattaggacctatccaactatttctgcctatatgaacacttccacttatttctgcattagcaataataaaggtcccatttccgattttgcagttatgggcaataaatacgcagtcatcaattttaacataattatcaataattgtaggttctatagtaccagacgccacagatgaaagtgcaccaacctctacattatttccaattattactccacctaagtgcggaattttatagcttatttcaccttcatctctttctattccaaatccttctccaccaattacactattttctctaatgatacaatcgttcccaatattacaatacttattaattcttgcccctgattttattatacagttgctgccaatagatacatcattgccaatcgttacaaatggttctattattgtattactacctattgtaacattttctccaatgctgtaccctccttcggttattttactcctatgagttaccttttgatttttcattatgtactctaatattttagcatattcttttctcggattttcaacctgcattacaacactctcactatttgctttaaatttaaaatcaaccttatttgttagtattaagcaatgcttaagcttatcaatttcctcttttatttccaatgttaactggcttataaaaatcaaagtattgttttgcggccttttaattgtagaaacagaataaagtgtaaaatcactacaatcaatatttttacagtatattgtctcaattagttcttttgcatttgcttcaaatttatttaccataaaaaattcacctttacttatatattgctctaataacttcaaatacttcagcgtacttttcacctatttgagttcctctagtgcttgctaaacctttaataaaattttcattggcataatttctaaatttctgtgattcataacaattaaaagcggctatttttttatctatatgtttttcttccaatatgaaaaatgcctgagtattaatatttaaattattccacaacatttcatagcctaataatgaagtatttttaaaggcccttacgccttcctgggctatagtctgatgatcttgatgtatatcatttagacatggcatcaagaccaaatccggatgaatttcttctcttatattaattaaattttgtaatatttcctgacgatattgcggaaatgtccttactgaataattaaataaaaataaattttctggttttattcctaagacttttgtcgcatttctaagttctatttccagtatatttttcggaaatccttcaggaacagatatctcacaaacagaaaaagcagcataataaatctctgctccatcttctattaactttgcaattgtgccgccacatccaagttcaccatcgtcagtatgaggcgcaagtatcaatactttcttatacatatttttatctcctcacttattacttttacacaaaattaaatttataatactctgcaaaagtaataaatcatatcaaaaaaggggggtagagtttacctctgcccctcttagcttttttaatattaaaaacatcaaaattttactatcttaataattgaagaacttgttgtggttgttggttagcttgtgcaagcatagcttgagcagcttgagaaagaatattgttctttgagaaagttgacatttcttttgccatatcaacgtctcttattcttgattcagctgatgtcatattttcacttgatgttcctaagttagctattgtatgttctaatctgtttgtaacagcacctaatttagctctttcagatgaaacattatctatagcagattgaattgttgtaatagctgcacttgctgttttagcatcagtaactttaattcctgaaactcctagagctgctgctctcatatcagatattccaagattcattgtttgtccttcattggctcctatttggaaagttaatgttccatttgtatctgcagttatagttcctccagcagcagtaactgaagcttgacttgctacaacttgtaattgaagaccttttgcagttccggattgaattgttatattatttccttcagctgaatattgcactccaccttgaagagaaattgaagcatctgtccctgatgcatttgcaagaccagcaaaaccaccagtcaatccactaatttcaaatttagaagcgctgcctacagaatttgaagttaatataagatttccagtcgcgttagcagaagctgtaatgcctaatccagcattattaatagcatctaaaacactgtcttttgtttgtccactcttgaacgagaatgatgtaccattaattgttaatccagcatcagcactaatagtagtacctgataacgaagtgtctgatgaagtatctgttgctgctgttgctgcaactatagcaccagtagcaccagaaattgtaacagatgaacctacttgagtatctccattacctccaactatctttatcacagatgtactaagtgaagctcctaaagtaccactaacatttgctccaccattaagaagtttctttgtattaaattctgttgtattaccaattctatcgatttcagaagttaattgatccatttccttttggatttgtcctctatcgtttgaatttaaagtatcgtttgaaccttgaactgcaagttctctcattctttgaagaattgaagtagtttcattaagagcgccttctgcagtttgtgctagagaaataccatcttgagcattacttgatgcttggtctaatcctctaatttgtcctctcattttttctgatattgcaagaccagccgcatcatctccagcagtattaattcttagacctgaagaaagttttgtcattgatttacttgcatttgttgagtttgtattcatgcttctgattgcattgtttgccataagattgtgattaattatcataataaattcctccttgattttaaagtgaacatccttgtttcactatattttatttatagttaagctctttgagcctactaacatatctgtatttttcaacttgtttttctgacatcctgctacttattcgctggatattatcacttaatattaaaacattatgtttatcttcatattaagcgcttaagaaaccttttaacattaatactaataaattaaagattggccatatctttttagtatatataaagcctttagactttataacttaatcaataacttgtcctaatctaactttcgtattttatttaaaatactttatactatcataaaattttattcttatgtgtatattatatttctcgttactatcacatataactttatacttatttgtaaaaaaacttataattttatttaaaattctttacttaaaaatacagctttagttgataggttattatatccactcattgctacttgtcttttcttgttttcttttattttttctagtaaatcttcttttttagctttcatttctgaagataatatttcttctaactgatttatttcatattgtgagtaaaactgtctcaactcttcttttacaaaaccaatatcattaatactctctaaaattaactgcctttgtttgaatagttgatctagtttctcgtattcttcagctttaactatttcgataatagttaacgtagtctctttatatttaatgaaattttcttctaagttcaatttatcaccaaccctatattaagttaccttgttaacttttaattatatctattagtttgtcccaagcattgagctaagagcactttgttgagaattcaaagaattcatggctgtttcaagcgctgtaaatttagcatagtatctagtttgtgcatctttaagctgagtttgatatttactaatacttatggtcttgctatacacttggtcaggcaatgtatttttacttgaagaacccgaagaggtataatcatattgtttatttacaaaaatattcatacttccactcaaagagtaagtgccatcttcccctatacctggagcagctacataggttctaagtatattatccattcttgtaaatattccttcttcataatatttctctgaaccaatataagattgcttacttcctaatgtagcatcagatgttccaataaataactttttaaaatcctcgagatgattttcaatagcatctcttaatttcgattcatctttaagaacaagcttgcctccatctgtagtatcagttgaagtatctatacccactgcattggtaccatattgtccaaaggatagtggcacctttccatctgaagtatttgtactactataactattgtatacagcagaattaaatgttcctcgaagttcactcattaaactatttaaattatcatcatttctaagtattccaacttttgctttagactcccatgcagtaatttgagattcactcatacttgctttttgatcatctgtaagcggagcataatccttatcttttttttcagtaagctttgtattaatttctgagactactttattataatcatcaataaatttctttacattactaacaactgtatctgaatttcctgttacagttacattggcagttttacctacatcactagttccaacaagattataactaacaccatttatagtaaagttattagaaccttgagttgttgttgtagacacagttttcccaggttcagtaatgtccactatagcatcttttccagtcttgctatctactgctatccctaatttattattaatcatatcaccagttaaattttttatactgatacttgaacctgacccataactttttgattgaaatgaaatcaaacctgtattgtcatctatactcatcgtcactgcaccactagttttactacttaccttatcaattaaagtctgcaacgtatcagagcttgttacactaatttgcgcagttgttgaaccatatgataaatcaaaactaccactagtaatacctaaatctgataattttgtgcctgaagctgttccactattaacacttgggattgaagctatagcaccattagtactagtagttgcagttaagctcatagaactagaacttgtaaatttaatataactttttccatttccatcattcacataagatgctgaaactttaccacttaaaattgaattttgagatatattactattaatatttgcaactatatcatctacgtccacgcctgctgaaccggtagtatctggtatttgattagttagtgttatagaattacttaaagttaaattagcattactccatgccgaaaaatccgagctactaactgaacatgatgaattcgctggaattgttttttgggatgttgatagtccatcggaagaagttaaagttaacgtaacaggcttattatttgtagttttaaagtctatattaccaccatttaaaaccgctataaccttaccatttaaagttggatccgcagttattttactattaatactcgctacggtttcatccaaacttgagccatctccactagtatcagttattgaatctaactttaaattagtatctaattttaaagtagcaccatcccactttgaggtagcggtagcagcaatacccatatctaccaacgcattcaatgaagttgttccagtaattttcgcctgttctgctagttgggttacatgcaccttataagttccagccttagcagctgatcctgcagttgctgaaactatagatgtagtatcgcttgtagctgaattaacatttaaactttttccagatagcatatacttatctgaaagtggatcaaaataatcctgtaatccctttatatcctttataatgtttctgtatgcttcctgcttccactgtatggtctgcttatcttgatttgctttatctatcttcatttgatagtttgaaaccatggctttaaccactgaatctgtatcaattccagatgccatacctgatattcttaataaattcgcacttgaagtgctcctattagttgaactagtattactcggataaatacttgtcatgtataatcactcctttatataattatttattttaatttttattatttagatcttttatacgcttctttccatgtttcatttatatcttctacaagtggaagtatttcatctataatttcaatatttttagtcatattagcttcaattagtcttcctttaataaactcatataccctatataattgaactgcccactcacctacagttgtatccaagctaaccataagttccgaaaatatatcttgtgttcttattaatgcatcatgtgccttctttgtgtctttatccactatagcttgtctggctattttgcaaaacttaactgtaccttcaactaacattagcaataactgttccttagatgcataatttactgaattgtttttgtaaacattatatccattagaatacattctaattcctcctattttgatgtatctaaaattcgacctttagagttatcgttatttattccttctattttctcaacttttatatttatatttttatcattatattttactccatctaccgtaaaatatctcttttcgtgttctttttcatcattacaatttttcttttcaaaactctcatctcttacatctttttttatacttatgccttttccagaatgtactttatcttccttagtttcttcttgaattttttttctaatatcagtatcaattttatttagtttaaattccaaacaaatatttcccccttcggagacattctattaaattaagctcttttatctagcaagccaacctgcctcatcatactcgcaaccatatctaaaatcttttttggcggaacttctaatataacttcattagtattttcatcaactacttttatcatagttgtttttaactccttataatacgagtattcagcacgtacatgctcgtcttttaagaaattattaattttactcaatgcattatccaattcttttttactatattgatcgttttgcttattagctccgttgttattatttaattcttccgattgtgtttctactttttcaacttgtcgtgttgctaacccagtattactatttgtatattcagaaacatttgaattttgataattatttaaattagctgaactttgaccaatgctattaacatccatgtttataatacctccttgttgtctgcaccttaaatttaactattcactttttcttatgttatttaatatattgatatcaaatttaattgcttccttattctctttttctacctcttcatatatttcctttctcaatatagacacatttcttggcgcattaattccaatttttacacttccatcatctattttacttattacaatttctatattatccccaatcattatggattcacctttttttctagttataattaacatcttttacctccttatactaaaggacttttgactttatatttaggattatctagtattatttgttccccaatattattagaagtatttataactataggaccttgtaaattagtagttatctttttcacatctgaatttaatgtcactgtcgtaatcacattaacttgattgggagaatctatctttaagcttttaatagtttcttcacttaattcaaattcataatccttaaagaattcatacggcggtgttactataagtgcgacttcatcattctccaatgattgtaataatttaaacggttcatatccctgcaaatctaaaagaataaattttttcaactcattaaacccaagaagccccctgttaaatgtaattatattgtgatcttcatattccatctcaccatggattttagaaataaacttcatatctatcttctcctaactataaataatttagtatagtcattggcaatattttggcgctagtctgcagtgaagctgtgtaaactgtctgcatcattgaatactccatagttttattagcaaaatctatatcctctgttttagataatatatccgtcatattataattctgagcttcgttatttgtttgcgctgaatccattctattttgcatagtaccaacttccgacctcttttgcagtaaattagccgttacagattgtatgtcattcaagtcattagtaataagattactatcagatccatttgctcctaaatcatttattatatttgataataaatcagaaacatttatgctcttcccatttttatccttaaattccaatacatctactgccgttttattataaatactcttaactccttgagttatatcaacttctagatttgaattaatttgagtcagaggagtcgcctgtgttagtatattgtttatttcactttttctagctgaatttgggggtgatgttgtattattcaattcatttttgagagccgttacatcagccatggttaaacctacttgcgtatttgtcgaagtagccgatgttgttatagttccatctgctgatttatactctgacgctcccacacctgaagatattaatgtatttatttcagtctttctcgcatcacttggcggcgatgttgtattatttaattcagattttagtaatgttatatcgcttgcagttaatgtatacgaagtatttgctgttgttgctgaagttgttattgttccattcgacagcttgtatacatttatagaattcccatctttatctgcatattctagcttaccatccaccactgtagttggtttagaatttgtcttcgtaccgccaaatatatacgagccatcaaaactagtatttagaacttgagataattcattaactttctctttaatttcatcttttattgctgatttttcatcatccccataagtcccatttcccgcatttacaagcaatgtttctattctcccaaaaatatttcccatctgagacaatgctgtatctgttgtatcaagccagtttgatgtatcttttatattttcatcatattgcttattgtaagatatttctccatttaactgcatactccttgatgcaacataaggattgtctgatgctttatttatttccttcccagaagccaattgattttgtaacgtctgcatattgttcatatttcttttcacatttcttaaataattgctacttaacatactatttgttattctaaacgacatcaaaacacctcctatttcttcaacccatttattactacatctaataattcatctatcgttgatatcatttttgcatttgcttgataagcatgttgaaattgtactaaattagtcatttcttcatctaacgatactcctgaaactgatgctttttgatcttccaaatttgacagtaccgcctcctgattgtcaacttgcttgctagcctcttgagtagttgtcgcaatattatttattatagtcttatagtagctatccactgtagacccattagtcccagcatttaaatttaaacaagcgctatctgaaaatcctgttccagtaccagatgcatcatctatacctatctcttctagaaacttctttctagtcatcttagtcaaatcttctgtagattttacattgcttaaattcatttttattgaattgagattagctattgcattagctctctttccatcaccttctccacttgttgaagttgtattacaatttagcaaagtaggatctttcactaacgcatcatttacttttatagtagccgctgtgattcctgtatctgttgctgtatttcccgcatttgtgaaaatcaaatttttagataacccctgtgaaagagtagtagcatccccgtcaatatttccagtttgaattgcattaactgagtacgctaaacccgccgcaagtctgtccaaactgtccatatatccttttatagtttgctgcactgattggtttgctgctatttcccctcttatatgattatcatctacattattaactccactttcgctatcatatttataagtttgaaaaacgccacccttcaattgtgtatcggttgctggtggtgttgatttcactaatgtagtatatgttgttgatccatctgtattttttatagctattacatttgtaactgttgttacgccatttactgttgacgttgttgttccaactgctggtgcagggtttggatctttagcagtagttttagtcatccccactgcatttccatctttatctgcgattaagattctattttgcatcaaactatccgctaaatctttagctttactaggatctgttgttattttaaatgacttagttggagaattttcatttcctaaagggtaatattctactgtaacctctccagtgaaatttccagatgtatcttttgtcgctactgcactcttaacatatgaaagcctcgaatagtcggtatcatttggatctgattttaccaaagctgcatccggatactctgttgacgataggtttatagtatcaaggctatctttatcaacttttatcccaaatttatagcttaattgatctaacagattatctcttttgtccattaaatcattcggtgtttgtccaactgaagagatacttcttatttgcttatttagttcatttatttggtccagatagctatttacatcagtaatattagtttgaataagtgcttgactatcactttgagcctttttcaattgattataagtataatttaatgcatcagcaagtgctgaggcatctttaatagctaccgttttaacatcaggcttacttggacttttagatacttcttgaaatgcattaaaaaattgatttgtaagttcttgtataccagtatctgacggttcaccaaaaatatcttctacctttgataatgtattgcttgattgtgtgtaatatcctgatgttcctgattcacttctaacttggtaatctataaaataatctctaattctttgtattgatgtaatttcagcacctgttccaacttgtccaacacctgtcgtatcaaatcttgacattccaccaaatggtcttgtagtctcagctacagccctctgccttgaatatcctgtagtatttgcatttgctatgttatgagatgttgtatttatatttccttgctgaacatttagccctcttttagcaatggtaaacgtatcaaatagtcctgccattatttttttcctgcctttcaataatcccaacttccatgtcttatatattgtaacatccttattattcaattcacacttaacagttcatgccctttagggtgtcctgctggcaatgcacaattattggataaattctttcggaatttattgttttaatatttaagttcttctttaaattacatattccaattaataaattaattttagaaatttaagataaacttgctcattaattataaattttacatttttgagtgaattataaattgtgaattgatgattttatctagataaatttccatatgagttatatgtctttatttctcttctcggatttattatttctaacattttattattaaatattatttgttgcttcaataacatatcatttgtttctttttgagaaataactgaatttaatattctttttatcttattgtatttttctcttaattcatcattatttgaattattcacaacttctattatcccattatctccaagtatatttcttctctctatctcttgctttgcaatcttcttaccagattcattaatcttatcaactaatccctctaaaccaaatacatctttactcattatcattttatattgagtttctaacaattctaaaagtctttgtaattcttcctcttggctttgtattaatttaataagttcgtttatcatatttatgccttactctccttcattgcatttaacatactttttgcagttaatcttgcatcaacattgtatgttccgctatctattttatttttaatatcagctattttttttgcgttttgtatattactatctagtgaataacctttaagactttttccaagttctgaaatttcaattctatctacatcattagttttctttgtcttttcgacagctttactgctatttgagttatatgcatttatatatgtcgatctacttattctatcaatactcataatacatttctccatttcttaggctcctgaaagaaaataacacttgttatttttttaattgcgccttactacttcattaatatacttatcgtacttttcttttataagtttatagaaaagtcaataaaaaataatttatgcaactactttaagaaaatattcataatatatgttaggattaatcaaaagaccactctgctatcttacgctctccttcccccaaggtgatttcaccttcactaaaccaaaagatatcattatctttatttcctctatctgtaatattatcagaaacatcttcatcataagattctatatcactctcatttttctttttgtttactcttttcttcttcttacttttatttttttcaacttcgaaaattacaggaggattattatgttgattactttcctccttctttacttcaatcacattactattattatcacattcattttccctatttgattttgtattatctacttttaaaagtgctattttattgtccttattttctttaatatctgtttcttctttttcttttataggaaccacatttttcagacttacttctatgctcttatttttatcaatgtaaatatcatctgcaatttttacctcattttcttttttcacaatttcgcttttttctttaactttaatattttgatgctttacgaaatttttcaccttatatatattattatctatgatttcaatcatttctaaattcattaaaacctctaacgcggctgtaacttcattaatctctctattaaattctattgataaggtctctactgtatatggaatatttcttgacatatataattctccctcttgatttacccttccagccaaaacaaccgccctgttccaaacatagtgaataagatctctattagtcatcctatctattattttaaattttgtgtcctcatacatatcaactctaaatttaacatatcttctctctttcatactcatcatttcccttcatatttatataccgacaagttaattcacaaaaatgttcttatatgcagcatagctgccttttttaatgtgcatactttctttctctcatgctcatcaatccctttcatatatattaataaattaattcacaaaagttttcttacacctaaaaagttccgtattgtagaaatgttccgtattacagcatagctgctctttttataggtgtatatttatccttctaattaatatatacgcaaaaaaagaaatatataaagggttttaataaaattttttattaaattataattttataactgggttacaggtaattattcagacgccaaaaaagctcagtgctatataacactaagcgaatattaaacttttcaaatcacattattatttaattgcttttattttagctatatcataccaatttttagatgttatcatttcaacactattaagatcatgctttatgcttgttatatcttccgcagttctttccacttgttcatgtgttgattccaatttcttctcaattctctcttgaccttctttaagctttctaacatcttgtttaagtaccttaacatcttcttcgattccactaattttagtttctatcccaataattttagtttctattccaccaattttattttccattgatgtaaatcttagttcaagcctttcaaggatatctaaaactttatcctccactttctcacctcacatatttattagtaagtaaattaattatatcataattttatattagttctactattatttttaatgtatatgttgcaaaaataatcctcatcatacttcaaaatattccaagaatttcaagcttaattgtgaaatgtgcatggtgaattgtaacatatatataaatgcccaaattacagatttgccttaattagaacctcccatcaaaattttcatattcctgaggaatacaagtgtattgtattttggcaattttacgtaatatgtttagttttcaaagtgatgtagataaaccaattatagtgtagatttatattgtaaaatatatttcaactagaaagcagaaacatttttatgcagcaggcatttgaaaatgagctgtaaaaagttcttaattgtaggttgttccactaatgcttgtcacaatgaaattgggagcaagcattagtggtgcaatctgtaatttagcactttcagcgaaattttcatagtcctgtgaaataacaatgtttcttctttcgatgtattatcacataattctaaatttaatactgtctatatccaaaaataaaaactccctctcgggagtttttattttagtctctttattctttcaacactgcttactatatttgttattcttattccaaagttttcatcaactacaacaacttcacctaaagctatttgttttccattaactaatatttcaactggttcttctgcaagtttatctaactctattaaggaacctgttcctaaatttaaaatatcctgtatacttttctttgttcttcctagaactacggatatatctaaaggaacatctaatatcaagtcaatattctttattggcggaacgctattttgcggtactaatggttcaaacgttgccgcatgaacttctaccggctgctgcattcttggctgctcatattgtggttgttgatattgaggttctggttgatattgttgttgtggctgctgttgaacaggcgctggctgttcgtatatttctttatttacaattgtatcttttttattgtcttttgctggttctgatgctgccacttcttttgccttatcttctccagtcattatcgcaacaatatttttagctgtctctattggaaatatttgcattatattactatctacaatatctccaatagtcattctaaacgatactcttactattggttgatcttctggtattgcatcagagattggtatagatccatcaaccacaaccttagctgatggtggtgatatatctacttttcttccaaacatagtagccatagatgtagccgcagatcctatcatttgattcatagcttctgaaactgcactaatctctatttcagataactcatgagtctcagttacatttccatctccgcccatcataaggttagatataaccaatccatctaatgtctttatgattaaaatatttcttcctattattcccgctacatattcaatatctaatacaatattcggtgtttcaaagccttcttttatttccttcaaagtagtcacactaactactggagtagttatgttaacttgttgatttataagctgatataaggcagttgaagctgatcccatagaaatattcccgatctctccaagcagatccttatcaatatcagttataactccagtatctattttattatcatcagctgacgcatctgcactttcagcttcagtagaagctaaatcttcacctgctaataacgcatttatttcttcttgcgataaaaagttattgcccatacccattcacttccttatccgttatatctaaaatcataacacctgcattttttcctactacacccggcttagcataataacattcttcattacctacatatacttttattggtgatgaacttttattatcaagtttaattacatcacctactgttagtttcaagaaatcatctactgttatattagcagttccaagttccgctataatttcaacatcaaccttattgattcctttttctattttttctctcgattcagccatcgaagcctcattatcattcttaaatgcatattgtactactaatttatctagtattttctctacgcttaaataaggaagacacatattaataaatgtgcttctcttattcatttctactgaaaatgttattaatgccacaggatcattaggtgctagtgtttgattgattgccggattagtttcaattgcttctacttctggctcaacttctattaccgaatcccatgctaactttaaattgcttatcattccggtagttacttgtcgcattatattcttgtctatatctgtaaattcttttgtttcagcttttctatttcccttccccccaagtaaaacatctattacttgaagagaaaattgaggattagtttcgaatattattgtccctgataatggagccattttaaatattgtaataatggtagggttttgcacagagtgaataaattcctcatatgttatctgctctacagattctatcttcaccttaacattttgcctagtttgacctgttaagtagttggaaataattctcgcataattatcatgaactaattcaagtgtccttatatgctcttttgaaaatttttgaggactcctaaaatcataaagcttaactttatgtttttcttcatctttaccaacatcttctgactctatttcacctgtagataaggcagataataaggcatctatttcactttgcgataagacatctgccatacttttccctcatttcaataaactaatttaataatttgtcgatatctattattgtaagaagtttttcatcataatttaatatacctttaatataaggctgtgctttacctgcatctttttctattttttgtatatttttctcatctatatctaaaacttcttcaacctcatctactgatattccaatttcttcatcttctactgttaaaataattatattattttgttctttcccaggagttacatcaagtaataaatttatgtcaacaagagatttaatgctcccacgtaaatttattaatcctttaatataactcggagccttaggaacttttgtaatccccatagtatcattgatactttggactctatctgtttctactgcaaaatgttcttctcctagtttgaatactactatttgcattcatactcctcctctacaataatatacaatcaaccattaataattgacacttaaattaaaatttctttaaaatttgcaaagatttatttatagcctgttataattcatttcttgtattattgcttttatattaacctacaactttctttatagcttctaaaactctatccgcttggaatggttttactataaagtcttttgctccagctcttattgcatccataaccattgattgttgtcccattgctgaacacatgattactttagcatctggatcgaatgcttttatttgtttaactgcttcaattccatccatatctggcatagttatatccattgttactacgtctggtttttcttttttataaaggtctactgcaactattccgttatttgcttcacctactatttcaaaatcattcttttctaagatatcctttatcatcattctcatgaacgctgcatcatccacaattaaaactctagccatacaattttacctccaaaatttaatttattcctatagatttcaatattttctctaacgaacccggcatagggatataataaaaatgtccacctatattctcttctgtatcactgtctaagaatacagtttcaatatctagtatatattcatcatattgattggactcaataaatgtagttgtgagtattgcacctaacatatcaaatgaagttgcaggcactgatggtgccataacaagattagttaactgtgcaatagcattcatatatgatgctgatattatatttgctatctcgcataatacagaacttcccatttcactttctggagactgcttgcttccaactaatttttttattacattttcagctgtttcctgttcgaatactaaaagcatatttcccgaaatatcgcctagcactcttacaactgttccagctacagcacattctccactttcttgaaatacttcttctagttttactacatttactgctggtactgtcatatctactttttttcccatcatcatagaaagagcagttgctgcattacctgcacctatgttagaaacttctttaagtgcatctaattgcaaagtgcttaaattagaatactccacttataaccctcctttaaaatttttcaccctaaagggccaatcatctcacatttatatattattattgctgttataacataacaataataatatatcttgtccactccaaacctttagccttttgctcatttttatggaattataagtcaaactaattttaattagatttaaaaatcttacttaaaaatttcactttataataatgcccctacatctagtatcagcgttactaaaccattaccaagtatagtcgcaccaatatactgatctaaattctttaatgtttttccgagtggttttataactatttcttgttgcccaagtaatgaatcgactaataaacctatagttttatcacctacattaactattataacaaatttcttatcagtattactagcctctatatctaaagtttcatttaatcttactaacggaattacattttctctataaataataacttcttttccattacttttctttatattttcctctttatagtcaattactctatcaataaatcctaatgatattgctaatgtttcctctcctacctttacaagtaaagcttgtattatttgtaatgtaagtggaagcttaattacaaaagttgaacctttgccttcttcacttagtagatctacagtaccaccgagtgctgcaatttttgttttaacaacatccattccaactcctcttcctgagatatctgttacaacttcattagtactaaatccttgagcgaaaatcaagttcttaatatcactatctgataatccttctgtgtttattcccttttgctctgctttagcttttactctttcaagatttattcctgcaccatcatctgatacctttattaatgctttagtgccttcttgataagcaaccaactttactgttccaactggaggcttgccttgtgcaattctcttttcagcagactctataccatgatccgctgcgtttcttaataagtgtattaatggttcacctatttcatcaataacagttctatcaagttcagtatcagcaccttctataacaaagttaatttccttatttaattctactgatatatcccttatcattcttgggaatctattgaatactgtatctaatggaagcattctaatcttcataactaaatcttgaagatcagatgttgttcttcctacttgttccaatgtttcatttaactcttgtgatttatgaacatttacgatttgttctaatcgagttctataaattacaagctcagaaaccatattcattaaattatctattctctctaagtcaactcttactgattgatgtgctttcttaacttctttcttttgagtggactttttagcagctggttgctttgtctcaacttttgcttcagctggcttttctactggagccttttctataaccggtagctctggtagctgtggcacttcttttacttctgcttcttttggagctatatctgagctttctaattctattaaagaagcttcaacttttgcaacttctgaaattccatttacaacagttaatatttcatctacagtatttttagttactaagataaatttcaattcaaaatcaaactcttcattttcaatttcttgagttgatgggtctgattttaatatttctccgtgatcttcaagatctttaactattaaaaatgctcttgctgattttaataaagtgttttcacttaatgttacttttaattcaattgagttaaatcctttttctctagcttgtctaataacagatgtgtcatattgatttaaatctaaatcaaattcatcacctgatatcattttattttcatcttctgactcaatttcactagcttgtgtttcttcttgtacgtcactcttgtttccattttcttttatatcagctaaagctttcattattccatctatatctattttttcctcagaaccttcttgaacgttgtcaaccatcttttctaatgtatcaagacaatcaaacaatactgtcactacatcctgagttacttttagttttccttctctgaattcagccaatacatcttccatcttatgggtaagttctgctaaatcagtaaatcccatagtcgctgccatccccttaattgtgtgagcaactctaaatatttcattaaccttatctgtatcatctggattttgttctaaatctaatagtgattcgttcaatgtttgtaaattttctaatgactcctctaaaaacattgacatatattgagatgtatccatccttactcctcctctatatctttttataaataaaggttgatgctttttcaaatccatagtctctataattataaatgctctctgtagctcctacaaataaaagcccacccttttttaatgagttactgaattttttataaatttcttgtttaacatcattattaaaataaataactacatttctacaaacaattaaatcaaagccagtatcatatcggtctaaaatcaaatcatgttttttaaaagttaccatattcttaattttagactctatatagtatttatcgtcccttactttaaaatatttacttaaatctgtattatttacacctttcatttcattttgagtatattctccaagctttgctctggaaagtatagtatcatctatatctgtagctattatattatgtcttccatttggcgctaacttatccaatattattcctaatgaatatggttcgcagcctattgaacaagctgcactccaaatttttagacttgaattatttggtagtaactcctttgcaatttgtttttctaaatcagtaaataattctggatttctaaaaaattctgttacgtttattgttatgaaatctaaaaacttttgtctttgctctggattactttttatagacttggaatattcatctaatgtttttataccaactcttgtcattaagctgtttattcttctatttagctgttctggcttatatgctgataaatttatacccaactctttatgaacccatttgtgaaattcattaaaatccatatttcctcctataactgtttaattatttttactatattttcagctatttcattaagtggagccactaaatctacttttccagtttcaaatgcagcctttggcataccataaattgtacatgtagatttatcctctgaaattgttataccaccattatcttttatgtttgcagttccatcagcaccgtctctgcccattcctgtaagaattacagatattaaatttcctctgtacacttttatagcagaattaaataacttgtcaactgctggtcttactccccatataggcggctcttcatttaagtgaattaaattatttgaacctacagtcatatgttgaccacccttagcaatatatatggtatcattactaattctcataccttctgccgcttcaaccactttcatcttgcaagctttatctaatctttcagaaaatacttttgtaaagccttctggcatgtgctgaactacaaaaactggtacccctaaattttcaggtaatttggttaatacttcctgaagagccttaggacctccagtagatgctccaattacaactgcatctatttttttatttttaggtatactgcttaccctatgtatagttttttcttttatcatattgggattatttaaaccaatctcattattagttatttggttatttttattagtttctaaacttgttaacttctttctagaattaacattgcttgttatactctttatttgttctattaagttatttttaacttttgctatatctagcgaaatacttcctgatggcttagttataaagctaatagctccattatctaaacattctaaagttagttccgatccttctgtcgttgaactactaagcattattacaggataactttttccaagtctttttaattctttaagagttgcaagtccgtctaaatccctcatatgtacatctaatgtgataaggtccggattgtactgctctaccttctcaactaattctcttccatctctaaatttagctacaacttcaaaattactttctgattctatcatatctgatatggcctttctcataaaagccgaatcatcaacaacaataatctttatcttacccacctaatcacacctctctttttattttacaattctacaattccatgccctacaactttaagtattacttttccatcactagcgtaaaggatcatagttctacctttatttccacctatctcttcagcaattataggaatagattcctcttttaagcttttcttcactgcatcactattcctttttccaatatcgcttattatgctcttatcagaaaaattaaacattgaagctcctccagctattttagctacgagatttctctttttacacccttgcttttccattttatcaattagtagtggaatagctaaatctgcaaatttcatggggtttgtactacttttaaattgtgtactatcaggaagcattatatgtgctaatcctgccaccttaactgccctatcatataaggcgattcctatacatgatccgagtcctattgtcattattgttcctgggtcgagtactaaatttagatcagctattccaacttttacttctgcacttaccatctttaccccctaaaagattttttcttcatcctctgaagacagtatcttttctaagtctaataaaataactatattatcctttaattttattaaacctgctatatatcttttgtctattgttgctgttataggaggtgcttcttccattaaatcactactaacatctcgcacttcgtaaacattttctacaataattccgaatttattttcatctctttttacaactattatttttctattttcattttcttcatcttctccaaaattaaactttttggataagctaattattggaagtatactttgttcataatttattactccctttacaaaactaggcgaatcaggaagaattgttggctcttcatatcctaaaatcctctcaacttcttttatatctgttgcgtaatgctctccatttaatccaaatattaaaattttcacatcattacttgacattactttgaaccctcctatagtataaatttatcaattgttatttctccagttttatctatatatgcctctacatttttagaagaaacttctaacataatttgtttttctccaaagcagaaaatagtattgttataagctatatcagctgtaattcttccttttttagagacttttaaaacagtactaactccagctgcacttcccactgtctttaactttatttcagatccagccgaaagtgtgccccctctacaaacagctttttcactggtaaactctatattttccaatgctattatgttgcaggtatactgtcctttacctgttataaaaacacttcctgatgcttctatggttgacccttgagcatatgctaaatggacatttgtaggaatcaccatcaaatcttctatttcacaaatttcttcatctaacaattccttaaaaatgtcaaattcattaatattatttattttaagcgggcccaagcccaatagtttatttattataaatgttgtaacatcactatgctgaattccttcagacatattataattcaaaatatttctgcaaattttaggtagtgatttgaacttattctctattaatattttaattatttctccatctttttttgaacctagtaagttatgttcctttacttgcactgttgaatcaactaaatcataaataatatgagctagactcttcaagctttctaaatactgctttttctcaacattttcacatccagctgtcactgttgaattcaatatatttccgcctataaaaatttctcctgaagacctgagtattgcagattctacatttttgccaacatgaagctcattccctgctttaacttccattccttctaaaacattaccaacaacttcaacattaccaacaaaatctatgtttccgctttttaaatctacttgatctaccttgtataatttgtttactacaaatgtatttgctttataagcaggttttccttctgacattgctataatgtcattattttcaagtttacatccctctccaagtcttactccagtctttttaaaagtctttcttttaacagcagtaccgaatacatcttgtccatcacttcctgattttccaggtactattctacctataacgtctccaactttaacatttgcaatttgaaatctatttctataatcgactttttcttctgagtctttgtaatgaattaattcttctgaatcgtgaaacaaaacttgaatctcatcaggaatatcatctacagctggaactccttttgcaactaactttttttctatattatgttcattacatatagtttctaattctttttcaataattccatatttaattccattactctttagcaactcttttaattcttttactgtatattttggtggatatttatcatcaacattcttctttttgattgtcaaatttttttgatattcttggttaactaattcatatatatgaactgggattgattttatatcaacatatgcctccattttatcatctgtaattgatatatttatgtttcttgtcggctcgttctcttcaaatttatattcaattttatctcgtgatgttacaggagttattccatcacatttttgcccattaataattaaaattacaccttgacaagtttttatagtaataatttcatctttattattggattctgttattattattttcccattctcaatcttagctccaaattcctctttagtttctggtaattcttcaattatttccttttcttcaatgctgctcttactttcgtcaacttctattatttctatctctactttctttctaaaaaacttcttttcttccttaattattctatattttaaagcttctttcgaaagatttaattcagaagatgctttttcaagacattcatttaaggatgatccagaaaacttcaagtccataaatatctccccctaaaaatactcctttatctaagtataccacagcctattttaattttatatccattatttatattaatctatattattttacatgaaaatacaaattaacttaattttaatgattttttatatacatttctatctcattatcatattctttcatcaattttctaatcaagttattatctacattaaaatttatgctatttactgtttttattggtaatattttaggggatgtacccgaaataaacattccatccaatttatctatatcagaatatttatattctacttcctcgacttgaaccccagccttatttgcaatatctattatttctcctctagttactcccggtagtacagcttttacaggcgatgtaagaagtttatttcctttaaccatgaaaatatttgatctgctgccttctgttatatgcccatttgaatcgactaaaatagcttcatacgcattattatcctttatctctttattaaccctttccctaaaggtatcatttattattttcgcattaggattttctctttctccaaaataaagtatagtattaacaccattcatatacatttcatacgatggatatgagtgttcaataaaaaatactcttaactttttttcgtttactccaaatgttatttttatatttccttcaaatttattttcactttctattagactatcaatttccttacttatttcttcgtaacttactgagaattcttcattaattaaattaaaagaattttccattctttttaaatgactttctagaaaaattggttttccatctattactcttaaaacttcataaattattttatctttcatgccttgccatccctttctactatatatattgcaattcacaattcatatttcacaattcacaatcattgctaaaattcccgcaatatttttagaatcatgataaagaatcatttttgcaatgtctatatattatatataatctgtgatattagattaatattattaattgcttaagcctaaactttaatcatatactgatataaattctttaacagtggcttatactatgtaatcaaatcaatttcatttcttactaagactgatatcttaatttatattttatttccatcttagtatctctatatcatggttctttttatagtttattaaatatggcttacctactagatccaataatggtttatctgataaggaatcagaaaacatataagattccttaaagtccacctcaattttttcatctttaagtattttctttaatcttctaaccttttcttctcccttacagttattccctaccatttttcttacgaaagttccattttcaaatccaaatttagttcctattactttatcaacttcttttatattgtaaaattcattaacgtaaaattcaggagatgctgaaatcaggtatatatcatacccctcatttttaagttttttcatcattttcaatgcatcatcatataaaatattttttagcctttcatcataaaactctttaacaagttcagctaactcctcttctttaattccatctataaaccttaaaaatgtctcttttacttttctctcatcatatattccaattgcatacataattccacagtatatagctcttggtaaaaatctaagattttttttatctttcttaattacatacttaaataattccatcaaagtttcttttttagtaatggtataatctatgtcaaatatagcaagtttcttcaaaacacaaatacctacctttttaatatttaattcttaacactcaaacatatcatttaactttactttaaattattaagtgtttagagctaaatattattaatgattaattttggttaaaaatccttaggcttttctttaaatttaattttcattattatttttttgtcactagtttattttaagtaataataatcttaattattacaagaaaatcataaatatatattttataattcacaattcacatttcacaatgcacaattatagctaaaattctcacaatatttttagagttatgatgaagaactatctttacaacatatatacaaaaattaggaatcaattctaaccataatattctttcttcatatttactataaataaacaactttaaaactaggtttatgtgataacttaccgaaatcataaactataactatacttagactatgaaatatattccaatcagaaataagaaatgagtaatacacataagtatagattatagttgttttattctatagataacccaactttaagttagatttatactatgaaatatatcccaactagaaataagaattatgcttttgtaaccacaagggtcataatatgaaatgtttcattaggaatttgatggctctgattcttagattaaaagttgttccaagtatgctagttcaaagcttgcctttgaggctagtaacttgtgatcttagaatcatccatcataagctcaggtcttagttgggttatctatatacattatttaattttgcttaaaaatgttgaaattctatctattccagtttctattatatccatagatgtcgcatatgataatcttatataatcatctaaaccaaagccagcacctggtattactgcaactttctcttcttctagtaatacttttgcaaaatctacagagttgttaatagtttgatccttaaacgtagtattcaagtaagaagatatattaaccattatataaaatgcaccattaggttttatgattgatatttcatttaacttttctaatttatatatcatgaaatttcttctattctcaaattctttaatcatattgtttaaatcttctactggaccatttaatgcctctattgcagcatattgagctattgtatttacattggatgtcatgtgactttgaatgcttgtcataagcttagttatactttcacttgcagctgcatatcctagtctccacccagtcattgcatatgtcttagaaacaccgtttattactacggttctttcataggcatcctcatttaatgctgctatacttatgtgcttttctccatcatatattagcttttcataaatttcatctgatataattaataaatcatgttcttttgcaaaattagcaatttccaacaattcgtcttcgtgataaattgttcctgtgggattattagggctgttcaataaaagcgccttagttttactagttaaagctttttctaaatcagcaactgtatatttataattgttttcttttaatgtttcaacaaatactggaaccccatcagctaatttcactaattcaggataactaacccaatatggtacaggaattaagacttcatctcctggattcaaagttgccataaatacatttgcaagacattgttttgcacctgtagaaattattatttgacttggcttatattctaagttattatcatttttaaacttattacatatagtagtttttaattctaataaccctcctgctggagtatacttagttttcccatcattcatagcttttattgctgcttgaattatgttttctggtgtattaaagtctggttcccctgctccaaaacttactacatcaaccccttgactttttagttcattggctttagctgttattgctaatgtaattgatggtgtgatattccccgcttttttagataattgcattgctttttccctccaattttgaccttaaaatgaattataaaaaatcttctaattcatttatatatacttttgtcacataataaaaatatatcattaatatattgaattgtaaacaatatggaatatttaagggacattaaataaaagaccttagtaataaattactaaagtctttaacttcttattcttcgcctactaactcattttgataataagctgatactctatcaaattcttcttcatccggaacaacaagttcatcttcatctagtctaaaaagataaactgaatcttcttctggattttgagctaaataatatgcttttccttcatattcaaattcgtcgattatagggcatgtaactacatttccattttcatcttctaaatctataacgaagttttcttcatcattgcatccgcatccacattcatgatcttcatcatggtgatgtccaccgcatccacaacttccttcttgactgttgcatccacatttttctaaatctttttccatgtttcaacctccttttggttcttaattaattttacccttaaatcatcaaaattaaaacccttaaataaaaaaattgtaaagtaatttcaataaatattttaattatatatactcaaaaatattcaattcttaaaaattcaatcaaaattacaattattacaaattaaatattatatatgttgcaattcacaatgcacatttcacaattacggctgaaattcttgcaatatttttagaattgtgatgaagaattatttttgcaacatatatataatattttttcttttcattttcttttgaaatgtccccctatatcagcttctttatattttatttgctccaaattcataatcaccaatattattcatcaatgcaatttcacagtaaacaaaaaagaagtcacttcttatagaataatttctacaaagaagtgactcctctttttgcgcaaatttagttatttcaatattttaatcactattgttgattagctaatttcttgtatccttctaatctgtccatagcatctttcttagtcttttcaaataaagcttctgcttgttctgggaatgctttagctaatgaagagtatctaacttctcccattaagaattccttgaagtctgcagttggttcttttgaatctaatgagaatggattctttccagcatcttttaattctgggttgaatctgtacatttgccagtatccactagctgtagctctcttagcttcttcttggctgttacccataccaattcttaatccgtggttgatacatggtgcataaccgattattaatgatggtcctttgtaagcttcagcttctgcgattgctttaagaacttggttcttatcagctcccatattaacttgagctacatatacataaccataagtcatagccatcattccaaggtctttcttcttagtcttcttaccagatgcagcaaatttagctattgcagcagttggagtagatttagaagattgtcctcctgtatttgagtaaacttctgtatcaaatacaaatatatttacgtcttctcctgaagctaatacgtggtcaactccaccgtatccgatatcgtatgcccaaccgtctcctccgaagatccattgtgatctcttaacgaagtagtctttttcagctaacatttctttagctatttcagtaccagatttttctaaagcagcaactaatttagcagctctatctctagttccagcaccttcatctatattatctaaccaatcttgtatttcagcttttgctggatcatttgcagctatagcagcttcagctttttcagccaatctttctcttatagctttaactcctaagaacataccaaatccatattcagcattatcttcgaataatgaattagcccaagctggaccatgtccttctttgttagttgtatatggagttgaaggagctgatccaccccaaattgatgaacatcctgttgcgttagcaatcatcattctgtcaccaaataattgagttataagcttagcatatggagtttctccacaacctgcacaagctcctgagaactcaagtaatggttgttcaaattggcttcctttaactgtgtttacgctcattgggttcttcttaactgaaatatcatgtactaagtaatcccaagctggaatatttacatgttggctttcttgtggttgcataactaatgcttttcctggagcaggacatacttgagcacagtttccacatccactacaatctaatggagaaatacccatagcatagaataatggttcttcagtctttaatgctttagctgcaactgctttaagtgcttctggagcagcattcttttcagcttctgttaataagaatggtcttattacagcatgtggacatacatatgaacattggttacattgaatacatttttctttatcccattcaggaacatttactgcaattcctctcttttcgaatgctgcagtacctgcttcaaatgtaccatcttccattcctgcaaatgcagatacaggaagttgatctccttcttgtctgttcattgggataactatatctttaacaaatttagttgcatgcttgatttcttcagctgcttcatcttgtgcagtcttccaagcttctggaatattgattgcaacaatagattcaacacctttatcgatagcagcgttgttcatattaacaactttttcacccttcttaccataagaagttacaactgaatcttttaagtgcttaatagcatcttcaactgggataatgttagctaacttgaagaaagctgattgcattatcatgttgattcttccaccaagaccgatttcttgagcaattcctacagcattaatagtgtagaacttaatgttgttgtttgctaagaatctcttgtatgatgcaggtaatttttcttctaattcttctggagtccagatagtgtttaataagaatgttgaacctggttttaatccttcaagtacattgtatttgtggatgtatgattggttagaacatgaaacaaagtctgctttgtttattaagtatggtgacttaatagctttcttaccaaatcttaagtgagatactgtaattccacctgatttctttgaatcatagaagaagtatgcttgagcatacatatcagtattatctccgataatcttgattgcgctcttgttagctccaacagtaccatctgatcctaatccccagaacttacaagctgtagttccttctggagtagcatctatatctacatgaacttctaatgaagtgtttgtaacgtcatctttgattccgattgtgaatccgttctttggttcagcttgtgctaagttttcataaactgcagcaatgtgacctggatttggatcctttgaacctaaaccaaatcttccaccaacaacaagtggtgcatcagcttgtccgtagaatgcatttcttacatctaagtataatggttccccagttgatcctggttctttagttctatctaatacagcaattttcttaactgtctttggaatagctgctaataatctttcatttgagaatggtctgaataatcttactttaacaacaccaactttttctccgttagcatttaagtaatctatagtttcttcacaaacgtcagtagcagaacccatagctatgattactctatcagcatctggtgctccatagtaatcgaaacagtgatattctctaccagttaatttagtaatttcagccatgtagccttcaacagtttctggtaattcattgtagaatttgtttactgcttctctttcttggaagtatacgtctgcgttttgtgcagtacctctagttacaggatgatttggatttaaagctctagctctgaaagcagaaactgaatcccaatctactaatttagctaattcatcatattcaagaacttcaattttttgaacttcgtgagatgttctgaatccatcgaagaaattacagaatggaattcttgtcttaattgcagttaaatgagcaactgctgctaagtccataacttcttgtactgatccttctgcaagcattgcaaaaccagtttgtcttgctgccataacgtcttggtgatctccaaatatgtttaaagcagaagtagctaatgctctagctgatacatggaatactcctggtaacatttcaccagcaattttatacatgtttggtatcattaataataaaccttgtgaagcagtgaaagttgttgttaatgctccagcttgtaaagatccgtgaactgcaccagcagcaccagcttctgattgcatttccataactttaacaggttgtccaaaaatattttttcttccttgtgctacccattcatctacgtgttctgccattggtgatgatggtgtgattggatatattgcagaaacttctgtaaaagcatatgctatatgagctgctgcagtattaccatccatagttttcatttttctcatcgcgttgacccctctttctaattttaaacataaattagtaatttaaatttattatataagttagtcttaaagaccacctaataaacatattaatattaagagcttaagagatttttataacattagacgcacgaaacaacatgacaaactctatattaactaactagtttttttcctaattgcctaataatgtttgcctgcgttttagttggtgaatctttaattgctaaatctccaattacattaaaaccataagatgacatttcatctttccataatttcataaaagtatcttcaatccacccgtaagttgcaaataaaatacaatttttatttatgtttacatctctatagttttgcaattgatctaaaaatggtttcatttcttcttgttcgattttagtggcatctactgctggacttccaaaagcaatagaatcagcttctaaaacatcttccaatgtggcatctgcaacgtgctttacacttacttctgctccttgctccctagcaccatctgccatagtattcgcaagtgcttctatatttcctccacaactccaataaatgattgaaacttttttcattgtaatgcacctcatcttcttgttaaataattaacttatgttttcactaaaatgaacttactcttttattatatctcacatatttttttttgcaagatttgattgtataatttgttctttatttaaataataattacaaatttaataatttatttttttaccttaacacttcttaataatacatttattattgcttcaacaccgcttttagcttgactcttttccatattattaattaattcatcttttcttttttttagctcaataactttttcatataatacattatttttaatttcttcttcttgcagcattaatgaatacccttctttttcaaacgacttagcatttaatatttgatcccctctacttgccttttttgaaagtggtattaatagtgttggtttttttaatgctaaaaattcaaatatggaattagcacctgctcttgaaattatatagtcacaagccttcataaggtcaggcaattcttcggttacatattcaaattgcttatacccttttttatttaaaaaattattatccacattaccttttccgcaaatatgaattatattaaaatcttttaaaagcttatctagattttttcttatttcttcatttatgagcttagaacctagacttccccccataataaagagaatctccttattgtcagaaaattcacatatcttttttcctctagccttatctccgttaagtatttcttctctgattgggcttcctgtaagtactcctttatcatcctttataaactttagactttctctaaatgtgacacatagtttatcacaaaatggtgctgaaagtttatttgcaagccctggagtcatatctgattcatgtgcaactactggtattttttttatagatgctgctattacaactggaactgctacaaagccaccctttgaaaaaattacgtctggtttttcttttgataatatttttagagcttgagcaattccctttaaaattttgaatggatcagtaaaatttttcacatcaaaatatcttcgtaattttccgcacgaaattccgaaaaaaggtatattgtttttagttattatttctttttcaatgccgtcaaaacttccgatatattttatctcaaagtccttttgctttaatttaggaactaaagccagattaggagtaacgtgaccagcagttcctccccctgtcattattattttatacttagccaaaaactatcatcctttcttataatcactcaaaatttatgatatgtaattttaagtttataacatttttttatgcttagctaaaaaactttatatctttatctatagttttgtactacaatttgtatagtagtattaccattatattcattaatacttggataaaatactaaatcaaggtttacatgattgtattctccattataaagtttttgcaattcttcgtttccatatttattgccaacttcttcctcaaatttttcaatatccccaaaataaatagcatctagagctttatttaacttggtcttcagttttaattttagtacatttctattctttccaagtattgttgcccttaataaattaatatttttctcagcaaacaatggtttagagtttgatttaccaaaaggctctaatctttccaaatcatttatcacatcgtaatttatatcatcaagtggcaaaaccgagtctatggtaacttttctcaatagatcctcgtcttttaaaattgtattctcatttaatcttcgcctaaattcatctatattttcttcctttaacgaaaaacctgctgccatagggtgtccaccaaatttttcaagcaagtccttacacttaataagctcttcaaacatattgtattcttctattgatcttcctgaacccttcacaccatgttccgcttttgttataaccaaagttggaacattatatttttcttttattcttcctgctattatacctgctaaactttcatgtatatcaggtatataaataacaaataccttatcatttatcattccacttttttctataatttcaacagcggcctcaacacccttcatagtcatatcttttctctcttcattcagcttaactaactcttttgcgagccttactgcttcctcttcgtcatctgagagcaataattccaatcctcttttagccgaatctagccttcctgaagcatttatgcatggccctataataaatccaagatgatataccgataaagttttttctgttaattcgcattctcttattaattcttgtaatcctaaattagttgtgctgttaataagttctaatccctttttaacaaatatcctattctcatcaactaaatccacaacatcgcaaactgttgctattgctaaaaattctatgaatttatagcattcttttttatctatattaaaagtctcataaagaacctctacaagcttaaatgctacacccgctccacacaattgtttaaatttataattgcattcactttgctttggatttactactgcatctgcacttaaacttataaattctctgacgttattttctttctcaacaaatggtatatcatgatgatctgtaactattactgtaattcctaattctttagcgtattttatttggtctatagccgatataccattatcgcaagttagtatggtatcaaccccatcttctttcgcctgctttataatattcatattaattccatatccatcttttattctatctggaatttcataatctacatttgcattgcacctttttaaagctgagtataaaatataaatacttattacaccatcaacatcgtaatctccaacaattcgtatcttattctgagattttattttctcatgcagtatatcaactgatttttctaaatctttcatctctctggcctcatgaaatttatcaaaatcaggattaatataactccttatcatttcatcgcttacaatatttctgtttactataagcctgctaactaattctgaaagcgcatattttttagatatgtatttatagtcagcttttatattttttataaaccatctttctgccatttcttctcccctcacagcatgccgcaacaatacccctaagacctttgatcctagaggttatatactttaagatttctatatttttcatttcttatatactgaaataaagtgaaaattttcctagtaaatttgataacttttaccctataaacatcttatatagcataccagatgaaatactttctactttattctcatacccaagaatatctaataacttatatgcaaatgccatcgctgttgctgggcctctgctagttactatattcttatcaactactacagcatcttctaaatattcacaatttggtaattcatcttcatatcctggataagaagttatatttcttccctctgtgattcccgctcttccaagaactattggtcctgcacaaattgctccaattaattttccttctttgttttgctttttaacaaattttattactctctcatcatctcttaagttagtagctcctggaattcctcctggtattaccactaaatcatattccatattttcatcaaaaagcttatctgcctgaactaccacaccatgacttgacttaacttgcttttctgcaattgatactaaatcacaagttacatccgcccttcttattatatcagatacagttaaagcctctatttcctcaaaaccttctgctaacaaaacgcatactttcttcatatcaattcctccttaaatctaaacaatgaggatatcctaaactattttttagaacaccctcattctgcttctcttcaatttatacctacattataccccatttattgtttaactaccacaaattaattgttagaattggaactttccactctataattttctttactttcttctagccaactaccataaatgtttcacacacaatgatatattttgtgtaattcattcatttttctaaaaagtaataatcaacttcttttattttatatacaacataactagttgtgtttaataaggtcttaattattcttcacattctttgtatatgttataagttcttggttgttattaataagttccgcattgtgcttcgcactcttcttagcagtgcgcactttttttatatgctataagttcttggttgtgcttcgcacctcttttatagttataagttcttaattgtgcttaataagttccgtattgtacttcgcactctttttagcagtgcgcactttttttatagttataagttcttggttgtgcttcgcacctcttttataattataagttcttaattgtgcttcgcactttttttatatgtgtacatcttttatttcatcatcaagtgagaccatcattatacttgttcctcttccagctctgttttgtaatttaatatcacttatatccattactgatttttccttacccttagaaacaagtgtaatttttgtattatcggaagataaaatcacgctattgtcatcacttttcctgtaattgctatgatactttccaaaaataacttgatcttcatcccttaaacttattcctgttactcccgaagctattttacccatgatatttacattttcaaccgggaatcttattgccattccttttttagttatcataatcaaatgcccaagctttatttgattcatctctacagatacaacttcatcatcttcaaacttaaacttatagcatgcttgctttaggaagtctccttcaaattcttttaataatgttttcttaaccattccttttttcgtgaacgtgtatactcctaagtcttcatcataagaatcaatggaaatcaggcttattatcttttctcctttttccatcttacctataaatgcttctacatttatttctttatttaaaacatttctcattaaaaataccggtattttatatacataacctctgttactaaagataagcaattcctttaaagaatttgttttaacttttaacgaatcctcttttatcctatcataggatttaaacttattcttatcagtaactccaacacttaattcaaaatattcaatttcatcggtatcttctacttggctaatttcatcctcttctgagaaattaaatagctgagtaggtaaaatatttctagcagtttcctctagattttttatttcaagagtaaattctaaccctagtttactcttaacttttaagaacttctcttcttcttccaattctctcattgatacatcaattagctcatcgccatctctaagttttaaagcttgaagtttaccatatgcagtttggaatttatctaaagaacttaacttaattcctccatgttttgttataaatctaaatgctttactaggattgaaattatctatggatatagctgcaattatcttctcattatcaagatttaatgatttaataatatcatctaatctatcccctttttctttccatttcatttcaggaatattaatacccttcgtttggtacataaaacctttatctgtaaatacaagaagtgtatccttagtattagaatttattagatactttaaagaatccccttctctatattcaatatcttctggattagagctagatctattgtagttctttaatggtattctttttacgaatccatctttagatattgttatcataacttcttctacaataattaattcttcaacatcaattttactttcattatcatcatgtataatttcagttcttctatcatttccgtacttatcgcttatttcttttaattcacttttaacaaccttcaaaagctctttttcactagataaaatcttctcaagtttttttataagtttctcaagttgcgcatattctttttcaaatatttctatttcaagacctgttaacctatataacataagttctaatatagcttgtgcttgagcctcagaaaatccaaatttgcttatcaagttttccgatgcatcctttttagactttgaacttctaatggttgctataacttcatctaaaacacttatagctttaataaaaccttcaacaatatgatgtctcttttttgcgacatcaagttctttttgtgttcttctagttattatttctttctggtgctctacataatatcttattatagcctttaaactcatagtttctggctttccatttgcaagggctaccatgttaaaacttatgttacattgtaaatcagtttttttgaacagatactttagcactttatctgcaacatcttcatctgcatttttctttaattcaattacagctcttattccacttctatcagactcatctctaatatctgttatagattccaatgcttttgcatgtctcttatctccagtcatttcagatattgtttggagaatcctagacttatttcttctgtatgggaattcagttataattattccgattcttccattttctaatttttcaattgaagtctttgctctataggctacttttccttcaccagtttcatatgctgataaaatggatttttcccctattaagattcctccagtaggtaaatctggtccttttatatatttcataagttcagaagtagttatttcattgttatcaatatatgctagaactccttctgttacctctcccaaattatgtggaggtatattagttgcaagccctacagctataccaaacgctccatttactaataaattaggatatctacttggtaatactttaggctccatctcactatcagaatagtttggaaccatttctaccgtatccttttcaatatctcttagcatttccattgcaataggagataatctagcctctgtatacctcatggctgcagctccatcaccatcgatagatccccagttcccatgcccttcaattaacggtgctcttgttgagaaatcttgagctagtattaccatagattcgtatacagatgaatcaccatgagggtgatacttacctaagatatctccaactattcttgcagatttataataaggtctatctggaaaggccttaagcatatatgaaccatataaaattcttctatgcacaggcttaagaccatctctaacatcaggaagtgctctatctttagcaacttctatagcatatggtaaataattctctggcattgcttcttctagaggaataccaattatattattatctttaggtataatattttcattcttttttgccatactcttctccttttttgatgcataatacacatttcacaatgcacaattaatggtgaaatttctaaattttaatttcaagttctgcaggaacgtgttcattaattgtgccttgtgcattgtaaactgtgaattgattaaaattctccgtatttatacatatagttctttctaggttcaacaatatctcccataagtaacgaaaccatcttttctgccttagccgcatcttctatagttacttgaagcagcgttctactttctggatttagcgttgtatcccataattgatcgggattcatttctcctagtcctttatatctttgaatcagtgcaccttttccaacctgtttctttgtattttcaagttcgtcatcactatatgcatatttaactatagtttttcctttagtttccctatacactttgtacaatgggggctgtgctaaatataaatgtccattagcaataagaggtctcatatatctataaatataagtcatccataatgtcctaatatgatatccatccacatcagcatcactcattattattatcttgtcatattttaaatcttcttctctatagttatccaaagtacctgtaccaacagcagtgttaaatatttttaattcttcagaagccaatacattttcaagtttttgtttttcagtattcattatcttaccttttgaaggcatgatagtttgaaaccttctatctctggcttgctttgcagatcctcctgctgaatctccttccacaactataaattcatttacagttttatctttcaatgtacacacagcgacttttcctgcaagcggtgctgtaccttttcctattttctttttttctgcttcatttattttcttaatcttgtctcttcttttagctgcttctaatgcgttattaattatacttgttgccaaagttttattgtcttctatccattcagaaaatttagtatacactaaatcattcatcatagtatatgcttcattatttccaagtttagtcttagtttgaccttcaaagataggatttgtgattttaattcttacaatggcagtcataccttctcttaaatcatcgccttcaaattccttatctttttccttaaccaatcctaacttcttagaccattctttaaaagctcttgtcattccagtcttaaatccagtttcatgagtcccagcttctgttgttggaatgttatttacataacttgcaatatattcagtagttgaatctgtaaattgaatacatacttcaccatataattgaagctccccgacagttctttcaccgtcaaaaattataggctcttcatgaattggtgttttactttcatttaaataatttatgaaatctaaaagaccattttctgagtaatactctttagtaatttcttgtccttttcttttatctattaattctaatcttatccctttattttggaatgccaactcttgtaaccgactatctattatatcaaatttaaaatcagtagttgagaatatttctttatctggcttaaatgtgatctttgttccaaccttatctgtttttcctatcaccttcaaggcgccaacagctgttcctggcatctctctttttaattctttatccaaagtatattcaaatctttgtctgtatatattaccgttttggtaaacttctacttctaaccattctgacaaagcatttactactgctgctccaaccccgtgaagccctccagaggttttgtaatttttattatcaaactttcctcctgtatgaagttcagtaaataccatttcaactccagatttctttttgattggatgaattcctgtagggatacctcttccgttatccaatacggttacacttttatcttcatttaacgttatcgttactttgttaccatatccattagctatttcatctatggagttatctattatttcccatatacagtgatgcaaccccttactacctgtagatcctatatacatacctggtcttattcttacaggttctagcttttcaagtgatgttaaatctgttacatcataagcattagtattttttaattccataaaactcctccatctgaacaccagttcttattttttcgtaattatttcgctctataaaatatactgcctttctgctttaatgtcaaaaaaaacttaagcagacatcttaaatctattattttatgatggtcgcttactctgtgagcactcaacaaacgaacgtgagtcgagtctccttataaaaaacgctctgacatttcttgtttttttaaatcttctaagatctctattccttgcatttcatgagacaaacaatatttcattattatatctcattaatatttatattaaaatatatatttctaacaatacttactacttatatatatttatttgacattttcataaaacatataccttatcataataaaaataggatgtcaaaaaggtctttttaaccattttacgacatcctgatttctaatttatacttttgtttagagtattacacatcacatatttctatctttctaacatgcttagtatgactccactctttattattcttatttaatataccttgaattgtaattggtatccacgttaatgtatataacgcatataaccagaatctaaagaataaaattaattctttctttcctagtaatattcctgttaatatcaagaatgctaagttataagctaagccactcacccaagcaataatccaattatccatattagctgttaaataaggaactacgaaaacattactagaatataataccatcataactaagaatggttttgtaatttttttatcaattgttaatattagcggagtaatcaaaaattgaataaccgcaaatgtcttaaatccaacatcactaaataaataatttataataaatatatttacacctgtagtatttgcctgtattaatgttaaaactgctgaaatacctagtaataacgttacaaaaggctgcaatacgtatagtgcgcagtcaaacatataaaactttctttccattattgatttcttaacgagcttaaagaaatatcttgaagcaacatctgtaaaaccttgcatccatctttttctttgagtccatgattgtttaagctttaatggtttttcatcatatataatcgcatcatgagcccaaccaactttttctccatttagtacaagcttacatgagaattctaaatcctctgttaaacaagtggcaccccagcctaatttcttcaatgtcttagtttcaatggcaaatcctgttccaccaatttgattagaaaatcctatattagctctagctaactggaacattctattttgagtccaaaaagctattgaataagcagcagcaatccatgaatcatctggattcttgctgtctatatatccttgaacaactttgtaaccttcctgcatctttgaattaatctcttttaagaaatctttatgtacaagattatctgcatcgaagatagcaatagcatcatattgtttttccattgcaaataactttgcaaacatccactctaatgcataaccttttcctcttttatcttttgcaaatctttcacaaacatttaccccgtaacctttagatatcttagctgtatcatctgtacaattatctgcaataacgaaaacatcatacatttccttaggataatctagttttagcatactctctatgagactaccaataacgacttcttcattatgtgctgctattaacaatgcaaatttatttttaggttcatagttcttattctctttctttctgaaaagccctataagtcctaaagctaaatagtaacatgttattgcaaaaacaaaaatttgaaaaaatgctgttatggtaaaaatgtattttcccattacattcactcctaatatttaatgagatatattcccatttattattttatatctatcatcatactatacctatttaataatatttcaataaaaataaaaaatcaaccctattttcttaagataaaattaatattgccttaataaaatcctttacatttcattttttctagctcaattcctgatatttcccaagcaataaaaatatataaatttatctaattttttaactgtctatttaatattttgtaagagacgtatccaatcaatgctcctccaataagtccacctatgtgtgcataattatcaatatttttcacacttaatcctataaataaatttataagtattatctgtagtaagttagatatatattttttctgcaatctgtgcctttccataattgcaaaagctaataaagctcccaaaagaccaaatataccacctgatgctcctactgatatagtatatggacttgctatataacttaatattgatgctgttatacaagaagtgatgtaaataactagatactttttagccccataaatctgctgaatttgcggacctactatatataaagaatacatattaaatgctatatgtataatgctagaatgtaaaaaagcacaagttaataaccgccatacttctccattatttataagtgcattatatttagctccaaaggtcactagtactgaattatttattgcatttatcatttcctctgataacaactgagatgaacctaatgaatgtttaatattataaatataaatttgcattattataaatattattacatttatcaatattaaaatcatagttggaattttatatctaaaaaattctttcttattatcaatatttttcactttacttttattcatatacagttcaaatatttcttttaagggaagacatgattcatcacacttaataactgtataattttctttatccatgataagtttatttaccataactgtattatttatatttgtatattcccctttagataaaactatcatatttagagaaaagtctttccctaaggtttttatatattcaaaagcttctaaaaagtctatattttcattttcatcctcgcttatcaaaacgcagtatattccgtttgataactctttaattgcaagaaatatttctcttttatgaaaatcactataatattgtttcatatagaaattctctgcatttactaaaatttcatagaattcttctttaaagttattcataatgccttacccattcttatataaaaattcataacttattattttataatgtaaattcacaattatagacaattttattttatgtcttaattgtgaatttcacattatatattagacataatcaaaaaaataacaaatctatctgctaagaaaagttccttgttgcagcatagctgatcttttcataagcgctcattttccattatgcttcatcatcagattgcactaataggctcactatgagtccaatctgcttattctcctaatgaaaaataatcatggcattttggactcgttattttctttcatatgtcttattgaaatacatcttggatttctgaattaccttgtaaaccctagttatctatcatatctaaaagctcattgaatctctttattgtagcttctattggtaaatctgttgtcatatctactcctgcatttcttaaaatatttattggataatcacttccaccagattttaagaaacctttatatttttctaccgcattttctttaccatctaagatagccttagaaaaagctgatgctgctgcgtaacctgtagcgtattgataaacatagaaatctgaataaaaatgaggaattcttgaccattcgacatctacttctttatctataacaatttcatttccaaagtacttaacatttagatcatgccaagctttattgtaatcttccgctgttaatggtattcctttttctagagtctcatgtgtatataactcaaattctgcaaacatcagttgtctaaatacagttgttcttatttgttccaattcttgatttattaaatataattttttcttttcatccttttcattttcaattagatagtgaataagtaatgattcatttgttgtggatgcaacttctgcgcagaataatgtataatttgcatagtaatatggctgctcttttcttgaataatatgaatgaattgaatggcccatttcatgtgctaaagttgaaacatctcctagctcattattataatttaataaaacataaggcatagtatcatatccaccccaagaatatgctcctcctctttttcctttgttttcatatatatctatccaaccatcattaactccacttttaaagatatctaaatactctgttcctaaaggatttaatgcttttaatactatatttactccatcattaaactcaattctttcttttggaatttcaatgactggaacatataaatcatacatatgaatttcatctaatcctaatagttttttcttaattttcacatatctatgaagtgaatctaaattattatttattactttaattgcatttttgtaaacttctaaaggaatattattaggtttcaatgatgcttccaatgcattattatattttctaactctactgctaaaattgaaagtttttattgatgcacttagagacgttgctagagtatttttcaacttatcatattccccaaataatctttcaaatgctgcttttcttacctctctatttttacctcttatgaatgaagaatagtttccttctgttaattcaacttcattaccatcttcatcttctattttcccaaatgtcatatctgcattagttaatatattgtgtattgctgaaggagcatccaagcaatctgatgccgctgctaacaattcttccatctctttagataatatgtgtggcttttcttttaatatatcttcgattaagaattcaaattgttttaattcatctaatctgtttatctcgcttttaataaagccatcatctaaacttaaaatttctggcacaaagaatgctgtgtaacttgcaagctctgccatatatatatcaactttactcattaaactttgataagtcgtatttgaagtatcttcatcacactttaaatgagcataaataaataaattttctgccttcctagatactttttcattaaattttaaataatctagtattgcttctccattcacaagttttcctgagaaatcttttaatttaactgcttcattttttacatcttcaaagtccttttcccaatcctctatgcttttataaatcttatcaaccttccatttaaacttatcttcaatttcttctcttttctttaaatcactcatataaatacacctttctttacaaaaattttagtaaaattctaaaccttatttatctcaagaatattaccatatatattcttaagaatatgcttatgaaatgtacacaaatgactataaaatatcttttatctactcagtatattcagattcttttcctttaatagcttcaaatactgcattcatctcgttatctattatagataccacttcttgtatcttccctttcattacatcatagtcatctacataattaaattttattatatatgtaggattgtattcttctaaatcctcttcaatttcatatcctttttcagtaaatgcttcgttattaaataaatcatatattgctgagtattcccattcttcaacatttttatttgtatcgaaatacatatatacaatatcatccaacacataaagtttttttacaaacaatgctccttcatttacttcaaaacttcctagctctttctttataaatcctgtttctttatctttttctattaatactaaacttgaaaaatccatagttccaccatcctgttatttttataataattatttttatattagtaaatctaaacatatataagttttatgaaatctcctacattactatttttagccatagttcaataaagtataaaattaatttaaaacatatatagttaatttctcatataaaattatatcaaaaaagacattttataaccataaaaataaaacctggtaaacttttttccaaatataagactatattcagaatccactcagataataatattttttccttaactttgtcatacgcttttgtttttattatatggaattatatggtaatattttcttatgttcactcatatactgtgaatttaatcttatttattaatttcttcaaactatactttaggtacatcaaaaataaaggaggtatacagtatgctaaatagcgcacagattcaagaagagtactttgtttataaaaaaagaagaagacgaagactccagaaaaatattactctaaaaaataaaagaagactcatgttatctttaactatttctttcggaataataattatatcttcattctttatgactcgtgacatttatatatcaaacaattccaaggacctcggattttctgtagaacataactttacttctggcttctcatcagaaaacaaactccttagagttcaaaaaatgtcgctgctatataatgatggtgaaactgctgttgttgaagcatctggactttctaaggctgctccccataaaaccatttcaattaaaggaagctttaaaaaggatgataagaaaagttggtgcttagaaaaaatatttgacgaataaataagttcatacttatgcaataaactcgccgaaagaagggttaatcttttgtttcggtatgctagagaataggactgtggatttctaacattagaagttgcacccatttctgcatgctcctgtggcaagcacaggacaagcaaaaagtggaacaatttccaatgaggaaatcctacagccttattatcaatgcaacactgcacaaaagattaaccctttttctagtgtctagaatttcatatcataagtctgattctttttttgtatatagatatccaaatttaaaactacatttatgtgataacttacagaaatcataaatattttgattccgaaaagctatgaaaatatcgctgaaggttctaagcagcaggttgtagccaccttagcacgctccaactttcagtttgacaagctaaaatggaacaacctacagctaagaacctttaacagctccttttcaaatgttttcttcacaaatatatttatgatttctagtgaagatatgaacttaaagttttagcaaatttgtaaatacattcatctaataagttgaattcttaaattggatatttatatagataacacaatcataaactatactcaaaccatgaaatatttcccaatcagaaatgagtaatatacttttgtggaatgtttcattggtaattttgatggatgtgattctttggctataagttgttccaaatgtgctagttcaaagcttgttctttgaggctagtcactttgggtgcaactttatagccttagaatcacccatcagaattacctagaaaccggaacaaaagtatattattcatttcggcaagcatactggtttattatttttttgattgtgcctaaatgcgagttcacatttagatatcatagattttatctagtttctaagaacgcagccaacttattaacagttgacatatcttctctttctaaatctgtaggttgtaatttgattcctagcttttcttctatttgaattaaaacttcgattattgctagggaatctaatagcccagcttcaaaaagatctaaatcaaaatcttctgctatttcatcgtttcctgtaacttcaataaatatttctaaaactttatctttcataataatatactccttcttatagtactaatttttttaatttcttaacttatctatttctatttgaataaatatcctgaaaatatcagcataccaaaacatactatatgaaatgttattaatacctgagcataattaaaccatttctcttttttatgtttcttataaaagcctgattttctctgatagatatcagttaaaactaatgcaattccttgatataatccataaattatatagtatgcagttagtccatgccatagtcccattataaacatagtaataatttgagccacatgagacgcaacaaatctattcttaaatctctttttcctcatagaatttaacacaaatcttgagaaaatgtaatctccaaaccatcttgataaagatatatgccatcttgtccaaaattctttcatatccttacttaagaaaggtttattaaagttatctggtgttttgattccaaagatatagcttgatccaaccgcaaataagctgtatcctgcaaaatcaaagaataaatacatcgtgtaagcatacatataatttacactatttaatattgtaatacctgaaggtatttttaacaaccaatatgtatcaattaaatatgctagtataaatttataagcaattgcaataaatatctttttcagacctggaattaaatattcttctaaatatatattcttttccacttttttattcaaatcatcctcaaatcttttccatctgtctataggtccagaacttagggtcggaaaaaatgttataaaatgaataaatgtcataaaatttatttgagttattctaccatcataaatttctattactacttgtattgccttaaagtttagatatgataagccaataaacccaatgtatgaagcataatgtgtaacccctgctactttcgttaatataagcggaatcattgatgcaaataagaataaccaatataaatatttgttatctgttttctttctaacaaacaaatatacgtatataacaaaaatttcgccaactaaaaacattgaaaataaagctaatcctaaactttttcccatgatcaaatatatcattacagccgaaacaattattccataatattttgatttaatcccatttagccctaaaactatggcaggaataaatgttagtagcaagatatataagtaaaagtaatctccgtattgtgtcaacttcattatacttcctccaatagttttttcctatcaatctttccatttacattagtcggaaattgcttaacaatttttatatttctaggtaccatgtatgaaggaatcaaatttgccaactctttctttatcattattccattttttaatccacttaagccattatcttcttttaactcaataaacgcagttaaatatgcaatttttccatctttctctattggaacaacagctgcattttttatattactaactttaactaagttattttctatatcttctatttctattctaaaaccattaagctttatttggaaatcctttcttccacaataatataaatttccatttacataatagcctaaatctcctgttctatatgctctacatttagatccattataatcatcgtagaaaaatgcttttgcagtagcctgttcattattaaagtatcctttgcttacactaggacctacaattactatttctcctttttctccatcacccaaaacatttccttcatcatcaacgatctttacaactgatgttttcattggatatccaataggcaagcttccttcttctaacaataattctttgctcatatcattagctgaaactgctacagttgcctctgttggaccatatccatttaccactcttgttcctgggaatctatttataagttcctcgcataatggttttggtaatacctcccctacaaagatcattgcttttaaattctgaagcattgtagaattaaaatctttttctgcaacacacattcctgcaaatgaaggagttgatacccatatgttaatatcagattttctcatatcatcaaatatattctttaagtttgaaagtgtttcttttgaaaatccatgtaatgttttcccataacataaccctgggtaaattgatgttacagataaatcaaaagagtatgcagcctgattcatgaatacttcttctttttcatctaaatttaaatattctgcaatccattcaacaaaattatctaaattgttactgcttatttgaacaccttttggctttccagtacttccagaagtgaataatatgtatgcattttcatcttcttttacccaattttctttttctactttaacatctttatattcttttactatttcttcaatatctttatcttttaagatccttatactttcaaaattgctttctttgctaaaatcaataagaacctttggatgaacttcactgataattgcctccactctctcttttggatagctaatatctattggtatataagctcttcctgactttaaagcagccatcataactgccatcattaaattttccttattcccgtatataataataggcgttctatcgtctttaaattcccttaataaaaaagctgctatgcattctgatattgtatctaattgtgcatatgtcatagcatttccatcacattttaatgcaattctattactgtttgagtatttttttataccttctaaaatcttcattatttatatctcccttaaaattgattatatacaaatggtatttcagcaaatggttcaaatgttaatactagaattgctaaaataactacaattgaacttactaatgcaaatcctaaagctctatttttctttatttcgtttataaagttgctcatcaatttcaagccatcctttccatcctagatgcattacatcacacataaaataaggcgtatattcttgaccttttaagttcaaaacttcaaatcctctttctttagccatttcttccactttatcgaaaaactcatctctactttgcttagtcattccagtataatcataccatcttccattagttggtgctaaaattatatatggctttatacctagatcaacacaagtgtccaaatataattcatagtcatcaaattcttttgaattcattaaatcaacatttttatttatatctttttgagattgtaaattattttttaaattcttgtcatagtatgtgtcatatacgtagaactcattattagttacttgtttctttgcttcttcctcggccttcttatgctcttcattccaatcaactgttcttagctgtttttctgatttctcgggtagtttctttaatcttctatataatagacctttgtctttaagttcaacaatattttcccttgcaacaaaatatggcttaaatataacacttgatattttagatattaaattatcgtttgtataaagttttgcataaagcttttctggtatatattgtgagcttcctgatagtagcttgtctactctagctgcatatgtttttttatgttcttcacttatttctttatttgatagaaatttataaaattgcactggtgcaaaattagcttgaaagtctgtaccgtcaataccatgatcactcataaaccactgaagtgaaattataaatgcaacattcggtttactctgggtattctggcttcctaaattagatatctgagtcaagttctgacaatatgctctaccattagttacgattgtatccattccttctacaggaaaaaaagttgtagctaattgtgagactggtgcccctaactctgatgacccctctaatatttgatagttattatttgcaacaaattcattatatacgagtcctctatccttatagctgctcccatactctatatttatttcagttaaatccttgctttttaacatagctcctatttctttatccaaaaaaatattaagtaacataacggttaccacagctgtaataatagggaataacatatatataagcttttttttcatttgtccctcctatttcttgtttttctactacgatttccatttaattctatactaatttaagacatatttcaatccaaaagtcccttctatcatagcatataaaatcacccgatgaagatatatgtcctcagtcaacgatgactctctctgacaaatttttatagtatcgtagtataaaatagttatggtattggatattaatcataatataaaaatatattctattgcaaattatttgcatttaagtgtataatataataatgctttaaggagttgattatttgattactataaaaaatctatcgttttcttatacaaaaggaacagatttattaaaaaatattaatcttaatatacctacaggaacttatctatctatacttggtgaaaacggaagttgtaaaagtacattagtaaaacttatattaggtcttttaaaacctgatagtggttgcataagtttagattctaataaagtttcatatgtttcacaaagactagataatttcaatgcagaatttccaataacagttaaggaagttctatcgtgtcatgctaaaacagtaggtattaagaattcaaagtgcattcaaagttctctaaaaaatgtaaacatgagtgaatttagcaacaagttaataggaaacctttcaggtggacaacagcaaagaatctttattgctagagcgttaataggtgatcccgatctaataatattagatgagccatcaactggaatagatgaaaagagccaaaatgaaatatatcctctactccaaagtttaaataaggatttaggaaaaactattatctctgttgaacacaacactaaggtcgcattaaagtattcgacacacattttaaaattagagaattgtgctatgaaattatatacaacggatgattttaaaagatatctagaatctgaagattcattttacaacataatttaagtggttaaactatatttaggaaggtaataatttatgtttcaattaggttttatgcaaaatgcatttattgctggctttattgtttctatactgtgtccctttataggactttttattgttcttaggcgttattcaatgattggtgatacattgtcccattcatcttttgctggagtcgcaataggtcttcttttaggagttgacccactcttaactgcattttcatttactagcatttgcgctcttgtaatagaatttctaaggacgtattataaaaaatacgcagaacttgtaatgtcaattgttctgacattgagtttaggaatagctattattttaataagtagtggtaaagcttcagctaaagtagattcgtttttatttggaagtattttaactgtaacagactctgacatattcttaatcgctatcgttggaggaatatgccttatatgtcttctgtttctatacaataaattaatatatgtaacttttgatgaaaatggagcaaaaacagctggaataaacgttaagttagttaattatatttttactttgcttgttggtgcaacaatttctctttctataagagttatgggtatccttgttgtttcatcaatcatagtagttccagttgcaacagctatgcaattaaaaaaagggttcactaagaccctaatttttgctattatttttggttttgtagatgttatgataggacttatatcttcctattatataaatagtgcacctggtggtactattgccttaatatcggttatagttcttctattaacactaatatttaaaagattttttaattatgaagattaggctaatacaggtattattatataatacctgtaaaatactcttctaatatttttaaaaatcccctcatatcatctggatatatatcacctatattagctatcctaaatgtgttttctgaagatatctttcctggatatatagtaaatcctctactgtataagtaatcatgtaatctatcgaatttataattttttatctgtggctcaattactgaagtcaaaagcattgatgatatgtttttatctattagtctctttaaattaagtctatctagtccatcccataaaattttacaacactctttatatctcttatatctcttctctattgtctcgttcttagcctctattattgcctgctttaatgcataaagtatttgaactggcggtgtaaatctcatttgataattatctttaaaatatgaatattgtttgtacatattaaggtagagatttctaggttttatattttgagttttatgcaaagccttcttatctgctactacaaagcttattcctgccatgccttgtatgcatttatttgaactcgatgctaaatattttatattcatcttatccatatctataggaatccctgcaaatgaactcatggcatctactatcatctcaatactatatttcttacaaatttcacctaataattctatgtcatttaatatccctgttgtagtctcatgatggactaccgctaaatggcttatagctccacaattatttattttactttcttcactattctttttaattacttcttccaactcttttagatttattgtttctatttgagaacttttaaattctatataatttaaattatatatttctgcaatttcacacattctcttgccataagctccattattaattatcaatattgttttattatcaactaccgaacttaaaatcgcctcaactgctgcagttcccgatcctccaaataatatagttgtatacttttcatttgaacctacaaattcagtaagttctcttgatataaactccataatgctcccaaattctttttctctagggcaaatatctggtacaatctgagcgaattttactgtatccgatgtggtagctggtcctggatttaataatatatttcttctgatttccaaatttacttcctcctatatcgtgttatcaaaaaacaataaatcagcatgccagtctattttcttttatgcataaattctaaataaatataatccattcaaagtatcttgcttgcattgtataattatttaaaacaagcttgaatgaattgaaatttttataacatgtatatgttgcaattcacaatgcacatttcataattcacaattacaactaaaatttttgaaatatttttaaaattattatgaagaattatttttgctacatgtatattaattctctaaaaacttcataaacatttccttattttcaattggtgttgttgtaggtcttcccaaattttttctagaacctttttttacttttatctctaaaaatataggacctttctcattgcttattttttccgataacctaaccaattcatctcttgaactacacgaatagaattttttatatccacaagctttagcaattgctaaagtatctattttaaatcctacagtttcttgaccgcctactgaatcatgagctccattatttatcaaaatatgtttaagattatctgtattttgatttcctattatagctaaaccaccaagatgcattattaaagcaccatctccgtcaatacaataaacatctctgtcttttctgcttaatgcaatccccaatgctatttgagatgcatgtcccatagatcctactgttaaaaaatccttactatgctctccattatatctttccctcaattcaaaaagctcacgagaagccattcctgttgtcgatactacaactgatttttcttttgctttagatattaatatttctatagcatcttccctagtcatttctaactccaaagtctcatcatactttatttgatattcatcaaaactatcttttttcactaccaatgcatatggctcattattttccttcatataattatttgcttcccttatctttttcctcatttcatcattacttgtgctattatctaaaatatcatatttaatgcttagaatatctaatgtttcgattgtaataagtccttgtttcttatgttgaggttcatctttcttatttggctcacctctccatccaactattaaaagcactggtatactatagaccaatttgtctgtaagtgatgcaagtggatttaatgcatttccaagacctgagttttgcatgtatactaggccaattttctttgttgctaagtgatatcctgctgctattcctattgcattcccctcattagctgaaattatattcttttcgctacttacattttccttaatgtatgcacaaaaagactttagtaaagaatctggaacacctgtaaagaaatctatattgttatttaatagctcattataaaacgcttttacttcaatcattctttttaactcctttaatattacgcttatgaaaactatattttcagcatactccaaatataatattttaatagttaaaaaatggaacaagcattcaaatatatatatactttcagttgtttacttaatttctttacattcctcctggaatcaaagtaagtatttcttttataggcatacaattgattgaagcctctttagatcgtccattctctaaaatacttttcgctgtatttaccattgctggatatgcacttcttatcagatgatttgcataaataataacgttaactcctaattccattaactcttcctctttcataaaattatatgaagttgggactactactaaaggtactctattttcaaactcattatatcttctacagaattcaatgatttctcttccatctttttctttactatgaatcatgataccatctgttcctgcttcaatataagctttggccctttttatagcatcatccattccagcgcctgcaattaaactttcaattctcgaaattatcataaaatcactagttactctcgcctctctcccagcccttattttgtcacaaaaatgttctattgtatcttgagtttgcttcacttctgttccaaataatgaatttttcttaagaccagttttatcttcaatgataatagctgaaactcctaacctctctaaagtcttaactgtataaacgaaatgttcaatttgtcctcctgtatctccatcaactattattggttttgttgttacctctaaaatatcattaattgtatttaatcttgatgttaaatctaccaattctatatcaggttttcccttagctgttgaatcacataatgaactaatccacattccatcaaactcttttattttcccatccttttgaactttagtcttttcaacaataagtcctgttaaaccattatgagcctcaagtattcttagaggtttatttgaataaattaattcctttaggcctttcattctcatttgaggcgttatacctatttgggataattcttcatctaattttgaaatggaaacccctttagtatatggaacttctataagttctcctttccattgttttaacacctctataactttttctcttaattctttttgcgagccttccttccaatcatctccgtgaagaacatagttaggtttaattttaagaaggtttggaacttgatctaagctttcttgaggaactacagatataacccctttaatattactaatcacttcttttctctcatcatatttcattattggatttctccagtaacctcttataacctcatctgtatgcaatcccactattatatctccaaattttcttgcttcatttagtacatttaaatgtccttgatgaattatatcagcactcatagcaacataaactgttttcatattctttcacactctcctattttctacatttttatatgcatatttatagacgttaaagctcaaccataaaaaatctattaaactagcgcacatacagtcatttcactctataatgctctctcttctgaaattttttctagctttggtatgattgatttctttattctttcaagatgatttttatcatctacttctccccatactaaattttcaatctttagatatcctacttttctttttttagcagcatcaaatattgcatcctcataatcgtatttctttgtcttctcgcacttatcttcaaaaatactatcataatcatatatttttctattaaattctttatattgcttcagcatttccttatacaactctaatgatattttagaaatcccaaccaattccccatacacatgtcctatatcttctcttcttttagatattttatataagttattatctctaacttctacatagcattcatctccagaatctgtttttccacttagtaaaatacaatcattttcttcaaaatttatagtctttattagtgcataaacctcatatattaaatcactttcaagtagcaaaaagtcttcttttaattcctcttcaagaattgatagtgaagtcatgctgccggtagctttatattttctattttttcttgtttctatataatttttatcttttgctagctcatcataaaattcatgcagatgtcctgtcactatataaatcttatctatgcctagacttcttaatttctcaatagatctttctatcaagcttttcccatttacctttataaatccttttggtaacatatcctttgttatatcctgcaatcttgatcccattccagctgctaaaattactgctgtttttactttactcattttccccctccacacagttcatattttgaacaaaattatcttaacatctttcattgttcaaaacaatatgttcatacaaaaatttactttaattctaaaaatatattcaaaaaaatgaaccactccctatctgcctgataggaagtggttcattttcatacggcttttattttaaagtattattttgatactacatttgtagaaggtgctatagttgtttttgttccgggaatcattaatttattaaactcttcttgagaaacttttaatgtgctagttgggaaagttatccctttgacatcactcttagtatctgttgttttcatagttaatgcaatagttccaaaatctttaatttgtaaattcatattgaaatctgagctataattattatctgtgaacacttcttttgaattaatagttgttccagctaatgatgccttaatttcaggtaatgatttatcaaattctgggctgttagcagcagttttcatctgtgtaatactttcagctggcaatcctaacttaaatgtactattaagattatctaaattattagctattgcttttaatgcttttgcagctaaatctacagttttatctgcatcaagatttattgtatattctcttccattttgaacgaaaggtaaatcaagatcagcgcttcctccaaatatcatctttccgaattcaaccattccatctggttgagtcattaatgcttttaatttagtcacatcaacacctgatgcttctgtatcaatacctatatactcttgagttatattatttaaacctgttggagcgctttgtccatttaaagaagatatcccttggtaaaagctcttatttatatagcttgtagttccatcgcaatatgctttaagttctggaatattaagctttcctgctggatcagtaaatgtcatatcaacatatgatttatcttttgctgtatatccagtagctgcaaattttatttcttgttttgtttcagttccatcttttccttttacattgatatttaagtctccatcaatgcttgatgttgttgcttcccatttagacgtatttgaaagttcctgtgcataattaagtgttgcttggctacatccagccattgttccaacagttaaagctgctgtcataatgaatgccaaagtttttttcattttcatttttctttccccctgtaaatactcattatttatccgatagctagcatccgtaacactccacttctttaagctggagataacggctgcacgctcctggataagttcaactaagattcagatggggatcaaaccccacctgaatcaagtttcacttgatgataaaaatacaatgtatgttaataatttacttttcatcatatttctattatacatatttttgattaataaatgatagaaaaaaatattaaatttaccttaatttatacttaatatttctaaatattttttaacaaatatctttacacactatatttcttttgctttacatatcttatatgaaattatatatgaaatatatcctataagtgctgtgactaacatgctgataatcattaatattaacttattatttataataaaatctaaagaattctctaatataaaaccattcttatttaccaaaaatgatggtaacgcaaatatgcagaatgcaggtaaaagatatactaacaatgatactgctttgcccttttccattccaaacttgtaatatataggatattgaataaagcaagttattaagctcattaacccacaaaagaacattgttaaaatttcaaaattttgaattttattaatctgatatagataggtcacaatagatgtatcaatgagaaatataacgaaagctatacctattaaatacaaaaaccttccaagaaccatatcagaaattttagcaggaaacatataatacatctgagtgcttttttcattcccttgagtactaaacggtattgttgctaaaattattaaaaagaaaaataagtatgataatgccatactgtatgtttctcctgaaaacataaataaagcgcaaaatatcgctggtgctaacacataaagcctaatactttcttttattaatcttaaatcaaattttaaataacttattgatctactcatattttaaaacctctttctctttataaattctacatataattaatactaaaacataatatatatgtcacaattcacaattccagttaaaattcttgcaatatttttagaattatgatagagaattattcttgcaacgtatatgcatagaatactttattactgatccctttttccattaatataaaatatcacaatgttatccattgatggtttttctactagcaaatctttacttatatactctatattctttgaatcaattaatcctccaaatccaaaattagaagacttatatccaattaacttctcttttaattcttctgttaaatcatcaagaccacctttaaccaatagatgattttctagtacattttctgttatatcataaaacaccttttctccattattaataaagaatagataatctgttatcttttcaagatcgcttgttatatgggttgaaaatagaacacttttttctccatccgctatatattcctgtaatatctctaaaacttcatttctaactactggatcaaggccacttgttggttcatctaatagaagaagttttgtatttcttgataaaatacttgcaaaagacaatttaactttcattccctttgaaaattcttttatttttttcttataaggaaggttccatttttcagcatattcattaaatttgctttcatcaaatgaagtataaaaatctttgagtgtattaattacatcttttaatgtaaaatttattggaaagtaacattcatctccgataaatcctatcatgtctttataaatttcttctccatcctcataactcttaccaaatacttttattactccactatccttttttaattgattcattataagctttatagtcgttgttttcccagcaccattttgtcccacatatcctaatatataaccttttggcaattctaaatttatattcttaagttcaaagccatcaaatgttttatttaaattctttatttcaagtgcattcatatttccctactccttaaactcatattcttaataataacgtgtattgtaataattaaactttcacatattttatccgatagctagcatccgtaacactctcttataacggctgtacgctcctagataagttcacccaaattcagcttgagtataaaactccacctgaaaaatttcactttatgtaatttgctcatctgccaatgtttttagcataatcactaattcatcatttgatatattagctagtttcccattttcaattgcaaccatgagggcttcttctattttctttaaatattgttcccttaccatttcactatccttaggaagtacataacttccctttcctctaagagttgctataaacccttcactttcaaggtccgaataagctctggttgtggtaataacacttatccctaagtccttcgctagctgccttattgatggcaaaaactcattttctaaaatttcgcctgataggatttgttcttttatttgagccttaatttgctcataaataggcaaatcagatttattagaaagtaatattttcaaattactacttcgcctcctttgtgttcatactgtatatatacaatatatacagtatgaacagttttgtcaataattttttgtttattttatttctattgctgtaacactcatacttctttaagttgaagatagcagctatactatattacataagtttagccaatattaagatgaagtccaaaatacaacgtaatcaagtttcacttaataataaagtcttttaaagttagtttatattattaatacactttcaattcaaaaagaccattaggtgatttatattctcacctaatggtcttcaatatcttaattctatttttttaatttccttctgctataactttatcctgaacattattaaatacatctttatccaattcattaaagctcttagcaactgttactgctgtaaccattgatccatcaacattaagcgctgttctcgccatatctaatatcggatctattgcaagtattcctcctgcaagagggaagaaacttcccattcccattcctgatattactactgatactgacattattgctgttcctggtaatccagctattccaaatgaacttataattatagtaattaccagcatagcgtagaagctaaaatccattggagttccagacatatttgcaattgtaacagccattaatgctggatatatagcagcacagccattcattcccatattagctccaagacttcctgcaaagcttgcaattcctttttcaactccaacctttttattcaaagtctcaatagtaacaggtaaagttccaagacttgatctagatgtaaaagccaaaactaacggctcaattacatttcttaaatattgaataggatttaagccattaagtgaaattattacaagatgaattacaaatacaataataacacttacatataaagcaactatgaaattaaccacatttattattgctgatattccatttgatgcaactgtatttgaaagtagtggtaatacagcatatggcataaatctgataactgttctagctacagtagtcattatgttatagaatgcctctataacatctattgctggttttataatatctttgttagtcttatttagttttcttatagctattccaagaaatgctgcaaatataacaacagccactatgtttgcatctgccattgcttttattggatttgctggtaaaagtcctctcatagtatctacaaaagatgttatttcttttaattcagctttactttggattgcttcaactccaacgccaagtctaaataaattcccgattattatagcaactattgaagcaatagctgtagttcctaataaaacaaatattgatctagaagtaagttttcctaaactttgtttttcatccatgtttattataacttttaacattgaaagaaaaactaatggtactactaacatttttaataggtccatgaatccatttcctactagcccataccattttgtaacctcacctatccaaacaacatctcctgtattactcggaaatcctgctataaattgtattataactccaagtaataatcctaccacagttgaaataatcatacgttttgaaaagtttaatccagccttttctaacttataaagtccatagaatagacctattaaaattgctataaatattattggtttatagcttgttatcattataaatttcgaaaaaaatgtactatccattgttacctcctataattcctacaattcctatataattagtatatttatagtatcaattatatgatcatatgtcaataaaagttaatactatttttaaatatattcttcctgaaaacatatacttcttaatactttataataattatgtaatacttattattacattaatcaaaatatcatttaaaatttatgacaaaaaaataaccaccatgaatataactttcaattatcaaaagctaatattcataatagttatgtaaattttactcatgaagtcttcttattattttatatgcaaccacattttccatgaccattggtgatttatgagcaaaaaagattattccatcagtaggagatgtaattttttcaataatttcaccttcatatggatgaattatttctgcaagaacatcgcctctttccactccatctcctggattttttaaccttctatatattccacctgtagtagtctttaccgaaagcaaatcatcttcctgcaaaacactagctatgtatccactgtgactagtatactttataactcccattctagttaaaaatcttaatacagccactactgcatgtttggcagaaacttcatcaatttgatctgttgcatttgtatataaagagaaggcacttgcattccacatctgccaattgtagtttaatgtcatggtatcataaggtttcggcttacgaattaatacatactgaagtccaaataaatttgcaagacttggactctgatatcctgtttccatcatccttatatgcggaataaaatctcctggcatataaaaactagcaaactgtattccatacgtataatccttaacttgttcaaaaacaccacttgcaattctctgagttgtttccccattcacttctcctgggaacattctatttatatcagtgttgtccattgtccaaaatctttttcctatattcattgaatgaggatttacacaaggaatcacaaggatttcgctatgtcttgagattgctcccctttgctctaacttagttaaagttttaatcaattgagaacacgtatataattgctgtatctcatttccccttattgcacctactatgcatgctgactttccaccttttccaaatttatatcctgttattctcatatcatctctatgaggtgactttaatgtatatattatttcttttatcattttacacctccaagtaccctcgcaataagtgatccttcataaacaactgggtattctctcaatgtaaatactactccatcacaagatgaaataacctcttcttctatctctccagttaaggaattaaaaatctctccaattttttcttctctttttatttcatccaaatgttttacacaaggcataaatattcctgatgaattagcatttataaaattcacttctttttcagttgatattatggggtctcttacaggatttactgtcccattccatatgcccaattttttcattaaattaaatataccttccactaattgatccccatattcttgtgtaattctcattccaacccccatctctacaagcaatgttggtatatttttattatttaagctatatgtaagtgttgattccagaacagtagactctggatgaacccatataaaatccatattcaacagctttgcataaggtactaatttatcctttatatgctcactcactctaacttgaggcacttctctcaaaaatatattgcttgcatgcaggtctatgcatatatcagccccttctatatcttcaataattttagctgcaacatgttctgccattgctccgctttcagatcctggaaatattctattcatatctaaatcaaatgttggcattcccctatgtactgaatctattccaagcggatttaaagatgggtatatatcaacaattccatttaagtatttaatattttctttaatttttcttattaatttataacatacatattgaccttcaagttcatctccatgaagacctgttataatacatattcttttagccttttcattaatatttactgacgtaagtctattttttttgattactaacttctcatcaaccgctaatcctaaagatactaccgtttctaccatgttcccctccatatgctcacactcaaaaacctattctgtaaaaacaatctaaattaatattattattgtaaaaaaattttcttttatacaaaaaataagcaaagaatcccactgtgtgagcttctttgctttaatctaatattactacttggatattttattgtcaaacttttttacatgccatatataaaattactttccaaaatatttgaatattatttatatacactcttttattgattcttccaatacatcaattccatatttaacttgttcatctgtcataactagtggtggtaggaaacgaattacatttccaagtatacctgcatttaagaatataacaccattttcataacattttttaattatagatttaactaaatctgctgctggctcttttgtgcttctatcttttacaaattctaatcctaccattgcacctaagcctcttacatcacctataactgtatacttttccttcatctcatttagtctttccataatatatccgccaagttttaatgatttttcacatagattttctttttcaatcttctcaataactttaagcgctgctacgcatccaagaggacttccagaatacgttccgccaattccaccaacacatgctgaatccattatttcctttttagccacaactgcgcttagcggcactccagctgctattgattttgacatagtgataatatctggttctataccataatgttcatgtgcaaacatttttcctgttcttgcaaatcctgcttgtatctcatcaactataaatactatattgttctcattacaaactttttgcaattctctcatgtattttgcagatggaactacaaatccaccttcaccttgtaatggctcaattattaaacatgcaatcatgtctggagaaagtgttgttttaagcatagtttttagcctattaatacattcatctgcatattcttcttctgaaactccaagtggtgctctatacgaataagggaaatcaaatttatatgtttctggtgcaaatggtccaaaaccatttttgtatggtttgtatttactagttattgacatagtcatatttgtacgaccatggaaagacccagtagctgaaagtactcctgttttcttagtataagttcttgctatttttatagcattttctactgcttctgctccgctattagcaaacattactttcttttcgtaatctccaactgttatttcagttaatttttttgccaaagcaccgtaagattcatatgttactacattatagcttgggtgaataaataattctgtttgtttctttatctcttcaacaatctcaggatcacaatgtccaacattttgaacaccaattcctgctgcaaaatctaaaaatatatttccatctacatctttaattaatgctccctttgcttcagctatagcaataccagttgatactgaaactccatcggcaacatatttttttctttcctctaatatttctattgatttaggacctggtattgatgttactaattttacatttgattcttctatcattataaaaacctccattaacgtttattttcttaatatatttctaattccataaaaatggagccatcatgtttatttacacgaaagactccattgcccataaattttatttaaatttcttaacttgtttatataataatactttctatttttcttttctatgtccaagcattataatgtttttgtctattttgactaaagtcccaacatcaaatacacataaacatattaaaacttagattaatacatgatcaaaattaatgtattagtgcacattgactatattatttatcttcctatttaagaattttaccaatgtctagtgcaatctttactttaatacaatcattaaaattccgtaaatcacaatttaatagttcttctatttttttaattttatatttaagggtgtttctatgaagaaatagcttttctgctgtaactgtgatattacaattctcatttagatacatctccaatatttcaactaaattgttatctttactatcagaactactaattggacctagaacttctgagaaataattttctaatatactcctattctcaacgctgaaaagtatgctgtaaatccctatatctttgtatcttgtaattgtgccatctaaaccttggcatttagcactatttatcgctagctccgcttcatttaatgattgtttcatcatttttaaatccttgtacgagtttcctattcctacacttacagacattccatccatgcgattctttgtagctaactgtatctcttttaacgccttgtctaatctattcatgcaattttcttctgacctaataaaaaagattacagcatcatccttatctattattggtacctttagtgcatgtttatcaagtatatcttgaaccacttttctaaagtttattttaatcttagatatacttttctcatcacctaaattctttaactttaagtatccctcgaaaccatcaatatctataacacatatgcaacatccgcctgatagattatatccaaaatatgcggccttttgtattgcatctccttctaattcaccatctccaaatagaatattacttaaaaaatgtgatagagaattctcttcaatacgagataaaataatagcattgctaatttcccttgagacttcaaccaatttaacttcccaaggcaatgtgaacaatggaatttcaagttcattagcgagtttaatcgcctcttcagatacattccttatgtatggacctatatttactactaagcccgaaccatttttctcactaattcctttaataaaatctagtaatagcccctcattttctctaattccaacgccggttataaatatgatttctccaccttgcagccatttaattccctccaatggattctcaaaacattccgccacatatatccactctatgcttttttctaagccaccttctccaccaacaagattaatttttcttaaggaatctaatttaagtatatcttttaccgaaattgacataaacttcacccttgcccctctaattatttaaaatgtcatctttatttattatatttttataataatatctcctcataaaaaaagatataatattataataattttttcatattaaaaagaaggttgatcaaattcttattactctcaatatttattgatataattagaatttgctcaaccttctactaacaatttttcatatgctcttttaatatgggtaaataccttgattcttagttacagtttttacataaatgtttataatagaaaataatttaccaggtgacacctaaataattgttcaccatatacctcactagttaaatttcaacatctttttttctaccagttttactagttgtgcaagtggcaaacttaatattaaataaaatcctgctaaaatcgtatatgattcgatagttaaaaatgactgagatgcataactttgcgtacgtaataatagttcactaaccgagacatatgcaagaagtgatgtatcttttaacatcattacaaggtaatttccaaagacaggtattacattgcgaagtgcctgcggtattattattctaaacatagtttgattatttgtaagtcctaatgctaatgctgcttctgtttgtcctccatctattgataatattgatgaacgaataacctctgatatgtagcatccatagttaattccaaggcctattgttcccgcaaccagtgaacttattttaaattgataccctggattccagacttgtacaataatagatactaaaagtggtactacataatacatatatactaattgaactaataaaggagttccccttataaattctaaaaatactaataaaaatcctcttaaaatttttattttactaatacgtccaattgcaataaataatcctaagattattgctaaaaaaaatccaaacactgtcgcttgtactacaacccaaagacctgcctttaatgaaggcaccaagaacttgaaagctgtactaaaatctagattagataaaatatccatattcatttcctccccttctaaaaaagaatccgtctggattcttttttagtttatattgttacttgtcagaagctttaccatcttctactgatacaaaataatcttcattcattccatacttcttaagaagttttaatattgttccatctttcttcatttcatcaatctgttcgttaactgcatctgctaaagctttatcattttttctaactgctgctgctatcattccagatgtttcagctttatatggagataatatctttaaattaagactgctatcttgtgatagtgtgtatccggcaaccattccgtcagttatacatgcatctaccttaccagtatttactgctaacattaattcagattgacttccaaatactttaacatctttcactgatccatcttgttgccacttttgagctgtttcaagaaacgctgtacctttttgccctcccaatgttgcattctttaaatcgtctttacttgcaatttttgaatctttaggaattactattgcttcgccttccttataccatatgtttgtaaataatgctaatttcttacgctcgtctttaacatacattccatctgtcaccatatctactgtattattatttaactcaaccaacaggttttcaaacggtatttgcttcatttcaactttattaattcccaatctttttgcaacttctgttatgatttctgcatcaattccagtaaattcatttgttttagcatccataaatgcaaatggtgcatcatttgatgaagcaactgttaatacccctttttcttttgcagctgctaatgtatcctttgatttatcattacctgctgatgttgatgtagtactagaacttcccgagccacatcctgtcataaatccaatacaactcattataaccattgttacaactaataattttctccctagttttttcataattaatttccccttttcgtaattatttttaatgttgaatctttttattatctatagtaatttcaaatttaacatgtgaatttagtttaaaactctagataaaaactcctttgttcttggattttttggatttgcaaaaatctcttttggtttcccctcttcaactatataaccattgtccataaaaattactctatcagatacatctctagcaaatcccatttcatgagtaacaactaccatagtcataccatccttagctaattgcttcataacatctaacacatcaccaaccaattctggatctaacgctgatgtaggttcatcaaataagagcatccttggttccattgctagcgctcttgctattgcaactctttgctgttgcccaccagatagagtcctaggatatacatctgctttgtcttttaaaccaacctttttaagaagttctagagctatttcctcagcctcttttctatttttcttttttgtaagcacaggtgccaaaataacattttctatcactgtgtgtagtggaaataaattatatttttgaaataccattcctacttcttccctaagagaacggctatcgacattcttacccagtatatttttaccatcatagaacatttccccacctgttggaacttcaaataaatttaaacaccttaaaaatgtgcttttaccagatcctgatggtcctattatgcaaactacttccccttcttttatatctacacttatattttttaaaacctctaactctccatatttctttgataattcattaaccttatacatattctcaactccacttcatctaaagtaataagaaaaaggcgcaccgtttttttcttacagtgcgccttcgcatttaatattaaattattacattgttttgcgttaggataatattatcatggtagttaccctatttctataaccataaataacatttttttgtgcagtatgcacactatttgattcaacactaagtttattaaataatgcctgaatctatcaatccaactacaatttgtatgcaatatctaacttccttgttaaatattttaacttatgattactcttttattatctctttgtatagttcaggtcttctatcttgaaataaagtgtagtattctgatctaagctttctaggcaattctaaatctatttccccagatactattccctctatctcatcatttaactcttttaatggtcttccaacaggatctactattttactatggccaaaaaagcccaattctttatcttgtccaattctattagctgctactaaatatatgcaattatcaaatgctcgtgctcttgttactagatcccaatcatcagaatatggcttttcccaattagtattaaccacaagaagctcagcccctttcaagcaatacgtccttgcgacttcaggaaatgcagtatcccagcaaatcattactccaatttttccaaaagaggtattaaaaattgggaactcacagcctgctttaaaatatcttttttctgtatcaaatagatgtacttttctatatactcctgccactctcccgctactatctatacacacagatgaattgtagagaacatctgttagattaccatctttttctggaaatccataaactatattagtattaaatttttttgcaagttcacttatgacttttatactattactactttccactacttcagctagttctttaaatttattcccacattcatatccagatgttattaactcaggaaatactattaagtcagtttcactatctttctccataatctcgtttatgaatgtaaccatcttttctaaattatactttacattatttagttttggctccatttgaacgcaagtaacttttattttcatctttccatccccttacttctaatacgtaaccctctctcttttcatctcttttgatcttactttttccaaatatattactaatagcaaaacctattacaatccatgccaatactatatatggaaacaggttattaggaaactctggtatagggtaaacattagaatataatacatataacaaggctgctattgatgctattggtattattaaatgagtttttccccatactttgtttcttgtaaagtaaaccatagctcctatacttgtaaatatatacgaaacaagtatagctaatgatcctattgttgccaaataaccaaacacttctataccatcatgtttaaataatgcaatttgaactatatctgatattattattattaatatcaatccaaaatatggtgtattgtgtttaggatgtattttcatcatcgcttttggcattattccatctctacctaatgcaaataacattcttgaaccagcacagtaagatccaagcgcacaagaaaagtttgaacatgcagcaaccaacatcaatattgtaccaaatcctgctgtcatatattttgttgataaatctgaaagtggaagtgttgaagaagataacgcctcaagtccttttgcatcaagaccaaaacctataacttgtgcataactacaaactaaataaaataaacctgataaaaatacagcacttattattgctattggaatgaattttttaggattctttgtttcttcacctaaacttgaagcactttcaaaacctataaaagaaagaaatgcaaatactgaagttgaagctaaagctgatgtactaaccccgttactcttaaaaggaatcaagctcaaaccatttgtagtaccaactttaattaaaattacaactgaaagtagtagtataagtaatattgatattccttctattactagaataattctattacatatctttgcatcaatgattcctaatgcaatcattgcaatagatgctattattgagattggcatccaatttacatgaaattcaaatacagataaaaatccagagaagaaattaccaaaccctgctgcagtgcctcctgctaatgcaatataggcaagtaatagtgcccatccagatgtaaatcccattttatttcctagggctgttttagtaaaagcataaagtgagcctgatgcagatatataatgattaaattttataatcgaatatgatacaagacctactactatagttgaaattagaaatacaagtggtgcagaaaacgagcatgtctgagccattagagatatatttaatgacatcgctgctgttggtgctataatagccactgataaagccactgtttcaataatacttaaattatccttctttaaacctgatttttccataattattcctcctaataaatatttttttaatcttgataacacaaaaggcgcactgatttttatttcagtgcgcctttgcatctaataaattattttaaatttctatattataatgacttgtaatatatatccttaatttcttctaatgaaaattccttaggatgatttgctatgcttggttttgaaaccttcatacagttttcagccatccattctacatctttttctgtaatcccaagctctcctaaagtaactttcaaatcaatttttttcaggaagtttcttatagcatctgcacaatcttttgcatcagttcctcctaatattttagatatgttactgtacttttctaaattactttcccacgatttttcagcaataattggtgtaagggctgccaatcctttgccatgaacaatatcatgtaatccgctagctggatgttcaagtccatgaggtgcagttactcctgctattcctatcaccattccacctaatgtacttgctaaagttacactatcccatgcatctaaatcacttggatcgttgtacactttaattaagttctctgataataattttattccataaaatgctttcatatctgttaatggctgtcctatttttgataaatacgcttccatattatgcgctaatgcatcaaatccaacagatgcaagtatgctctttggcattgtcaccataagttctgggtcaataattgatgcttttgcaataattatatttgttctaagggatttcttatccttagtttcaggatttgtaagaactgaaaaacagtttccttcacttccagtaccacatgttgtcggaactagaactataggcaatgcttcactcccttgtttaataccaaatatatattctgatatatctccaggatttttagctgaaaaggctatactcttggctgcatccataatgcttccaccaccaagtcctaaaacaacatcacatccagtttcttttataacatctacaccttcatatacagttgtagtaagtggattttgttctactttatcaaaaatttcatattgaacttttgcttcatttaacaaatctatggttttatcaagtaaaccacttttttttgtactgtttctcccagttacaataagcgctttctttccatacttagcaacctcagttcctatttcattacttctccctcttccaaatagaagatttattggtaaattataattaaaattcattctaactccccctaagtagtttaattgttgattctaaactactaataatttctctctaacttagcattttcttataatcttaatcttcaataaaagaatataaaaaaatgcctttattaataataaagacacctttgtcaaaactataataccatattggcaatatatattctataattttatagacaataatttagtgcacattggacaattaataattttcttgttatttcagtgttaatactaaaattttcagctataagataaatattcataaacaaataaatattgtaacttttgttacatacttattatcatataaaaactatactttagttaatgaattacaaatattaatgaggtgttaattatgaatatagataatttgatgagagaacataaaggtatttttgaggaaataaattatataaatgagtcaattaataataaaaaattcgaatctgatcttttggatataactactcatataaacaaacttgctggaaagttgaaaattcatctaagttcagaggacaaatttttataccctaatctacttaatggagatgataataaacttaaaaacctagcaaattcatatattaatgaaatgggtggaatttcagatacatttacaaattataaaaataaatttaatacaaagagtaaaataatatctgaaggcaatgaagtttttacaagcgaaacaaaaaaaatcttagttgctatagaaaagagaattagtaaagaagaaagtgagttatataaattaattagatagatttatataatacttcacttctaatcacatatagggttccacaatgagaatcgaacttatgtgaatccccaacgaaattgaatacatatttgttccataggactatgaaaatttcgctgaaaggttctaaatggcagattgcacccattactgcatgttcccactttcattgtgacaggcagtaaatggaacaacctccccttaagaacctaagcagcttattttcaaatgcctactacacaaatatgtatccaatttctatgcttgtgatatctcaaattttcaatttgaaaccctatagccaaataagtcttgaacttatggatatggcttattgttggtttatatatgccaaatctataatcttatatacctaaaataaactcgattcacttaaagctaagcgaattgagtttataaatgcttttcctatatattcttatttatcttcaaataatgcagttgataaataacgttctcctgtatctggtaataataccacaactgtttttcctgcattctccggacgttttgctaattctgttgcagcatatgcagcagctcccgatgaaataccaacaagtaagccttctgttttagataattctctagcagcagaaaatgcttcctctgttgttatttttataatttcatcatatatttttgtatttaaaacgtctggtacaaatccagcaccaattccttgtattttgtgagggcctgatttaccttctgataaaactggtgaatccgctggttctactgcaacaattttaatatctggatttttagactttaagtattctccaactcctgtaacagttccacctgtaccaacacctgcaacaaatatatctacttttccatctgtatcttcccatatttcaggaccagttgtatttttatgaacttctggattggctggatttacaaattgtcctggtataaatgaatttggagtctcatttgctaactcacttgctttagctatagcccctttcattccctttgctccttcagttagaactatttcagctccataagcttttataagactacgtctttctacactcattgtttctggcataacaattataaccttatacccttttgcagtacctacagatgcaataccgattcctgtattaccactagttggctcaattattactgatcctggttttaataaccctttgttttcagcatcttctatcatagcctttgcaattctatctttaacgcttcctgctggattaaaatactccaacttagctaatattgttccttttaaatcttttcccttactataatttgcaacttctagtaatggggttctacctactaattctgctaaattcttatatatctttgacattccaaccactccttaactttctcatataattcttatcagtttactatgttataagtatattcctctacttttatatagtcaatacttttttgtatattttaaaaagttttgcctaaattacatatatatgcaattgatgataaatatacatactaataattattttaaaaaataaaatagtaaattttatttttgatatgttataacattctattttctaactatttatagtaatttattcataattcaattattgctaatttttaaagaacaaagtttcaggtgactttagataaattctgtattgtgcttcaaactctttttatatgtgtagatttcctacagaataaaaaataagcaaattcccagactcaggatattttgcttatttttctctatattgaaacacatcttgattctgatatttgttttaatagatattactttatgaatttaatcactccatcttttcttccgtgtgccttcggtgtattagccggataccctaaagctgccattccccaaacaatatgattttcaggtatttcaaagctatttaatacttctcttacttctttttcatcacaaatattctttaattgattaatccaacatgagcctattcctagtgaatttgccattaagaatatattttctaatgcacaagaacaatctgcaagtccatttgtattctctctatcattagacaacataattaaagttggaggcgcataaaagttatatccagcatcccttttcaaagcttctctaactacttttgcaagctgctccatcttttctttgctttgaacaactgtaaattgccaactttgtttgttcattccgcttggtgcatttactcctgcctgtaaaattaaatctaattcttcatcttttaattgttcttccttaaaagctctcacacttcttcttgttaatatgttttgtaatacttcattcatgataacatctccttttacacaaaaatgtttatacgttatttttccatttaatttaaagataataattatagttttatatttaaattataccactatatcaattttataactaatcacactaatctggttctattaatatcaacttttctattcattaggtagtttaatataatcaatgttactttttctatattgcacaggtgtaatattaaactgtttcttaaaatgtttataaaaagtaggagtatccttaaatccacaagaataagaaatctctgttatattcattttcgtagtttcaagtaaattcacagcagtatttaaccgaaaagaaataagatatttctgaggtgaaattttatattcctccataaatattttatataaatatgttctatcaattccaacgtatttagctatgtcgctaactttgatatcatagccaaagttattataaatataatcgcgggccttatcagcatatgattcacaagtatttttttcttttatattcacctgattatacatggttgaaaaacacatatacaactgaccaatgagagcatactcattgtgactatcttcttcataattatgtattagtgaaagtagcctttctttgaaaatcccattactattatccttaaaaattaaattattttttgataatccacaattttttagaatagtgctagcatcattcccatcaaaacttacccaacagtactcccaaggctcttctttatctgctttataataggtagattcacctggacaaattaagaaagcctctcccctttgtaattcataacatttattatttacataatatttcccttttccatttaaaatataatgcaaaagatagtgatgacgaatggcaggcccaaaagaatgggatggcgcacagacctcatggcctccatagtatattgttaaagtactaattgatttatattttgaagtaaattctaactttgcttccattaattaatcctcctctatggtacttacatataaataaaccaactaagacctagacttatgcatatatctcgccgaaatgagaattatgctgttgttccagtttctaaggaaattatgatggatgattctaagctcacaagttgcacccaagatgctagcctcaaaggcaagcgctcacagagaaagttcgaagaacgaaatataaaatttcgattctcactttttgaactagcatacttggaacaacttttaatctaagaatcaaagccatcaaattcctaatgaaacatttcacaaaagcataattcttatttctagttgggacatatttcatagtataaatctaacttaaagttgggttatctatactttatgaatatatctatccagctttaaaactaaatttatataataaattaccaaaataataaatccacttttaatttttattaataaaaatatacaaacattcaacataagcacaatttttagaaacatagaacatagaaagtatacatttacaattatataatttagttataataaaatcaaaattactcaaggaggatgattatatgaaaattacatttatgggagctggaagtactgtatttgcaagaaatgtgttaggtgattgtatgtgcacagaagcactacgagatagtgaaattgcactttatgatattgatgaggaaagattaaaggaaagtgaaataatcctaaatgcaatcaacaaaaatataaataatggcagggctaatataaaatgttttttaggcgttgaaaatagaaagctagcacttaaagatgcaacttttgtggttaatgctattcaggttggaggatatgatccttgcacaatcacagatttcgaaattcctaaaaaatatggtttaaaacaaacaattgcagacacaatgggaatcggtggaattatgagagctcttagaacaattcctgttatggctgattttgcaaaggatatggaagaagtctgccccaatgcctttttcttaaattacacaaatccaatggctatgcttacaggatatatgcaacgttttactcctataaaaacaattggtctttgtcatagtgtccaggtatgttctgaacatttattaaaagatttaggtatggaagataaattagaaggcagaaaagaattaattgctggcattaaccatatgggatggcttctagagatatatgataaagatggaaatgatttatatccagaaattaagaaaagagctgaagcaaaaaattctgcacctgaaaaacataatgatatggtacgttatgaatatattaaacatcttggatattattgcactgaatcaagtgaacataacgcagaatataatccattctttattaaatcaaaatatcctgaattaattgatagatttaatattccattagatgaatatccaagaagatgtataaaccaaattgaaggctggcaaaaagaaaagaatgaaatcttacaaaatggcaaagttacacatgaacgttctaaggaatatgcttcttatataatggaggcaattgtaactaataaaccatataaaattggtggtaatgttttaaatacaggacttattgacaatttaccacaagatgcatgtgtagaggttccttgtctagtagatgctatgggaattcatccaactcatgtaggtaagcttccaactcagcttgcagctatgaatatgagtaatataaatgctcaactattagccattgaagcagcagtaacaaaagatagacgtaaaatataccaagctgctatgatggatccacatacagctgctgaattatctattgatgacattataaaaatgtgtgatgaaatgatccaagctcacggagattatatgaaggactttaactaaatcaaattgttcacttcctttatatagtttgtggcacctctcatgataagagctgccactataatatttcctaatggaatttattataattcttctgacaatttccttaataaacttgcagtagaatttagattttcaattgattctgttattttttctaatgctgttaattgtttatctgatacagtatcaacatctgatactttttcatttatcttttttattgcatctgatatatcttttataactgtttctattgatcctatagatttatgagactcattagataattttctaatttcctttgcaacaacattaaaccctttcccatgttctcctgctcttgccgcctcaatagctgcatttaatcccagaagatttgtttgagacgatataccttttataaatccaactatctcatcagtattagctgccatttcattggcaacatttgttttaaccagtatttctgaattcatacttgctaattcctgaaaactagctgaaatatcatttattccagttgatatttgagaaaccgattgaattaaactttctgtaatatccattactgaatttttcttagttaagctctttcctattgcaattgaacctataataccagtatcatctttaattggaaccatatatgatttaaaagccacccctaagaactcttttggaatcatttcaatcactggttttcctttattcatagcatttttcacgaaatctccagcaacatctccttcttttattttaaaatctatttccttacttcctttgtaatataatactttttctctatccgttaacataatttctatgtcattatcaaagaaagtctctatatatttaatagaattataaatactattcaattcatcatttccaaaattaccttttaacattttttaactccacccttactacttataagctattactatattttcgattaaaatattaaatgctattataattatatttgatttcttgttaaagttaaatattaaatgcataacttgatcaaataagctaattgattttgcaatataaattaaatgactgacaaatataggatttatgtagtaatatattattagaggtgatgaacatgaaggttgcgatatttaatggaactgttgctacaacaaatggtgtttataagataagtgatatagatgtggaatctgcaaaaaagcttttatataaggacggattcatatctgcaataggacacgaatcaacagcagaggctatctctgatacacttaatatggatatcaaaatgaatcgtgtgaattttaaacaagaagttgggcaaaaagctatagtttttaaattaaatgtgaggcctccagagggatcagtcttgtcgagggatgaaatagaaaaaataggctattcatttaagttaatggagcgattagaatgaatagaaaattttcaacttagaattgtaattggtttattgtatctacagatactcttactctgaaaagataaatggtatcgccaaatattctaaaaagcaggtctttccaatttagcttgtcaaaataaaattgagtataatgaattggatgatacctgcttttcagtgccttcaattatattccagtagtcctatagaacattatacctatttgatatgaaacccacacatttcagtagataaacttaaatctacgttctgctatttatctatataacatacttaatttctttattttcaaataagtcctctatttcttttataaagaattgtttcatttcatctatattttcttttggatagacgtactttccatatccaaattgaccatatttgaatttacgctcttcatcactcattggtaattcactttctggaaaaacctgaagtattatattttttgctgttgatgtgtaacgatgcgatattatctcaaaggtcactggagtttttaaatcctttggcagatttttacttaaatttaacaataaatcatgatattcttctttccaatttggataaatgaacacaggtgcaactaaaaaaccaattggatatcctgctttagccgcctttatactagcttctatccttaagtcacgagaagctgttgcatgctcatacttattaataactgatgatgtattaatgctaaatctcatttcagtatgaccattatgttctaaatccaatagtgaatctatatcattatactttgtcacgaatctaaatctagcattttcatacttaccaaaaaatacgatagccttttcaagtgaatgagtataaggttccactggtattggatctgatgtagctgcaccttcaaatatggttatttcaggcaacctttcatctatatacttctgagcttgacttaaaatctcatcaatatttacatgtaccttcacaaaaggtttatctccgagttttgtatttaaataacaatattcacattgccccatacaccctgatattagtggtaattgataatgggccgaaggcttacaagattgaaatttcagactcttctttgttccaaccactaaagtcttctttccttccctatactgagcataaagatcttctccaggaatatgctgtttcaatttatttgaagtaatattgataatttcaacatcctctttatctttaaacttgtttaaaatatttttagctgcctcataatctaatgaatctttttcaaatataactcttttaggtataaacatattttttcaaaaaaccagcatatatacgctggttctttttctcctctctttatatttatattgtgtgtttgtttatataaagctagtatttgctaaaaattatattatatatacctaaatttacttttaattacttgatattttcttgagttttataattgtttattctatccttaagctcgtttacattgggtttcctatctattgatatttcttgcttattatccaatttataaataacaggaactggctccccttcttttaagaactctaattctgcataacgaataactgttgttacttcccctaaaaattcacttccattctgctctaaaacatcaagttccaatttaacttcttccaattttcttgaatacttcttccctgtttctgttacctttctaataagtcccacacttttaaccccattagttagagctttcttatattttacttcccgtgaaatcattgttacaattattatggctaaaggaataagtaatgccaatgttggaatcattaatggcaatccagcactaatccctctctcatttgttttagttaaaaaattctgcataataataaataagctaaacccagtagctgctataattaaaattgctgatagataatttttatcttgtttcatatttattctcccttttttatattttaatgtaaaattttaattctatagatagataatatataatttagacttctgttgaaacataccgaaattataaatatttttcttattttaagagttttaatttttttattcaaacaaagaaatttaattctgttcccattgagtattcctatctaaatacgacttcatagtgacattgttaacgttaaacattttgcttttattactcctttctacaaaaataatctgtagaatacctatttcaaattcattataacataaataataaacttaattaataaattaaatatgtaattatactgtatttttaccattggatacaattaatctaaaacttttgtatacattttcattttataaaatccttttacataataaacattatttgtaataaaagttctatacaaagaccaccgttctaaaataacttaggacagtggtctttaaaattatatataaactttacttaagaatattttatattaattaaaagtttagttactgctgaaatttaactgtatttaacatattttctttaatctatccttcattattttcatcactcttttctctttatatttaaagatagatatgaaattttaccccaattctatcaaactaatttcgggtacaagttagttgaattagcggtaaataaagataatcctaatcttaatattgatgaagaaagtatctccccaaaagaaagtgctgaagttctttggaacttagtaattaaggaagatagtaacggcatggagaaacttggttacagcaaagcttttggcgaaagaataattaagaatataaataaaaatgattttaaaacttttaagaaagaatctggacaatctggtatttcattatcagatgatcaacttcaaggaatgataactgctctaagaagtgctataagtaaaaactcagttaattttgaagaagtgtctaaaacagataattctgcacaagttaaagtatcatcaacatttatagatagagatcaaatctctaaagatgctgtaaatattactacatctcaggcactatcaaatggtattagagataaacaaaaacttacagaagcttacgttgcaaacctaatagattcaattaataagggccaaataagctcaacaacaactgaaaatacattcagcttcaccaaagtcggaaatatatggttgccatcagatacaactaattatactgaaagcatttctaaaatggttatgaaataattagaaatatcataaaaagtcttaacaaacttaagcgattcagaataggactttacctctattctgaatcgcttattttttttctgctataatctagctttaaaatcttcatatccaaattcttttattacttcaatacctttttcttcactatattttacaattgcaggaagattaacgccattaaatgtattattcttaaccattgaataaatagccatatcgcaaaatacaagtttatcacctggctttaaaggttctttaaatgaataatctcctataatatcacctgcaaggcaagtaggaccaccaaatctataagtaaattcgaattcatttggctttccagcacctattatattaggtctatatggcatcgcaagtacgtctggcatatgacattccgctgaagtatctagtatagctatatccattccatttttcatagtatctaatactgttgatacaaggaatcctgtatttaaagcaattgcttcacctggctcaagatatacctgtactccatatttgtcttttataaatttaattgatcttattagtgtttctatatcataatcttccctagtaatatgatgaccaccaccaaagttaatccacttcattttcttgatgtactttccgaatttttcatccaccacttttattgtacgttcaagggtatctgaattctgttcacacattgtatgaaaatgcaatccatctataccttcaagattttcttcttcaaagttagataaagtaactcccatccttgaattttcaaaacatggattatatatatctgtttctatctctgaatactcagggttaatacgaatagcacattcgattttctttcctttaaagtttttcactttatctttatattttctccattgactaaatgaattaaatactatatgatcgctatatttcattatctcatcaaattcatcttctctatatgcaggagaataaatatgtacttccttccccatctcttcatatccaagtctagcttcatgaagagaacttgaagtaactccttttagatactttccaatcagtgggaaagttgagtacatagagaacgctttagttgccagaataatattggcacctgtttccttttgaacataatctaaagtctccaaattcttcttaagaagtctctcatcaaccaaataacatggtgatggtaatttgcttaaatctatatctttcattaaatcaccaaaccttttttctaattacaagcttcaatcacagattccaatctcttttcacttgataattttgtctcttttccatcattttatacttttccccaatataacaaccctttaatggttcaaatttaattggtcaagcaaattagttaaacggataaaattacgaactaagtttatatattgaaatataaataatattagaactggtaggtactcttttgtgcagtgttgcatttagaatatagatgcatagatttcttcagtaaaagttgttcaaaaatgctagttcaaagtttatctttgaggctagcatttttgtgccacttttactgttagaaatcagcatctatattctatagcaaccgaaacaacagagtacctaccagttcggttagttgtcacatagttaagaagtctgaaatttattcaactaaagttggatcaaagctttccttccatggtaatccccatttatttaactcttccataaatggatctggatcaaattcttctacgttatatactcctggtttcttccataatcctcttaagattaagcttgcacctatcatagctggaactccagttgtataagaaattgcttgagatccaacttctttataacattcttcatgatcacaaacattgtaaacataatatgttttatcttttccatcttttttaccttggaatatacatcctatattagtctttccttttgttcttggacctaatgatgcaggatctggtaatactgctttaaggaattgtaatggtactatttgctttccttcaaattcaattggttcaattgatgtcataccaacattctcaagtacatttaaatgtgttatatacttttgtgagaacgtcatccagaatcttattctcttaattcctttaatatttatacctaaagattctaattcttcatgatgtaataaatacatatcttttggtccgatttctgggaaatcataaactctctttatttcaagaggttctgtttctatccatttcccttcttcccaatagcttcctggagctgtaatttcacgaatattgatttctgggttaaagttagttgcaaatggataaccatgatcaccagcattagcatctaatatatcaatataatttatttcatcaaaataatgcttttgagcataagcactaaatacaccagtaacccctggatcaaatccacttccaagtaatgcagttaaacctgccttttcaaatttttctttatatgcccattgccacttatattcaaattttgctgtatcaagtggttcatagttagctgtatctacataatgaacttttgtttctaaacaagcatccataattgttaagtcttgataaggaagtgcaagatttataacaacttctggtttaaatttattaataagtgctactaattctggtacattatcagcatcgacttttgctgtttgtatttttgtcttagtttttccttctaatgaagcttttattgcatcacactttgataaagttctactagcgatacaaatttcctcgaacacctctgaattttgacaacatttatgaatagcaacgctagcgacaccaccagcgccaataattaaagcttttcccattccaattcctccaatttctttataaaatgaaacttttcagatggagatttatgctccagctgaatttagaatattgacttattattttttgattatcttcaagtcatgaacaaagaatttaattgtactatctgataatttttctaatcagtaagtccatttaacatatccctaacgtaagttggaagtgcaaagcaccctacatgaagatctgtattataatattttgtttttatccctaacttattccaagcttctgcattaaaatcctttatagggtgatacttttttgaagcaaatccaaataaccaatgtcctgatggatatgttggaatatgtgcttgatagaccctaatgattggaaaaaatttcgttattttttcatgagcttctttcattgcagccgcatcattatcatagtatggactttcatgttgattaactaaaattccatcttctcttagtgctttatagcaatttccataaaactccttagtaaataatccttctcctggtccaaaaggatctgttgaatcaactattattaagtcatattcatcttctttatcacgtataaatttcaaaccatcttcatagaatacattaactcttttatcatcaagcttacatgatgttagcggaaaatactctctacaaatatcaacaactcttttatcaatttcaaccatatctatcttttcaactgtgctgtatcttgtaagttctcttattgttccaccgtcaccagcacctataactaaaacattcttaatatttggattagttgccattggtacatgaactatcatatcgtggtaaataaattcatctttttcagttaccatcattaatccatctaatgtaaaaaaccttccgaattccttagcttcaagtacatctattctttggaattcagttttttcagtatgtatttctttttcaactttaattgaaaatcttacattttctgtgtgttgttctgtataccataactccatttacttgtcctccacaacattaatattttcaattttagtatcttctgttccagttaaaaaacaacctttttcttttgcataatttatgtagtccaatatttcttttgttattttttctcctggagcaagaattggtattcctggtggataacacattacaaattcagcacatattttctcactgctttcatttagcggcactgaagttttttgagaataaaatgcttcctgaggagttaatacaacttcaggatctatatactcatgatcaaacataccaattttatcttttgaatgcaatctcttaatttcagataatgaagatattaatctttcaattgcaagactacgatctccaacagaaataatagctaaaatatttgcaatgtctcccaattcaatttgtataccatactcatctcttaatagatcatatacttctattccagcaagacctatttctctagtgaatacagataactttgttatatcaaaatcataaactgcatctccatcaattaactcttttgaaaaggcataataaccgcctattttatttatttcacctctagcatattcagagatttgctttactttatcaaaaatttcttttccatgtaatacaagatctcttcttgccaaatcaagtgatgacattaaaagatatgaaccacttgtagtctgagtcaaattaattatttgacgaacatatcctattgctaaatcacaatttaagagtagaaaagaactttgagttaaagatcctccagtcttatgcatactgactgctgccatatctgccccagcatcaactgctgataaaggcatattgtcaccaaaataaaaatgtgttccatgagcttcatctactaatacgtacattccattttcatgggcaagtttcgtaatttcttttaaatttgaacaaatcccataataagtaggattatttacaaatatcgcttttgcgtctgggttttctctaattgctttttttacatcttcaaccgacatcccaagtggtattccaagttgtttatttgttcctggatttatataaaccggaattgctccgctaattattaaagcatttatagcacttctatgcacattacgaggcattataatcttttcaccttttttacatacactcataaccatagcctgaactgcagaacttgttccattaaccattaaaaatgcgtgtttagaaccaaatgcatcagccgcaagctcctcagcttctcttataaccgataccgggtgaataagattatcgagtggtttcattgaatttacatctactgaaagacattgctctcccaagaattccctaagcatatcgtttcctcggccctgcttatgacctggtacatcaaacggaaccactctagctttcttatattctattaatgcttcatagattggtgctcttgagtgggattctttgtttttcatcgtatacatccctccccgttaatatatattagttccactaaaaatctcaatcatctctcttcttaagttgttttcaatttcaagtctttgctttggcttgatttcataaacatctctattaaaaaggtaattttgaagttcaatttctttaattagcattttagtgtgaaatatatttgattgatatacatttatatccattgcatcatatctcttcaaggtattttcatcaatataatcttgtattgatgttattttatgatctataaataattttttgccatcaacatctcgggtaaaacctctgacacgataatctatcgttatgatgtctgaatcaaaacttcctataagatagtttagtgcatttagcggagatacttctccacaagtggctacatcaatatcaacacgaaaagtagcaattgaattatctggatgatattctggataagtatgcacagtaacatgacttttatctaaatgtcctacaacagtgtctctagttttcaaaatgtcaatttcacctttattacaagatgcatctatctctttgactgctagggtctgttccgatactagaatagttacacttgctccctgaggatcataatcttgttttgaaatattaagtacatgtgctccaatactttccgttacatcacacagaattctagtaagtctttctgaattgtattgctcatcaatataagcaatatagtccttttgctctcgctcactttttgcatagcatacatcatagatgttaaagctaagtgtttttgtgaggttgttaaagccgtataacttcagcttgttttccaaccctaacatcacaacctttctggcataaattatagttgcattagaatttgtttcaaaaattcaatcactaaaatcctatatattctaatgtttataaccttcaaatactcaccttctagtttaccttgaaacatctttattatacaacattgacattttactatattatctttaaaattgctactatttatgacaatatttctttaatatacttgataaatttgtttgaagtcccttatgctttattttggttgcaaatccttcttatttctcacatatataaataaagtaataattaactattttttcttaaagctctttcttttacatattgattatattcttctattgaataaacttctggttctcttacttcttccaagaaatgtgaagcctctgcatctgcattactaaatgccagaactgacttatgcatttctattgccttattgtagtctctatattcatcctttggaacataagcacccatatgccatcttatcattaaacattcttctaatgataacttgacaaactgttgaagtaaaattacacttttctctccatgtcctaaaggaattttatcgtcaaattcataggctgcatatcctatccactttcctgtcatctcatctttttttaatctcatagttttttcataaaaattacacttacacaaatcatgtagatatcctgttaaatacattgtatcatgactcaaacctaggttatattgtttatttttttgtattaataattcaacaacattatcagagtgaagtgctaatcctccatcaaagtttgaatgaaacttagtagatgctggggctataaaataatctgttctttctaaaagatattttattaattcatctatcccatctcttttaatcgagctcaatctttctaatatcttatctttcaattcttgcatttcttttgctgccttagcttttgtcatttcctttaagtcacttaaatcactcatgaatacatctccttacattaatcaacttataattattatttttttcctctaagcacatatctattcattattatgcttcttttactattttaacacttttaagaaaaaactcatatcattgaattcaatgatatgagttttctagttaaaaatattctttctttattttaatagtaacatattccatagagtttataagcaaattttattaaaaaagtattttattcttctactactggcaaggcgcttaaattgtttgactcatcatcatctcttaagctccttaaatattcctcaccttttcttgatgttgagacagatactccagatatagctccatctttggctagctccacgcctctttctttagttattctctctccatttgaaagttcatatcctgttatctcacccgaatgctttattatagcctttatagagcttttttccacatttgactgtgaatcttcgttatcacttaactttatgtcagtatttgctacagcagcattatgaataaagtcatatgttaatcccattgaagatacattatatttatcctccatacaaacacctcctattttctagataagcatatgtgtatatttctaatctctgttttttaattttttaaaatacacttgctgaataattaaaatatagcaagtcagtattttagtatattttcttttatatgcctattctaaaaccctttagtgttatattgtccaataaaaatactttaatgcattctattatttactatttaaatattgatatcaaatttttgtaattcaccttccagtttccttggctcttttaatactattccttttagcccaagcttaatagcagcttcgatattttgctccatatcatctataaatagcgtttcacctggttctaaattatatctatatagtatcttctcataaatttctttttcaggtttaagtaatttctctttataagaaaccactcctccttcaaataatttaaataagtcatacttattatttatatattcaaaagctgctagatgaaaattagatagataataaattttataacctttttgctttaatttttttaatatatcaacgctactttctattggagtcaatatatcgtaccaattttcaaagactttattaattaactcttcactttcagtgtttctgttaattatatttcttttagcatcttcttcacaaattgttcctctatcaagcattggccattcatcactctgaaatatacatttatatatttcttctactttttcttcatcaatttttgatcttacatatatcttcggttgaaaatctaaaataacatttccaagatcaaatattacatttttaatcataaaaattctcctaattttaataatgtattttattaactatagataagcaatatataacctagacttatgcgtatacctcatcgaaatgaataatatacttttgttccattttagcttgtcaaactgaaagttggagcatgctaaaggccaatatcttctgctacatttctcattcctaaaattgtattttctataaccttgtctaattccatatatatcatcttgcaaccatttaatattacatttctgtctacacctgccgcaaatcctttagtcttaaattttttcttaacagatttaacttctaggtccattacgcttttagatggtctcattaatgcagctgcccctataagtcctgtaagttcatctattgtataaagtaccttctcagcattgctttcaggttttattccatttactattccatatccatgagatgcaaccgctcttatataactctctggaaatccttcttctttcattatttcttgagatttagcacaatgctcatctggatacatttcataatctatatcatgaagtaatccaattatgccccatatatcctcatcttcattatagagtttagcaaagtgtctcattgccccctctactgctagtccatgttttctgagtgcatcacttttgttatacttacaaagtgcgtcccatgccttttgtctatcaattttttcttccatattatatggcccccttaacatatgtatataaaattatttttattaacatttatttctatatatgaaattatatccatgttaataaaaataatatcactataaaaatttataatcaatattattaggatttaagttataaaattatatatattatacttaaatttctaaattctaaccccaatataagaatccttcttactagcattttctagcatttttaaatgtaaatttattattgaactttataatgcagactttttatttataagtctgcattttatggctaatatttctatattcatcctttagcttagtaattaccctttcttcatcatatttattgtacggccatattctagtttctactttacatctaatccactcagcttttaaacatatttgcacaagctcatctatatctctatttaggctttcaatttcattttcataattacttactatataatcgcttttttcaactatattatttattaattgcaaatcatctctgtatacagatttaacttcatttttaagttctagtaaatttaataaatgtgtattatttttatgctcaacattcttataactatttgccataaccaaaaattcctttaatatttttttttcacttatcacatctatagcttcataaaatttcgttgttatatcttcatttctttctgcagatattattgtatttttacaataatatattaataaataactattaagcgtagcttttaattcttctacttttgatattagctcaatatctagttttcctgtaaaattcaaatgcattttaatcaacgatactattttatctaactctcttctatattcaaccttattacttccatctttagttctgatatataagttagttatattgcttagctctttcaagcttgcaatatgcgctcttaatgtagttatccatatgactctaaatcttgtaatattatttatgtaaagagttttcttattttgaaataaattaagtactcctgttaaaagagttatcaatattccagtaaatgtaattatatctattattgctatctctagttctcctattctcataaaattctcctaagttccttagcttatattctctagttgtctttattatttcatcaacaaacataaaaaagaactaagattacaattctcagccctcgttcttgtgtttattttattcattttttcctcttttattctgtattctaaacataaaatattttctttcattaatatatatatttcaaaaataattcttcataataattctaaaaatattgcaataattttagttgcaattgtgaattgcgaaatgtgcattgtgaattgcaacatatatattttattatagattaaattttagtatccttttatatgcctctgtaataaactataataaagcaattaacaaaaaggtggtaaaatgaatcctttattaagtatgatactcagttccctttttaatggaatgggtggcggatttagaaatcccatgatgcctaaccaaaatggtggcagtggtccaaatcaaatgggtggtaatcctttattgaacatgcttatgggcggcatgggtggcggcatgaaccctatgaatggaaatccattaatgaacatgttgatgggaaatatgggcggatctaacggttctccatttaataatccaaataacaaccctaacatgaataatgcaaataatatgaatagcaatggtccaaatatgaataatatgggaaatatgaacgatattaattccctattaagtatgctaatgggaaatcaaggcaatatgcctatgaataatatgaataacatgatgaataatatgaacaataattcaaatagacattcccattcaaaaaaatagtggacattctaataggtagcttaaaatttaggctacctattaaattttataacagtaagccttttctataaaaatattctatatttatatattttcaaataatcacttcagaaaataattattatttgtaatctttctcatgaaagataaaacttctaattcttgtcctgttaagccttcatctatagagcatatctacagattttgtatatatctaaaaaattctaatttttcttaattacctctttacttttttatagtaatcgcttactattaaattaaaagggaggtattaaatatggagaatattaatgtattaaaaagtgatttcacaaaattatttgcaaaagatgctgaaagtgttttcttttcacctggaagagttaatttaattggagaacatactgattacaatggaggtaatgtctttccttgcgctcttactattggaacttatgctttagttagacaaagagaagataaaaatgtattagttaactctttaaactttaaagaattaggaattttagaatttagtttagagaatatgatatatgaaaaacaacacgattgggccaattatcctaaaggtgtaattaaaacttttgaaaatcatggttataatattcctaacggatttgaaatacttttctatggaaatattccaaatggttctggattgtcatcttcagcttcaatagaagttttgatgggaactatattaaatgatttgttcaatttaaatatcgacatggttgatatagtaaaactgtgtcaagaagctgaaaataaatttatcggtgtaaattgtggaataatggatcaatttgctattggtatgggaaaagaaaattgtgcgattcttttagattgtaataccttgaaatattcatacagcactattgctatggatggctacaagatagtaattgccaatacaaataaaaagcgtggtctagctgactctaagtacaatgaaagacgaagtgaatgtgaaactgccttagctgaaatacaaaaagttaagaatattaatgctttaggtgagcttacagaagaagaatttgaagaagttaaatcttgtatttcagatcctattaaagcaaaaagagcaaaacatgcagtatatgaaaatagaagaacattaaaggctgtaaaagctctagaagaaaatgatttaactctattcggaaaacttatgaatgattctcacatttctctaagagatgattatgaagttactggaatagaattagatactttagtttctcttgcttggaaaagtgaaggtgtaattggagctcgtatgacaggcgctggttttggaggctgcacagttaatattgttaaagaagactgcatagattcatttgtagaaaaagttaaagctgaatatacaagcaaaattggctatgaacctagcttctatgtagttagcatttcagatggaacaagaaaaattggataaaagatttactacttaagattttattaagttgattataagagagatttagtttaaatttaaagtgtaagtctttaaaccaaatcaataaaaataagggagatgttaatatgtcaatattagtttgtggtggtgctggatatatcggctctcatacagttcatgaacttgtaaagcaaaataaagacgtaataatagttgataatttacaatcaggtcatatgaaagctgtgaatccaaaagcaaaattttataaaggtgatataagagattctgaatttttagataaagttttttctgaaaataaaattgatgctattatacattttgctgctaattctttagttggcgaaagtatggtaaaacctctactatatttcaataataatgtatatggtatgcaaatattacttgaaagcatggtaaaacatgatattaagaatatagttttttcttcaactgcagcagtatatggagaaccaaagaaaattcctatctctgaagatgatgaaacaaatccaactaatacctatggtgaaacaaagctgactatggaaaaaatgatgaaatgggttagcaaagctaacggaataaattacgtttctttaagatactttaatgcagctggtgcactagaagatggaagcatcggtgaggatcactctcctgaaagtcacttaatacctctaatacttcaagttccacttggaaaaagagaagctataactgtttttggagaagattatgatactcctgatggtacttgtataagagattatattcatgtactagacttagcagacgcacatataaaagctgttgagtatctacaaagcggaaatgaaagtaacatcttcaatctaggtaatggaattggctttagcgttaaagaaatgattgattcagctaaagaagcaactagtgaagaaattaaagttgttgtgggcgaaaggcgtgctggtgatcctgcaagattaatagcttctaatgaaaaagctcaaaagattctaggctggactcctaaatatactgatgtaaaagctataatcaaaacagcttggacatggcacaagaataatcctaacggatatgatgataaataataaaatcatatagaattttaaaatttatcttgggaaactagatccaaaccaaaaacttatatggttcaagtttccgccacctaggcatagaaaaagataagtctatgaaataagctaacatggacttattttttagatatgtcttagattaatatcttttgttaaaattgaggaggttttagcatgataaatataaatcatgaaataagtagacttataaactttgcattgaaaaaaaatcttataaataatgatgatataatttactctaccaatatgattcttggagtattaaacttaaatgaatttgaagtttgtgaagttgatgaaactttagaaactccaactcctatcttagaaaatatcttagactacgcatgtgataataatttaatagaaaatacagtaactgaaagagacttatttgatactttaattatgaactgcgtaatgccaagaccttctgaggttataaataactttaataatttatatactatctctccaactaaagctactgagtattattatgatttaagcatttcttctaactatattcgaaaagatagaattgacaagaacataatatggaaagcaccaacggaatatggggacttagatataacaattaatttatcaaaaccagaaaaagatcctagagatatagcaaaagctaaattaattaaatctagttcatatcctaaatgtttattatgtaaagaaaatgaaggattttatggtcatataaatcatcctgccagacagactcatagaattatacctttaaattttgataaacaaaaatatttcttgcagtattccccttatacttattataatgagcattgtataattctaaatagcgaacatatacctatgaaaattaataaggatacttttagtaatttattgatttttactgatatactacctcattactttgctggatctaacgctgacttgcctatagttggaggatcaatactatctcatgatcattatcaaggtggtcactacacatttgctatggaaaaagctccagtagaaaaaaactactccgttaaaaatcatgaagatgttgaaataggtagagtcaaatggcctatgtctgttgttaggctttcaagtaatgataaagataaattattagatttagctgaccatattttaacttcatggagaagctactcagatgaatctgtaaacatattaagtcatacaatggatgaaccgcataatactattactcctattgcaagaaaaaggaataataaatatgagctagatttagtcttaaggaataatagaacaagtactgagcaccctcttggtattttccatcctcatagtgaagttcatcatattaaaaaagaaaatataggacttatagaagtcatgggacttgcagttcttccttcaagattaaaagaagaattaaatgttttaaaggaatacttaattaatagaaaagacaacattttagatgatgaaatggtggcaaaacattctgattggtataaatatcttctaaaaaaatactctaatatatctcaagaaaacgttgattctattctaaaaaaagaagttggatttaaattcttagaagtattatgtcactctggagtatttaaaagaaatgaaaaaggatttgctgcctttgataaatttataaatatattataaggtggaataattatgaaattaactatagtagatgtagctaaaaaagctaatgtatctgttgcgactgtttcaagagtaatgaatggaaattatccagtgaaagaagaaacaagaaaaagagtacttgaagtaatagaagaacttaaatatattcctaatatgcaagcacgtgagcttactaaacagaagtcagctactataggtgttgttgttcctagtatcaataatatgtttttcccggaagttataaacgggattgaaagcagcttaaaagcaaataatttgtctttagtgctagcatgtagtaataatgttagtgaagaagaaaaattatgcgttaacaatttattatctaggaatgtatctggcataatagttattgatccaaatacagaaaatattaaatctaaattttttcataatatttcaaagcaaactcccattgtttttgttaatggacattccgtgtccaccaatatttcatctgttgtaaatgatgaagctatgggcgcaagtatggctttaaactatttattagaaaaaaatcacaaagacatactatttgttagaggaaaagatagttattcttatgacgtaaaggaaaaagtttatacggaaataatggatgatttaaataattttaatccacaaaatattattaacataggaaatggaaatagtagtgaaactgttgataacactgttaatatattcctaagtgtccttaaagcatctactgcaactgcagttcttgcctgcaatgaccttatggctgttggtgtacttaacgcttgcaaaaaactaaatatagatgtgccaaataaattatctattataggattcgataatatagatttgggtaaatttgtagaacctaagttaactactatagatcaaaacatgtttcttcttggctcaaatgcagcaacactgctattagaaaaaatagagtgtgataattcttgcagcaagagaattattcttatgaatactttaattgagcgtgatactgtaaccgctatttgatatatttattaaaataaataagtttataactgaattctatttacacagaagttactcttacatacggaatttaacttttcattttagtttttttatcaaaactttaaaatgaattcattgccgcagaacatatattcgtatataatatttttaacgaatatatgttctttttctatttgtatatgttctaaataatatgattcaatcattatagaattatctgattttctattatcttatattttaaaataaacttcgatgaattaaattttttagagcgtgtatattttatgataattaatttaactttaaaattctattccctacgtgcttagttaatgcaaaaatacaaaaactaaattccaatacaccattcaagttttgtcagagcatatattttaattttaaagtttcattttataaggaagtgtaatcaaaatggatttaatggaaaaattaaaaatattatctaatgccgcaaaatatgatgtctcttgttcctcttctggctcaaagagacagaatgctaaaaatggaataggcaatgcttcagaagctggtatttgtcacagctttactccggatggacgttgcatttctctccttaaaatattattttcaaatgattgtatttttgattgtaaatattgcattaatggatcatctagagattttttaagagtaagctttactcctgatgaaatatgcaatcttgctattaatttttacaggcgtaattatatagagggcctctttttaagttccgctgttatttataatcctaattatactatggaacttctacttaaaactgtgaaaaaactgcgtatagaaaataagttcaatggttatattcatctaaaagctatacctggggctgataatgctttaattgaggaagctggaaagtttgtagatagaatgagtgttaatatagaacttccttctagcaatagtcttaaacttttagcacctcaaaagagtaaagaaaaaattttacaacctatgaaaactataaaaaattcaatacttaattatagtgaaatgaaaaaaagcataaaaagtacaccattgtttgtaccaggtggtcaaagtactcaattaatcgttggtgcaactcctgaaagtgatggaaaaatcctaaaactctctgaagctctttacaataaatatagcctaaagagagtgtactactctgcttatgtccctgtaattaaggacaataacctgcttcctgacattacgcatccaccaatgcttagagaacatagactttatcaagctgactggcttcttaggtattatggatttaaagctaatgaactcttgaaaaatgatgatgataactttgatttaaattttgacccaaaaacacattgggcattatccaatttaaatgaatttcctgttgaaattaacaaagtttcttatgaaaaattattacgaatacctggtataggagttacttctgctaagaaaattttaaaaataagaagagttcataatctgacctttgatgacttgagaaatctaagggttgtacttaaaagagctaaatattttattacctgtaacggaaaatatcatggagatgttctttttgatactattaaaataaaaaataaacttctagaacacgatatttctaaaagtggcagcgtaaatcctaatcaaatatcattttttgataatatttcatttaatgatgtaaagcttccttctggaattatattacctaaggataatatttctttatcacatatatcacctataaaaattgaaaattctttaaatagtataattcctaaatcaaatatattaacattaggtgataaaattacttctttaactggagaattttgattatgaaaatatatttatatgatgatacctttgaaggcctattaacttccatatatgatgctttttactcaaacggatcacctccaacatctatatatggaaaaagccaaacaaacactccccttttactagggaatatagttgaaatttctactgatattaataagtttaaaaaagtaaaaagtgccattataaataaaattaacttcctctcattaaaaaaaatatactttgcatttttaagtaattatgaggacaaaggaataataatatttaattatttaaaggtagcctttaaactcggaccagatgttcatgattttttaaatatagatgtaataagacttatagataatattacaaaaaaagttttaaatgaatgccatagatttgaaggatttattagatttaatcaaatagaagagaaacttttatactcttctattgaaccagataatgatattttagagcttattggagatcattttaaaaatagatttcctagggaatattttattatacacgatatttctagacaaaaagctttaatatataatacaaatttttacgaaataatagatatggatatggaaacttatgaaaaactaaaatttcacaacgacgaatatacagacctttggaaaacatattttaaagctactactatacaagagcgaaaaaatctcaaacttcaatgtagaatgatgcctaaaagatattggaagcatatactagaaaccaaaatataatttaccatgttcataaaagtacgtattgacaaacgagctaaatataaaaatacttgcaagtattgaggacaatttaattttactgcccaaaagacgaaatggaatacatgtgtttgctccggttccttgaagattttactggataattctacaattataagttgcatccaaagtgcttgcttcaaagacaatgctttgaacaagcacatttggaacaacttataatctagaattacagccagcaaaatcttcttatgaacactgtgcaaaaacatatattccatttctaatttagcagtaaattaaagtaaatctatactcatgcaaatatttttatatttctattgttagcaaattaggcatatgaaagaacatactcaaaatacactgatattacgtgtcagacttggaattatatcgcctcatatagatccacaaattttactcatacataacgtttaatgtttaagtctaaaattatcgagtatttattaacactatagatttgataactcataaaaataggttgctaaatcgcaatccaccatatttattcctaagtattcgcgcctagatatagaacctaaattaaagcatatactttcaattacaatacacacgagaaaggaaggtctgcttttttggaagtgttgcattgagtatttaactgtagatatttccttagcagaagttgtttcatttattgcttgtcacgatcttgcctcgggatcatgcagaaatgatgcaacttcttctattggaaattcgcagttaaatactctagcaacctggaataaatgcatgaccttcctttcggtgtttacatatataactttaagtttactctagatatctagtgccccgcaatacctttagtttgcgtctttaatatctccatttattatgatttctaattctccagtttcaggactcataatgagaccatgtacccttacgtcgttaggtaaaagaggatgatcttttatcattttaacactttcttttattgattcctcaacagattcaaaaccatgaagccatctctcaacgttaactcctgcgttatttaaagtagagagcgtttcttccttaattcctctatctaacattttatcaacaagtttttttgtgtttaaattactcatcccacaaccatgatgtcctattacaaaaacatcttctgctccaaattcatatactgcaactaatatacttctcattacgccaccaaatgggtgcataactgttgctcctgcatcttttattatttttgcatccccatttttgatattcatggctttaggcaacaattctgttaatcttgtatccatacatgataatatcgccatctttttcttaggtatcttagttgttacatattcctgataatctttgttccccacaaaactttcattatactttattatttcttctaatttactcattttagccccactcctcgtaaattttaataatataatacgtttttttattaacttaatattaagttaagttggtttgattgtaaagttattttatatatcttttaattcttacttactcatgtattcatgataaggcaatcgaattgaaactcctgtttgatcaaatttatattctgtatcataaagcgggtttttattagaaacaagattaattccaacactgtaaagtgctttagctaattcataaggatcctgtagaacagacccagtcattattccttgtttaattaattcctgtgcctctggtattgcatcaactcctacaactgctatattaggagtcttgccacccttattatagccatattcttgcaatgctttaatcgcacctatagccatggaatcattattcgcaattatagcctcaattttatttccatactgcaaaaacaatgttttagtaacattcctagcttcttcttcattccaatcacaaacccttaatgcaacttcttgagtctttatccctgaattattaatttttaatatagagtattttgttcttttaattgcctctaaattattttgttcccccattaacatgacatattgaagtatatcatctttatttttatccattgcggttttatttttattccatgcatttataataacttttccttgtaataatccggcttcctcagcctctgttcctatatagcaagctttattataagatcttacagaatctatcgcaactggttccctattaaatagaattactggaatattaattccttttactttattaataaccgactgcgtactcgttgtcttgactagatttaccaacaaaagatcaacatcttgcttttcaattaaattatcaatatctttatcctgtatagattgatcatcttttccatcatagaaaataaattcaatgtttccttcgttctctttttgtattttttctaaattttcacgaactaaagaaatataagcatcatcaaatctatataatagtacagctgctttaattggtctcccttcaaccattctagaacttgccataatattactttgattaatacttattagcatagccactgcaatcatgataataagtatggtaattatttttttagacatcttatgttaatcctccatattttttattataagttatttaatcagcttaattagatattatcattacttatatatcctttgtaaggaatacgtactgaaactcctgtatcatcaaacttatacgaagttccatcaagtggaggtctaccattaaccaaattcattcctataagataagtcgcttctgccatgctagctgcatcttgaggaacagatccagtcataattccttgattaatgagctgtatcgctttcggtatcccatctataccaacaattggtattgtcctatttttatctccactattatatccatacttttgcaatgcctcaattgcacctattgccatagcatcattattagaaattataacttcaattttatttgcattcgataagaataatgcctcaatagcatctttagctaaattttcttcccaattacaaactctcaaagcaatttcttccgtcttaattcctgcatcattgattgataaaacagaatattttgttcttccaattgcctctaagttgtcgcgtggtcccattagcataacatattgcattatattatctccatttttatcaataatttttttatctttattccataagttggcgagaatctctccttgcagtattcctgcttctgctggatttgttccaacaaaataagctttgccataggattttacgggttccatatttagtggttctatattgaataaacctaacggtacatttttttctttaactctatctacaattgtccctactcctgttggatctactagattcagtaatataatatctgcatttcctgcattaagtattgaattaacatttctgttttgtagtgattgatcattcttacagtcataaaaagtaaattcaatattacccggattatttttctgaatttcttcaaagctttgcctaagtaatgcggtgtatggatcctctaaagtacgtaataatatgcttgctcttactggccttccttcagtagctgttaacctagaattagcaattactttactagaatttagcgataaatttattatcataattataatagtgcacaataacaatatctttttagaatttctcatttttatcctccgttgatttatcaaatagctccctactcttcctagcctctcgatacttaatgttcctacgaaaataaaactattttcatagtgctttttgaagactttgccttcgttgtcagtttctatacataaaaagcacattaaatttcatctttatttcttaaatcatttattttattatgtgtgtaataaagaactttatactggtataaggcatattgaatataagctaactataaatatagattctgctgataaaaatttataaaaatagaagtatgctatacaaaaaaggaagtaaatcgaaaaagacttacttcttttttataataaatatacttctacattatctatacataatatataattttatttgctttctatatataaatcaacattatcactagtaacctcagcatgaggagtcctgatatactttcctttctcaagtccctctatggaatttacatttccatgagaagctaatgtatatgcaagattaaagatcgcatttgcctgttttttcgaatcgtttaaaatagttcctatcatagatccatttttaactgcctctaacgctttaggaagcccatcaattcctacaactagtggttttttaccgcttatattagcatcatttattgcatttattgctccaagtgccatttcatcattattgctaaatacaacttcaattttatctccaaaacttttaatccattgtgacatctttgttgttgcctgagcactttgccagtttgccgtatcatcagctaatttctctaattcaattccattttgagttatagttttaatgcaatattccgttctaattaaagaatcttgatgtccttgttctccttcaagcattacgtattggattttgccatctccatttttatctaccattctattgtcttttttataagcatttataattatatttgcttgcatctcacctgattgctgagcatctgctccaacgtaatagagcttattccatctttccatatcttcctctactggttcacgattaaagaaaacaattggaatattagctgattttgctttatcaataatcatagatgctgctgtacgatcaaccatatttacacatataacatcgtaattctgcgcaacaaatttatctacttgattgctttggttaattaaattccctttagcatctgcaacattcacaatgatcttatatttaccttgattctccttctcttttgctatatcctcaatattctttgaaatttctgatatgaatgcatcatcttgtttatataaggttacacctatttttatttccttaatatcattactataatttgctgatttcacatttgcactacaagatgacaatacattaaaaattgagactactgttaaaagccctgataatttcttaattaatctcactacaatccctccaccatatgattccatcaagcaccacaatacatttatacaaaagttcatccttgcatttatggtgcttatctaacaaatgggaataataatctttgattttcttccgaatacatattttttgtatttataactgttgaagagataatgttattgggcatatcttttttattaatcttatatactgctgattttatgcttagatatcctacattaaattcattttgaatagctgttgcactaataaccttatcttctaaaaaagaaagaattttgcttgtacttcctgtcccatatatctctattgatgcttttcccttatcaatacccattacatcctttttagcttgagaaacattttctaataatcctgcatcgaatgtaaccacaacatcaatattattgttctctaacaaacttttagcttgattataataagtagtctgcttatcttctgaaaaatcccaaaatgtacatttgttatctgttctattcataacactcataaatccattatatcgttcctttacactgctgcactctaagttgtttttgattattaaaatgttcttgttcatatctccgttctttattaattcttcccccaagctagatccaagcttatagttatcacaagaaatactaggctgagcatgttctgattttatagtagaatcaaataatataattggtatcttttttctagcactttctattggttctgacattttctcgtaatctgcaggagatataattattgcatctgccttattttttatctcccgctctataagttctttctgttcgtcaatactattatcttccgacaaagtgacaaaacttacattgacattcatttctgaagctgcctgttctatcccctgtctcattatcattaagctttcactgtttcttcctctagttataattgatatgttgtatatctttatatctttttcatgccacaatgtattatttaagaaaagtaagaaagatactattaatagcaaaaacaaagtaataaaaatttgcttcctttttctcttcactatttttcttcctccctcttcctaatttcgtaaaagtctacacatggcatatgaatacgaactgttgtcccttcatctggttcactataaatttcaagaccataattctttccaaaatataattgtattctttcattaacattcttcaatccaataccagaactcttcctttcaaccttgctttcacctgttaaaagactatctgcaacgtcttgcagcattccaagtccgttatctacaacatcaatatataattcattatcttttgtatatgcctttactaaaatctcaccatctccccccataaattccataccatgataaattgcgttttcaattaacggttgaataattaatttaatacttccataattaagaactttctcatcaacctcaatattatatgtgaatttatttttataccgtatattttgtatagtcaaataattccgtgcatgctcaatttcatctctcactgttattatatttttacctttacttaaacttattctaaaaagttttgctaaagcagttaccataattattgccccatcataattttcattttctatcatccatataattgagtccaatgtgttatataaaaaatgagggttaatttgtgcttgaagagcattaagctcactttttctttttgattcttgttcaatcattatgttgtccataagtgtatgcatttggttgaccatagaacgaattgcttttcctaaatgctgaacttcatatgatccacttatcgaaatatctacatcttttactccattttccaatttcttcacgcacttttctaacaatcgtattgggttagctattcttgaagagacaaacatattaagaaatacaagtataaagatagcgaaagacataatgaacacagcaaatatactcatttgataataatctgaagtaatatctaacattggtgtaattccaacaattttccatccagtgtatccaacggttttaactgtaactaatcttttttctcctctgaaagtttctatatgatttccatcatcataagctgcttcaattttattattttcatctattaaatctgaataaatcaattgctgcctaggatgataaataatttcgccttctctatcaactaaataaacatatcctgactttcctatatttgcatttttacatatctgctctattccactaaaatttatatcaactaacaatactccagatgttgttttcttattattagtaagctcaatagccctacttaatgatacgacccaacgatatttataatctggatctacaaataaattttgaacatgaggtgttgaaaaatgtaaattttctttcttatctatcgctttagtaaaccaatcactcactcgtggatcgatagagctttttaattgttttacaggagatgccgctataacttcaccatcttgtgaaaaggcacatatgcttataagtgaatctttatttgtttcatacaataagtccatttctttatctatggtatctgtagccaaatctttcttcttaattacattgtaataagtagtatcagacactttcatcatatttctcagataagaatctaaatttaaatttacttgatctaacatagatttattatgctcagataccatttcttcagtggaagttataaaacggaaatataaagcccctccaacagtaaccattcctataactgctattacggtaaaagaaattgatattatatgttgtatacttccgctgttaacgtaatttattgtcttctgtatttttctcttaaacaaattaagcatagtaactcaactcaattctttctatactttgatggagatactccaaactgttttttaaaaacataactaaaataattagcttctggatatccaaccttttccgctatcatgtatgtcttatcatctgttgtattcaaaagtttaacagcttcttctaaacgtgttgctgtgagataatttacaaagcttgttcctgtttccttcttaaacattgtagaaaaatatgttggactaacatgcaatttagaacataatttttctactgaaacatcataatcactataattttcttttatatattgttttgctttttcaataagcatcatagatgaattgattcgctctcttttaatataactatttatcctaatagctttttctataatccattttttgacttcatgaatagaattaaaggattctaaataactgtatgcattaaaattttcaccaaaaatttcttctatatcaaatgcatatgtttggacaagttttaaaagtgacgtcataatttccataagataaattctatattgattaaaaggcaataataaatcttctgttttcttaaacaaactatcaattgcctctgaaatttcatcctctgaagaaatttttattgcatttagcattgctcgttcttctctctcatcaagttgtagctggattgaattatctggttccacgtcatcaatataaatagcttttccagctcctaatataaatctataatctaacgcattttgtgcagttctatacgaaaaacgtatttgcgaaggattactataaacataccctattcctgcagatattgttaaactcataattctcttataaaccttacaaacctcatttataccttttataaataataatatatcttcctttttttcaaagttacccataactattaccataccagaataaataaaactaataaatttacaatacttacccatattttcatctacaattttcttaatcgaaattggtgtaagtgctgattccttttgccccgaaaaactatttaagttttcttcaaaggatagtgttccatctgcctgaataatccctactgttaaatgcttatacttgaattctattcccagctcctccatttgttcatgccattgttcttcatttatcctgccttcaattgcaccaactaaaaattgttctctaattactggtagacttttaatataatgcttataaagtgtttctaaatttcgtttttcgttatattcacgatcgagctgttcttttaacctcactaaaacttctataagttctgcggagttaatcggtttcaaaacatattcaactacatttatctttattgctttatgagcatactcaaaatcatcacatcctgaaaatacaataatttttgtagatggcattaattctaccaacttctttcctagttccaacccatccataaatggcattttaatatcagtcattataacatctggctgtagtttttctgctttttctaaagcatcttgtccattctcagcatcaccaacaactataaatccattggcttcccaatcaatcttttttatgattccaagacgtatttcttcttcatcgtctacaatcataattctatataaattcatttaactacctccgatagatgaattatttaataaggcacatgaaaataaataacaattagaactgccatgaatattttttatcagccaaggagacaaattactctcatatcaggtctattagggccctttggcaataaagtatgattaaaaaatactgacagatagatttgttattttttgattatgcctaaatactattatacattatgtattaaattattactagcacgagtgctaactcttaccaatttgattattatttagaaaataaataaaatacaggcaaatctctagctaaaaaactaatgatttgcctgcattttatttatttaataattattttcttctgtattttgccatatctattgcaactgcaactgctattatgataccttttataacttgttgccacataggacttaccgctataaattgtaatccatattgtataacagtaaagattagaacaccacttactattccaccaactttaccaacaccaccatttaatgaaacaccacctacaacgcacgctgcgattgcatcaagctcataaccattaccatagttatttgttgcaccagctgttctagctgcttcaagtacaccaccaacaccatataaaagtgatgcgaatatgaatatacccataatagttgcaaatacatttactccagaaactactgctgcttcacggttaccaccaatagcatatacattcttaccgaatacagttttatttaaaataaaccaaactagaattataaatactacagcaattggaactagaattgatattcctgggaaacttccaatttgaaataattttgtttgtccaagatctataaagtcttgacgaataccaccaataggttgtgatttgtttggaggtaaatcaaagtatagagatgttacaccatatactataacttgagatgccaatgttgcaataaatggatgcatatcatattttgcaactaagaaaccattaagaactccaaatatagcacatccaactattgctaatagtattggaataataactgccaattgcggcatattagggaagaatctatttgcataatcagggttttgcaacattgaagttgatattacagctgcaagacctaccatacgtccagctgataaatctgtaccagcaattaataatgtaaaacatattcctaacgcaacaatcatttttgttgatgattgtgtcaaaatatctaagaatacagcatattgcataaaacgtggttgaattatcataattacaactactagtaataataatgctataataatcgcattatctgtaaagaaatgttttacagtctttgatgaaaaaataacatccatgtctgcattcttcttatccaaaaactgttttgcgccataaataagtaacgctataccaactccacctacataaattggtaaatcataaaatacacttggatctaaaataaaattaaaaacaattcctaaaaccaccaaaaaagcaccaatacccaaaaatatttttccaaagccttttcgtgaaactatcttctctccactcatattacatacctcactttctttctctcctaccaaaatcatttgttataaaaattcatttatccaatacctagcatccgtaacattttcacctctttataagtaagataaaataacggctgcacactcatggacattgtgccacttaagggcataagttcaactaaaattcagctatggattaaccctacccgaatcaagtctcacttgacaaaggagatatttcttattgcataaattttgtagcaagattcataacttttactgaatctgcttcactttgatctaaaattccagtaaccttaccttcacacataaccataactctatctgacataccaagcaattccggcatttcagaagaaatcataataattgacttgcctttcttaaccaattcatgcatgatcgtatagatttcatacttagctccaacatcaatacctcttgtaggctcatccaatataagaatatctggatttgtaagaagccaacgtgcaattaaaactttttgttgatttccccctgaaagattttgaatcaattgttccatacttggtgttttagttctaagttcttgatttgactgctttgcagctttatatcttcttgcttcttgcaagactcctgctttagcatattctttctgacttgcaattacagtattatctagcactgaaagaataccaaatattccagtagcacgtctttcttctgttaatagtgcaaaaccatgctcttttgcatctttagggatttttatttttataatcttcccatccttttctacagtaccagagactatttcacgaagtccaaataaagcttcgactaattctgtacgttgtgccccaacaagaccacctattcccagtatttcacccttatgcaaatcaaagcttacattttggaatgattttttaattggagaacaaagattttctacccttaatacaacatctttacttggtgtatattctcttggtggaaatctattagtcatatcacgaccaaccatacgatttataattaagtctgttgtaaggtctttagcatcccaagttcctacatactgaccatctctcataattgttacttcatctgatatcttaagaatttcctccattttatgggatatgtatataattgcacagcccttattttgaagttgttttattatcttaaataaatgcttagtttcattttctgttaatgatgaagtcggttcatccataataataattttagaattatagctaacagcctttgctatttcaactaattgaagattagatggtgaaagtgttcccgctaatgcttcaggatttatatctaactcaatttcttcaaataattcctttgtttttttaatcatagttttcttatcaacagcaattcctttcattggaaatctgccaagccaaatgttttccataactggacggaaacgaattgggtgcaattcttgatgtatcattgatacacctaaatccaatgcttgttttgaagtatttatctccattttctttccatctaatatgatctctccaccatcttcatgataaataccaaatagacatttcattagggttgatttcccagcaccattttctcccattaatgcatggacacttcccttgcgaaccttcaatgttacaccatctaatgcttttactcctggaaatacctttgttatgttattcatctccagtacatattcacccatacaagcatcctccttttttaaataataattcagggatggggatttttttataatctcgcatccctgacaatttctatgtcagatatatcttattttaaataatccttgtagttatcttgagtaacttttacgtagtcaatccatacatattttccatcagttacatcaaatccaatattttctttattaatttctttaccttgagcagctgctaaagctatattaactgtagccttaccttggttttctgcatcatttagaactgttccaagaagtgatccttctttcatagcttgtaatgctggtgctgttgcatcaactccaactaccggaatatatttagatgcatcacctttgttatatccttcagcttttaatgcttctactgcaccaagagccatatcatcattgttacaaagaactgcttctatcttatcaacaccttgacctgtcataaatgctttcataaggtcagtagcttttgccttgtcccacatagctgtatcagcagcaagtttttgagtttttaatcctgcagcttcgatagcttttatagaatattctgtacgaagagtagcatcttgatgccctggttctccttgaagcattacgtattgtacaactccatcatgatttttgtctgcttctggatgtgccttgaaatagtcagctataagttgacctgataaagttcctgactgttctgcatgtgcgcctacataccaaaccttatcatagctatccatatctgctttttctggttcacggtttaaaaatacgattggaagtttcttagcttttgctttttcaatgataggacctgctgcagttctatcaactgggtttattgctaaagcgtttacaccctttgtaataaatgtatcaacttgctcattttgagtaggttgtttattttgtgaatccactagttcaatagttgatcctttttccttagcttcaccttccatagcagtacgaactcctgtcatgaaagtatcatcaaatttatatattgcagaaccaattaaagtatttgaagatttagtacttgtttgtgcatcccctccagaacttgcactcttatttgctccacatcctgccattgttgcaaccatagctgctgacattacaattgttaatagactcttaaaccttttcatttttacccctccatattcttatctaaatcctaaaacaaagactcaaatttgttcttcgtttacattactaattatagggattttatcatttagtctccatacgaaattcttcacttttttatcgaatttcttagatgttatagataaactaactataatctatacttatgcgtatacctcaccgaaatgaataatatacttttgttccagtttctaggtaattctgatgggtgattctaaggctataaagttgcacccaaagtgctagcctcaaagaacaagctttgaactagcccatttggaacaacttatagccaaagaatcacatccatcaaaattaccaacgaaacattccacaaaagtatattacccatttctagttttgatatatttcataacataactctaacttataatcggtttatctataattaaagatttataatattagtgctatttaaagaattagcactcctccttttcttcatctaaaactctagtatgacacatgttcaatcaatatataaaatatagaaatttgattgcactataggaattaaaaatacaaattaattttattctcataaaaatataaaaagagggtataaattcaaaacttatatcctccataaattatatgtataattatatttctctcaatgaaatttctataagaataaaatcattatttcttgcatcttgatatctaaattttaaacttttgtaccatttcattgagtctctgtgcgagctctgcctgactatgtgctgttagcgcaacttgctctatagctttagttgtctcatccatactttctttgattgtagctacttcttcactagacttttgagtagtttgtgccatatcttgtacaacttcactaacctggcctacagtagctgttatctcttctgacatagctgcaatttcctctgacatcatgctgacgaaatttgaatcattgtaatattgatcaccggtttccatataagcattaaattgtctatgtacttcagtattaataaataaaagtatgtcattgccagtatcaatactatttttaaaagcatcacgaactctagttattgtttcctgtatagatgttacagcttgtgatgactgttccgcaagtgttcttacttcttcggcaacaactgcaaaacctttaccttgttctcctgctcttgcagcctctatagctgcatttaaagctaataaatttgtttgttcagctatacttcctattgtatctgccataacttttatattatctactactttaccatcttcaataacttctaacattttgttctctttttctgcatatagatttcttgtttcttctatagcttttttcccgctattctttacctctgttgctttttctttggatttacttgaactactacttccctccattgcctttcctgaaagctcattaacgcttgaatccacttcttctactgatgcgcttatttcctcggctgccgcactagattcttgcataccatcagaaatgtttgatatagcatcatcaatacttctagctctcaaagataattcttcagctgtagcagatagttcctcactcgacgcacttatatcttgagaattttccatgatctctttaaccaagatatttacatttttttgtgccttatttaaagcgatacctgtttgtccaaattcatcttttctagtaatagtaattggagttgaaaaatcatacattgctaatctctctgcataatctcttatcttcctcaaaggtttatttatatggcttgaaataaatattccaagtaaaatggcaattataaaccccgcaatgctcatcaatgtcataattatgtttgtccgtgcagatgctatattaatattatcacttgctacttttgctgctgccaaatttatttctataaccttatcaaggcttgccatcatttcctgttctataggcaaaaaaatcctgtactgtttcgttacttcatttggatcatttagatcagctgcatctattatcttgtttctagcatctctatattttgttacattatcggtaaactttgtccaattttctttttcctctgctgtcataattaatttctcatatttagctatatattcattatctgcagctaccatgtcagtaatatattttttcgcttgatccgtttcttttttattttggtcatacattataactgaaacttcgctctttatttgcgacatatttgattttattgacaaaatttcattaacactctgtaagtttacgctatacattgtttctgcatttttatttactctttttacttctattccaccaattgtgcctacaactgcaattaatatagctactaataaaaatgatgaaatcagcttagctcttacttgatttaataaattcatattaaaatttcctcctactgttaaaatgctattgcatattatttcttccactatcatgcaacaaagttttcattccatcttctgtaagcggtttgctaaaatagaaaccttgaattatcttgcaacctaagtcagtaagtacttctatctgttctcttgtttcaactccctcaactattaccttgtatttcaagtcctttgataagttaactatattctttattaataccatgttcttataattttccacatgatctacaaatgttttatcaatctttaatgtacttactgaaatattaattaagtagcttagagaagagtatccagtcccaaagtcatctattgcaatatttattcccatgcctttgagttcatttaataatgctatattttcctctgatatatctaataaagtactctctgttatttctatctctaaaaagtttggagatatattatacttatcacagcattttaacaacttatccttaaaatctctttccttaatttggattggtgatatattgattgctatattattaaacttgtaacccatacacttccacaaactcgcttgctctatggatttttccattatccaatcgccaatttgaactatatctccactttcttcagcaataggaataaattctgctggtgaaacatttccaagcttatcattattccatcttagtaatgcttcaattccaacaatctcattggtagacaaatcaatttgcggctgatagttaatatttaattcatgtttattaatagcattctttaattcgcttctaatcaatgcctccctataatatttctcaaatatttcagtagtaaagagtgtataattattttttccagttctcttcgacttgtacatagctaaattacagaactctaacaactcatcagaatttatgctatcatccggaaaagtagatattcccatacttatgcttacagaaatctccaattcatcatctgctatcttaaaaggtactgataagtttttataaattttcttgcaaatctcctctatttcacttatagatttaaattcatagattaaaattgcaaattcatcaccatttaatctaaatagtttcccttttcctttaatacatctacttaccctttcagaaaaacattttaatataaaatcaccaaaagaatagccccaattataatttatgattttgtagtcatcaacatcaatataaataatcgcaccttttctacaattaacttttgacatttctaaactactgttaagcttctcaaaaaaataagcactattaggcagccccgtaagaatatcgtgtttggaaaattcttcattaagcttaatgctttttctcctaagtatattcttatttaattttctttttatggactttaccattttcatcttaagtttaagttcttttttgggcatattaattttaatcttattcataataacttccttttttaaattagtacaactcaacacgtgtaaaacctctccacctcgctcctatcgtttaataataaaatatgacttcttcaatgataatttttgcgtaattattctacaaacttttaaactttgactttttaaaaaattaaatatatcatttatttgaacataataaatattttgtcttattattttacgtaataatgtatttatagctctgcaaatatacaaatatttcatatcacgtgtcatgataatacaatttaacctatatttgtacatttttaagctttatacaatatacatatactacacttataatataataatggacaaaatatttattatgtatcattacttctagaggagagtgtatatgagggcatctaatgaaactgaaattaaatatttaacgcaaaaagaagtattatcactatttaatgcaattgaaaattctggaaagctgcattcaacacgtgatttagcaatatttagattagcttatagatgcggtcttagagcttccgaaatatcaatgttaaaattggaaaattataatattaataaaggagaaatatattgtaaaagattaaagggtagtaagaataatactctgcggctagatgagaaaactaaaagcgttttagacaaatacattactgaaaatgaaattacatctgaatctcaaactatttttacaagccaaaagaataagccaatttcaaggcagaccctagatcacctaacaaagcagtatttttccatggccaacattcaagataagtcgaagcaccattttcataccattaaacatactacagcagttcaccttgctgaatgtgatatggatataaaagaacttcaatggtggcttggacataaatctgttactaatacagagatatattttcaatttactacaaaacaacaagaaaagatgtatgcaaaactagaaggaaaaagtgaaatggtataaactttacttgatatactataaaaagacttactttagctgttaaataactaaaataagtcttttatttttcattaaatatcttctttagattttaaatttctgtaccatttcattgagtttttgtgcaagtccagcttgattttgtgctgttaaagcaacttgctctatggcttttgaagtttcatccacactttcttttattgttgctacttgttcatttgattcctgtgctgttgatgccatctcttgtactaacttattaactcttcctacagtgattgtaatttcttctgacatgtttgcaatcttctccgacattttacttacaaagtcagaatcattataatatatatttcctgtacttccataggcattaaattgttcatgaacctctgtatttataaatttcaatatatcatttcctgtgttaatactataattaaatgcatcctgaactttaattatagtatctttgatagctgttacagcctctgatgattgttctgcaagctttcttacttcatctgctacaactgcaaatcctttaccttgttcccctgcccttgctgcttctattgctgcatttagtgctaataaatttgtttgttcagctatgcttccaattgtatcagccatgattttaatattatctactatcttgccattttcaataacaattaacatgtttctttgcttttcttttgataatttctccatttcatctatagactttttactattgtttttgacttctatagctctttctttagatctattagcattctggcttccttccatagcttttttagataactcatttatatttgagtttacttcatcaactgtagtacttataattcctgcctcagcacaagattcctccatccctagtgaaatagtacttacagcttcatctatactcgcagcttttgatgaaagctcctcagctgttgcagaaagctcttcactagatgtacttatatcttgagaattttgaataatctctctaattaatttattcacattttcttgtgctttatttaatgcgcttcctgtttgtccaagttcatcttttctcttaattgaaattggagttgaaaaatcatataacgctaatctctctgcaaatcctttaattttttttaacggtgtatttataacctttgatattagtgcaccaaatacgattgctactgctaacccaaagatagtaagtgtaatcataattttattagaattaatataagtagatgatatatcctcattagctgattttgcatcagatatatttatatctataactttgtccaggctatacatcatttttgtctgtagcggaaccatttctaaatacctcttttttgcttcttctaaatcgtctgattttacagcattcactaccttgtctctaacctgattatattccttcgcattatcattaaattccttccaagattttgtttcactacttgtcatttgtgatttttcataatcatttatatatttatcattctcattaagtgcagtaataacatttttttgtgcttcctctaccttatatttatctttttcatacatcatgattaatatgttacttttaatttctgtcatatttgattttatagataggatctcattgacatgattaaaattcctattgtacattcctgatgctttattatttacatttttcaaagacagtgctcctattattcctactacgccaattaaaattgctaccgtcaaaaatgataaggttaatttaaattttataggcaggcttcttctcaaaaacataacttttcccctctctaaatttataatctcgaccctttattaccctttttgtaatagaaaacgttttactagaatgtttgaattaacatatattgctaattattataataatgtttttaatttatataatcaactaaaaaatctactcttatatcgaaatgttgagtattttctaattattttaactataaacttaattgtagaaacaataataaagctatacgcaagtctactttaactatgcatatagctttattacttaatttaatctatctaaaatctaaaatcacgttttccttcatgtaagttttcaagattttccaatactatctttttaactttttcatttggaatatttggaatttcatttttaattacttcctcaccttttcttcgtgtatcttcagaagcataatcctctaaatactccttcaatgtcatcaatgcattaggttggcagcagttagctatttgtcctgatttaacaaggctcataaatctatctcctgttcttccttccctgtagcaagctgtgcagaaacttggaatatgacctctttcaagcaaccagtttactatctcatctagagttctagtatcacttacatcaaattgtgctgagttttcttcctcattttccttttcaacataaccaccaacacttgtagatgatcctccacttatttgagaaactccaagttcaagcactttttctcttgttttttgagattctcttgtagaaacaataagacctgtatatggaactgtaattctaagcactgcaactattttagcaaatatctcatctgaaatagcatttgtaaattcatctggatttatatcatcagccggtcttattctaggtacacttatagtatgtggaccaacgcccaaagatgcttctaaatgttctgcatgcattaataagcctacaaaatcatatctatacatatttaagccatataatacacctagaccaacatcatcaattccagcttccatagctctatccatagcttctgtatgataagcatagtcatgctttggtcctgttggatgaagttcttcatatgtctttttgtggtatgtttcctggaataatatatatgttccaattccagcttcttttaactttctataattttcaacagttgtcgctgcgatatttacattaactcttctaattgctccatttttgtgttttatactataaattgtttctatactttcaagaacatattcaagaggattgtttactgggtcttctcctgtttctaatgcaagtcttttatgccccatatcttgcaatgcaattacttcgtttttaatttcttcttgagtaagcttctttcttgttatatgtttatttttatgatggtatggacaatatgtgcatccatttacacaataattggaaagatatagtggcgcaaacattactattctgttaccataaaatctttgcttgatttcttttgcaagtttatacattttttcattttcatcttctaattcgcattcaagtaaaaccgctgcttctctatgtgaaattcctttacattctttagccttttctagaatttcattaattaattctctattgttcttatttttcttagcaaactcaagagtttctaatatctcttcgttgtcaataaattctgttgctatttttgatttaacattatacattactctactcttctttctataattggatttttaaattttgaatttaattcgttctgattaatgctttcttcatccaattttggcaaaggctaaaatattaattaaagctaatctacttattactatatttaatatttatttagcagttttagaatacattgtttttacatttattccttcgatcataccaagtttacctgataatgagcttattatatcattggtagcatctattactacacttattatacccacattcttttctctgtaaggtatacccattctcccaaccatatattgcgaatattcatgcaaaatattgttgagcttatctgttgaattcatatcttccactataattcctatcaatgcgattcttgtatccatattctttattcctttcaagaagaaaatatttttaaattcaccgtattaattagcaattacctattttcaattgcaataaaaaatcccagtgccacaaaaaggcgcagggatagcgtacatatctctatctataataccgccttgtcatttgggacgaaccctcatgtgtttcagaacgatcatgcattaacagtctttcttcttgggatctcccccttaaagtcagactacatttatattttaacacaaatattgtttatatcaagcctagataagctacgattatctaatttaaaaaattaatcaaataatccatagtatccgatgttttgctatctccatttttttcataaaaatccttactgcttagtagaaatcccattaaatcaaatttcatgtctgccactgactcaccagtctcacgagcctttgctgataaaatggctccttgtattaataatcccaagtttagttttcctgcagttttatcactaagaaatccttcattatgcaattgtgttgttatgctatttatttcttttatactacaatttggcaaagatattccaagagcatctgcaactttgttaatatctgcttcaccatctgcttttaaatatttatctttactattagctatatctagatctatgactttctccataactgctgtagaagtaaaaccattttcaccatctaatttatcatatttctcgtgcatttcattctttaatttttcaagttcctgatttgcttgaattgaatttgttttattctgcaactttgaattactataagttaaatttttcagttgatctgaaaaagaaagtctattgtcatttttttttatatgtactcatattactcgaatacattctattaactgttgtcttgttatttatatttgatatcataaatccacttcctaaatatatttataatttaaatttatacatttatttatcgaatatttactagaataatttacaatatccaaataataaagtcatatattgtcattactgtagttaaatttaaatacatttagattaaatagccttttttcatacattatacatggattttattttacattattaaagaataaaataataaatccttgtgacttaaaaacacaaggatattatatatcttataaaaatatgcttactctaagttagtagcaaattacaatcccgccatcatcagcataaacagtacttaatccgctcccttcaaaaattattatatcatcaaagttatatttgttttttatttcttccttgagtttttccgctttttctcttgcatttatatgtcctattcctagaactttatttttaaaatcactgccttcttcacctattaggtctattagtctattaaatgcctttttcttccctcttacttgctcttttagcacaatttctccatcattagcagtcataattggagtaacttgcagaagtgatcccattaaagctttggcactacttattcttccattcttaactaggttgtccaatttatctaaaacaaataacgtcttcatatttcctatgtactcagtaacttgctctacaatctgagaattatgtgctttttcttcaattaacttttttattttcaaaacaactagatcagctccagataccgctgtcttgcaatcgaatacatgtacaaaactttctgggaactcttccttaaaaatttccttcgcaagcatggcactattatgtgatccacttaatttaccagaaatagttacaacaaaattatttttacacttttttaaagattctagaaaatcatgtggcgatgggcatgctgttttaattttgtttttgctgcttttcattttttcaagtaaatcgtctatatttacattcttatcaacgatttcttcatcatcaataataattttaaatggaattctttccatatactcttcatttccaaaaacttcattattaaaatcaacacaactgtctactattattctagtattcattttattcctccatctttttcatttgtagttctaatactttatctatcaacttatttaattaataatacttgtctaaattaatatataattgtccactaaattatatattaattttactattattagtagttctttttcttaatatatttcaaaaataatccttcatcataattctaaaaatattccaataattttagccgtaattgtgaatcgttgaaatgtgatttgtgaatttcaacacacatacatatctaaaaaataaattattataagtagtactatttaatacttactcttaaatgtatatctttcaaagtatacgtaatagtaaaagacaagttctgcactatatataaaatatttagtgcaaaacttgccttaacctcatacattttctttttcttaatttatttaacacattctattaacacactatgttttaaagtttgaagaaacaatttcttatattgctgttatatttatttctttttctttgaatataagtcaaatactacagcgaataataatacaaatcctttgatagcttgttgccagttgttatcaactcctagtaaagacataccattattaagtactcccattacaagtccaccaacaactgctcctaaaattcttccagtaccacctgctgtagatgcaccacctatatagcaagctgctaatgcatctaattcgaagttaacaccagctttaggttgtgctgagttaacacgtgctgcataagcgagtcctgctaatgctgccatcaatcccatatttacaaatactaagaatgtaattttatcaacgtttacacctgataaagctgctgcttttttattaccaccaactgcatatacttgtctaccaaatactgttttagtagtaatgaatgagtaaattgctattaatactcctgctattattaatatatttggtatacctttataagatgctaatacaaagcttccacccataattactacaactgatattatgtttttagcaagaaacattgaattatgatcaacattgaaattatatttttgaagtttctttcttccttttatattattaaataccatgattaccgataatataacacctacgatcattgctgatccaactaaataaatatcgcccattttaaagtagaatagtggaggtatgaatccagaccctaagttcgcaaattcatttgggaatggagcgattgtcttaccatttaatattatcattgagaatcctctaaagattaattgtcccgctaatgttacaacaaatcctggaattgctttatacgaaatccaatacccttgcacagctccaacagctgcacctattaaaagtgatacaacaacagatactacaggattcattcctttattaaccataagaacaccggctattgctccaacaaaggcgcaaacggaaccaaccgcaagatcgacagtacctacaataactactaaaagcattcctactgcaagaataagtacgtaaccattttgctgaattaaatttgttatgttaagtgattttaacataactcccttagttaaaatcgagaatataactactaccactaataatgcaacaagcataccattgtctttcataaatttattaaatgtattttttgcaacttttttttcttcaactcttgcttcactcattttactacctccctattttgatgcaacaattttactcatgataacttcttgagtagcatctttcttatctaattctccaataatctttccttcattcatgatatagattctatcacttaatccaaggacttcaggcaattcggatgaaattacaataactgcttttccttgagctaccaaatcatttataattgtatatatttcgtattttgctccaacgtcaattcccctagtaggttcatcaagaattagtaagtctggctccgcataaacccatcttgaaagtactactttttgttgatttccaccacttaagtttcctgtaatttgtaatatacttggagttttgattttcattgattttctaaattcttctgcggctaaaatctcaacttgttcatttataacaccattattcgaaattttgcctaatgatgctattgaaatattatgacgaatatcatcaattaggtttaaacctgcttcttttctatcttcagttacgtaagcaatacctgcattaattgcatctttaactgttttaatatgaatttctttaccttcttttaaaatgctaccagaaatcttttgtccatatgttctaccaaaaatgctcattgcaagttcagttcttcctgcacccataagcccagcaattccaagtacttcgccttttctaacttttatatttacattatcaaccattttcctatctggataatctggatgatatacattccaatcctttatttcaaacattacatctccaattttaggagttctttttggataacgatctgtaagttcacgaccaaccatccctttaacaattctatcctctgatatttgccctccagaggcatctaatgtttcaatactagctccatcacgtagtactgttatagagtcacatactcttgaaacctcatttaacttatgtgaaattaaaatacatgtaattccttgtgattttaactctaacattaattttaataaattttcactgtcatcctcatttaatgatgcagtcggttcatctagaattaataattttacgtttttggataatgcctttgcaatttcaattaattgttgtttaccaacaccaagtgtgttaactattgtatctgggtcttcatctaatccgacctttttaagtaattctttagttctaattcttacctcttgccagtctataactccatgacttgcaatttcgtttcctataaatatattttctcctatactaagatgtggactcaaagctaattcttgatgtataataactatcccatctgcctcactgtcttttatgcctttatatttacatgcctttccattatatagaattgcaccttcgtatgatccgtgaggatatattccacttaatactttcattaaagttgatttacctgctccattttctccacaaagagaatgaatttctcctgattgcactcttaaattaacattatctagtgcttttacaccaggaaatgtcttagttatatttatcatttcaagaataatatcattgtcttttaacatacgtcacgcccctccttatttgaatgatagtggaacaaaattgtccacactatcattactgctgttaatcttatttagaaagatctgcttcctttaaatatcctgaatcaattagaacttctttatagtttgttttatctacagatacaggttgacataagtaagatggtacaacttttactccattgttgtaagtcttctcatcattaacttcagctttttgacctttaatagctgcatcgattgttttaacagcttgagctgataattttcttgtatctttgaatattgttgatgtttgctctcctgcaattatagatttaattgaagctgtttctgcatcttgacctgtaattactggccatggaagatctcctgaaccatatccaacacttcttaacgcttctacaacaccacggcttataccatcataaggagctaatacagcatcaacttttttaccacctgagtagttagcagttaatatattttccattcttgattgtgctaaagctccatcccatctcaatgtacagatttcgtcaaatttagtttgacctgaaactacagttaatttcttagaatctatatatggttgaagcacttccattgcaccttcaaagaacatatgagcattattatcatctggagatccagcaaataattctatgttaaatgatttttgtgcattttttaaatctaatttcttttctatatattgacccatttggtttcctacaagtttattatcaaaagaaatgtaatagtctacatttgcagtatttttaattaaacggtcataagctataacaggaattcctgcatctttagctttttgacaaacatcagttaaagattcaccatcgatatttgcaattactaaaccactaacaccttttgtaattaagttttctgcttgtgatacttgagtttctacaacgtcttcagcatattgaagatctgtattatagccaagatcttttaactgttttaccatatcatttccatcatttatccaacgttcagaagatttagttggcattaatatacctattgtttttccgcttcctgatcccccgtcagtttttgtttgtgactctgttttagaattatctgcatctgagtttggagcactagttgttacactacatccaccgatagaacctagtaatgccattgataataacatagccattaattttttcttcataatattttctcccttcaacttcccatataataaattataaatttatattttcttttaatctgcttaatagttatcatttctgataaattaacgtgagttcgatggaaaaatttaagggataaaaaatcccatcaaaatgttttattatataagtacgaccaaataaataaaacaaaggatgggattttatgcaaaacttattagtagaaatattttatgatgtagacaatttttgtattggatttgaaaattactgtaaaagtcatttcctaacggaaaatagcgaccgcaaatttgcaatgattaaaagtaaaactttatcattaagcgaagttatgacaataactatctactttcatttgtcaaattacagaacttttaaatcatactatattgagcatgtgtctactgttctcaaaccgtattttcctaagcttgttagctacaataggtttattgaattaatgcaacaatcattagttgcactactattatacatgatgaaatttagaactggcaagtgcacaggaatttcttttatcgattctacaactttgaatgtatgccataatagaagaatacactctcataaggtttttaaaggaattgcagaacgtggtaaaagttcaacgggctggttttatggttttaagcttcatcttgttgttaacgataaaggggatattctctctttttatctaactccgggaaatgtagatgatagagaaattaagactatagaaatattagcaaaagatttatttggaaaactttttggtgacaaaggttatttatctaaaaagatctccgatattttgtattccaaaggtattcagcttataacaaagataaagaaaaacatgaaaaataaattaatgttaatggaggataaaattcttcttaggaaaagagctatcattgaaacaataaatgaccaactaaaaaatatatgtcagatagagcataatcgacatagaagttttactaattttgcggttaatatagtttcaggattgatttcgtatagttttcttcctaagaaaccttctcttaagttggacaaatatctaactatggaataattggaatatcgaaccacaagattacaaggatacttttttgctttttttcataaccatatttacccataaaatattctagcttttcgaactcacgttaaattaaagtggactaaaagttaatattctaaattattaaaacaatataatttttttaatatgcttataaacaaaaatcaaactttattaatacgttttcatcaaattcagacatgttcttatttattttgacatattataagttaactcaagaataactaatatagccatagcattagcatatttactactaatattgaatttatactctggattctttttcttataaatcattggtattcctactccaagtaaaatggctaatccaaatatagctagtacactaaaagaagaagtaattattcctgaatcgatagaaataaaatatagtaataagccaggagctactagatagtataataatttgttacataaagtaatgtgcttttcattcataaaattcctcccctatcctagtaaatattattggtttaatgtgtaattgatattattcatataatttgaatatatatcatggaaaatacattttcctatatatgctctatgatatatatcttgtaagtacagcaatattcttctttattatcgtaataaaaattcacattaacatccatttatatatgtatcccgcttgaacaaattaagaatagcttatcttgtcacttctatgtgatacacgtactctaactcttaatgttttataattttagaagatagcacttgttaatatgttgtacgtacttcatgtatttattatatatcgttttcatcactatagcaatagtttttttatattgtatgtacaattttattatatttctttatcaatgtgcatacatctacgatttattacagtataatgccatatttcagcttattagactaaaaatttgagcacgctaaagtgtatataacctgcttcttaagagcttcaattctattttcatggtttttccgaattaaaatatttatgatttaggtgagttataatataaacataaactctatattatttgtccatacatttattatttatagaaaacagataataaggttgaataccctaaaaagtattcaaccttattaatcagactttctatttaaggctatctatcgctgttctttcaatagcaagcccactagtgtaacgtttgataaattcattaaatccttcaacatccttagaatctggatctatttttgtacctatttgtcctgcaaacactttatttgtaagataatcgtctaatgtctcattttcatctttatttatcatataagatgcaagtactgcaattccccacgctccgccttcagcagcagtttccatgacagaaactggtgcatctatagctgctgccattatcttttgtcctacacctttagtcttaaataagccgccatgtcctagcatttcatcgaccttaacaccttcctctttaagaagaaggtctaaaccagtttttagtgcacctaatgatgtaaataaatgtacacgcataaagttagctaaattgaatttactctctgctgaacgtacaaatagtgggcgcccttcttcaaaaccagttatatgctcacctgagaaataattataagctaataatccgccacaatccgaatccccttcaagtgccttattatataaagttgcaaataacttattcatatcaacttctacaccaaatgcttctgcaaattctttaaataatccaacccaagcattaagatccgaagtacagttattacaatgaaccatagctactaaattaccagtaggagttgtaactaagtctatttcttcatatgcttttgataattctttttcaagtacgatcattgcaaaaacagatgttcctgctgatacattacctgtacgctttgcaatactgttagttgcaaccattcctgttcctgcgtctccttctggagggcagaatggaatacctgcctttaattgtcctgtaacatctaaaagctttgcaccttcttcagtaagtacacctgcattttctccagctaacaatacctttggtaaaatatttccaagtttccatgaaaaattcttaggagctactaactcatcaaattgatcgatcatacgtgcattataattctttgtatctatatcaatagggaacattccagatgcctctccaacacctataactttttcacctgttaatttccaatgaatatatccttctaaagttgtttggaaatctatatcagctacatgctcttcaccgtttaatattgcttggtaaagatgagcaatactccatctttgagggatatggtagttaaataattttgttaactcttctgaagctttttcagtaatagtgttacgccatgtacggaatggtactaaaagctctccctctttattgaagaccatatatccatgcatcatagcactgaatccaattgcgcctattgtttgaatagtaactccatatttttctttgacatcctcagccatcttcttataactatcttgaacgccagtccagatatcatctaaaccataagtccaaatattattaacatatttattttcccaatcatggctccctgaagctattggagtattattttcatctattaaaactgctttaattctagttgaacctagttcaataccaagcactgtcttaccattaataatggcattttttatattattcatctctaatcccataaaaacctccactacgtgtaatttttttaatcgtttacttattatgtgataaatttatattcttattatagtcaaattaaataaatcttaattttaaaataatttctaatttcttcttaatatcattccattgtaatattactaaacttaatacaaattaactcttataatcacctaatgtccagccctcataccgttaccgtccccagcttaatgtaagatcggaatgcaataatgactagacattagataaatgattttattaaattctaaaactgcttcattgtcatattaatttatacatttattaaaaatctataaatatatttctaaccaataatttattattgtaattgcataatttcacactaatcttttcacacatctttatacatatcttttaataattttaacttttataataatgaataaatttgttttaatatatttatagattaattaatttacacacttttaatccaaatctttttatatctgtttcgctatatttattaatattttaaggttaaatctatttttctaaagttttactataatcactaaatttcctctactatatcgtagatttaattactttaacttctatttctttgctacattaatagccttttcaacaacattttctacagtgaatccaaatttctcgaataggatttctgctttacctgatgctccaaaagtatctaaagatataacatctccatcaagacctacatatttgtgccatccaaagcttgttaatgcttctactgcaactctagcacgaactttatttggcataactgattctttataagcttcatcttgagcatcaaataattcgaatgatggcatactgataactcttgcatctattccttttgcttctaattcagctgctgctttgtagattaattctacttctgatcctgatgccattaaaagtacatctggagtttccttcttagaatcttttaagatatatccaccttttaatgctctcttaggacatccatcatatagtggtaacttttgtcttgttaatactaatgatgttggagtagttccattagttacagcatagtaccatgctgctgcagtttcttttgaatctgctggtctaaatactgtcatgtttggcatacttctaagagctgctaattgttctattggttcatgagttggcccgtcttcccctactccaatactatcatgtgttaatacataagctactggaagattcataagagctgataatctcatagcacccttcatataatcgctgaatacaaagaatgttgcacagaatactttaagtcctccatgagcatacattccgttagcgatagccgccatagcatgttctctaactccaaagtgaaggtttgatccacttctatcttctgctgagaaatctcctctatcgttcatatgagttttgttagatggagctaaatctgctgatcctccaatgaagtttggaattagtttagccaatctatttatcattattcctgaagattctcttgtagccatttctttatcaaagctccaaagttcttcgttgtttaataaagcttctttatcaagttcgccactcatccatttagtatattctgctgcaagttctggataagcttttgcatatgctttgaataactcattccaagcttcttcagtcttttcaccttttgctatgtgttcattcatatttgtgtacacttcgtctggtacgtagaatgcaggctctgtcttccatcctaagttttccttcatagcagttacattttctgcacctagaggttcaccatgtgctgaagcttttccttgttttgctggacatccaaaaccaatttgatttttaactattataatagatggttttgttgtttccactttagctgcttctattgctttttctattgcatctatatcatttccatctgctacatttagtacttgccatccataagcttcgtatctcttagctacatcttctctaaatgctatgtctgtatttccttcaatcgaaatattatttgaatcatataatacaactaattttccaagacctaaagttccagcaagagatgacgcttctcctgagataccttccataaggcatccgtctccaactatagcatatgtatagtgatcaactacgctataatctggtttattgaatttttctgcaagatgtgcttctgctatagcaaaacctactgcattacaaataccttgtccaagtggtcctgttgttatttcaacaccttttgtatggccatactctggatgtcctggtgttaaacttccgaattgtctaaagtttttaatatcttcaactgtaagtccatatccaaataaatgtagcaatgaatattcaagcattgaaccatgtcctgctgataatacaaatctatctctgttatcccattcagggttctttccattatgattcatctttgcccataatgtataagccattgtagctgatccaagaggtaaccctggatgtcctgattttgatttttcaatagcatctgctgataatactcttattgcattaatagataatttctctaattctctactcatctttatcctcatttcctagacatatttttttataagttcttggttgtgctaattaagtcccatgctacgcttcgaattcgtttcaaacctgaaataatcttagctgtccttcgttctcttttcaaaaggtgcctattttactacacattcttatattgttacctttttttcttcattactttttaagttcttttatgttttcatttataaattcatatattcttaaattcttaaattcttaaattcctatattcttaacttcttatattcttatattcttaagaatatatatttttatctctgtcatttggaacatgaataaatcacaaacgatagtcatacttttgtaaaagaattgtatcagaatatttatccataaacatttatgccttcctaatttcagaatctagccattatatctctaaattactcttccattttcgaaatatatctgcactagaaataagtaacatattttgtggagtgttcattagaaattgtgttggtagtgcttcttgattataagttgttccaaatgtgcttgttcagagcttgtctttgaagcaagcattttgggtacaacttataatcttagaagcactcaacaaaatttcttagcaaccggaatcaaaatatgtttcttatttcgaaggactattttccaaatgctgctgcccagtctgctttgaatctttctaatccttgatctgttaatgggtgttttaacatttgcattactaagctataaggtactgttgatatatctgcacctgcttttgctgcttctattacatgaattgggtttcttacgcttgctgctattatttctgtttctattccatgaactgcaaatatttctgctatatctctaactaaatccatacctatcattgagatgtcatctactcttccaaggaatgggcttacatatgttgctcctgcatttgctgcaagtaatgcttgtgttgctgagaatattaatgttacatttgttttaattccttcacttgctaatactttagttgcctttaagccttcagctgtcattggaatctttactatcatattcttatgaattgctgcaatttctcttccttcttttatcattccttcagcatcttcacttacaacttctccacttattggtccatcaactatttctgttatttctttaataacttcattaaagtctcttccttcttttgctattaatgatggatttgttgttacaccacatattactcccatttcatttgcttctttaatgtgttccacatttgctgtgtctaaaaaaaatctcatttccctaacatctcctctttatatattttgtttgttatttagcaacaaactattatttgcatatttaccttccatccatttaatatttatgtttcaaaatattaaatttagacattttctttttcaactatatacgttactttttaactcatacttattaaggagaatttacaagggagttccaatttctgattaaaaattctccttaaaaatatgttggtttatactatgatatcttattgtccataatatgcattcgcaccatgttttctaagataatgtttatctaaaaggtgctgtttgacaccctttacatctttgttcaaagtcattgtcttatatgccatttcagcaactttatctaatactactgcattgtaaactgctgaattagcatcttttccccaagcgaaaggaccatggtttttaactacaatagctggaacttctaatggatttttatctccaatagtttcaactattacatttcctgtttccttttcatattctccactaatttcttcatctgttagatcgcgagtacaaggaatatccccataaaaataatctgcatgtgttgtcccaaaagctggtatactcattcctgcctgagcaaaagttgttgcccaatctgaatgagtatgaacaacgcctccaacactcggataagttttatacataactaagtgagttggagtatctgttgaaggtttatactttccttctacaacatttccttctaagtctacaactaccatatcttctgctttcatagtatcataatcaacaccacttggttttataactactaatccagtttctctatcgatttcactaacatttccccaagtgtagattacaagaccttttctttgaagttccatattagcttcataaactttttcctttaatttctctaacatttaaacacccctatctgcttgttgtatgtatgtacgtacaagcgtacataaaaaataatatctaatatatatatcattaaagtttatctttgctccagtaactcaaaatcaagtcatctaaagcaaagataaattttaaactctagaacaagaatctctaacaataagttcagcattgtatgtgtattgaggcttgtctattctcccctcaatcatatctataatgcatttggctgctcttattcccatttcttctttcggatgctttattgttgtaagtttaacacctgatgaaactgctaaactagagtcatcaaaacttactattgataaatcttttggtatttctatattttcttttctacaattatctattaccttcaaagcaaccttatcattatagcaaacaattgcggttggtttttcttcaagatttaaaatcttctttataaactggtctatatacatctcttgattatcagttatatattctcctactatacttttgttaaaactcaagtcatattcgtttagggcctttatgtaaccccttcttcttttttcaccttgtaaatcatctgctttaaataatgcagctatatttctatgaccaagttctaataaataattagtaagcttgtaccctccctgttcatcatctactacaatatatgcagaattttcttcatcacaattagcatttattgcaatatattttatattgttcttttctaactttttaatgctatcatgatgcaggttatttattgtactttgtgctggttcaactattagtcctgatatatcttggtttatgatatcctcaaaacatcttctttcattctcaatgtcgttgttactattaaataataataaattatatcccttgcgtcttaattcttcctctatacctgatataattttaggaaaaatataatctgatatataagttgtaagaacagcaacattttttttaacttcattagtctttttgttagagtaaaagcttccctttcctctttctttatatatccagccttcttgtactaaataagtaagagcttgtcttactgtatgcctacttacattgaataagttggctatttcattttcagaaggtaattggtctcctgctgaaaccttgttttcttctattaggctgatatagtaattttctattaattcgtgctttgtttcagcttctttcatctttttcaactactttcatcaaataactatgcaataacttcttaaaatataaatcgatttctttaaaattatattctaaaaagttgtacgcacttgatgatttgattatatctctattccctatatatatcaatagttttttctaaaatttatttaaacaccaaggttaaccatacatcatcttctttaataatttttattataatcgcaaatacaaattttgctgcaaagctgtctttacctaatttaaaccataatgatacctatctggaaaattaatattttttatttttttaattttatatcttgtatgtacaacattattatattataataagcttgtacatacatcaaaaacttgtttgtactcatgaaaaggtatactaaatttagataagcatttttatttatccaatagctagcatccgtagtactccatcttcttaagtgagagataacggccgcaagctcctggactaggtgccccttaagggtataaattcaaggtagagttaaaattctactcaaaaagtttcattttatatattaggaggaatgttaaatgttaaaagtaaaaaattatgaattctggtttattacaggaagtcaacatctatatggtcctgaagtaatagagcaagtatctgataattcaaagataatagttgatgaattaaacaaaaaggatttaccttataaaatagtctttaaaacagttgctactgattctccttcaattagaaaagtatgcaacgatgctaataacgatgaaaactgtgctggtataattacttggatgcatacattctcaccagctaaaatgtggattcatggtttaactgaattaagaaaaccattacttcatctccatactcaatttaataaagaaattccttggggaacaattgatatggacttcatgaacttaaaccaagcagctcatggagatagagaattcggatatattggagctagacttgacatagctcgtaaaatagtagttggtcactggacagatgcttctgtttctgctgatatagctaaatggatggctcctgctgttgcatttactgaaggacacagtattaaggttgctcgtttcggagataacatgagaaatgtagccgttactgatggtgatagaattgaagctcaaattaaatttggttggatagttgattactatggagttggtgacctagttaaatcaatggataaagttacagatgatcaaatagatgaacttatggctgaatactctaaattatatgatatagatcctaaagcttctatagactctatccgtgaacaagctaaaattgaaattggtttaagaactttcttggatgcaagaggatatacagctttcacaactaacttcgaagcacttcacggaatgaaacagcttccaggtcttgctgttcaacatctaatgtctgaaggttatggctttggtgctgaaggagattggaagactgctgcacttcttagagctatgaaaatcatggctggtggaaaaggtacaggcttaatggaagattacacttataacatggattcagaaaatggattaattcttggtgcacatatgcttgaaatatgtccaacacttgctgcaactaagccagttatcgaagtgcacccacttggaattggaggcaaagaagatccagctcgtttagtatttaaaggtgcttctggtccagctgttgctgcttcattaattgatatgggtaacagattccgtttaattgttaatagtgttgactgtgttgaagtaactgaagatatgcctaacttaccagtagcaagcgttctttggaaaccacaaccatcattaaaagaaggtgctaaagcatggattatggctggtggtgctcaccatactagcttctcattctatgttgacgaagaacaattattagattgggctgatatggttggggttgaatgtgtagtaattaataatgacactaaactttcaacattcaaaaacgaactaaaattttctagtgccgcttggaaattctaattaatagtgctataaatcttatttatataaaagtggtaaatattgattgatgattttagaatatatttcgttaaccttccagaaagaaataatagactctctacaatcttaatatttaccactccccttatttgataaaatataaatagataaaatccgatattcggattttatctattttcattttgatctaatattattccgtcttaattattggatgtctaagctcaacaattgtcccctctccaagaatacttctgtagactaacccatactcacttccatgtataagctttattctctcatttacattaaaaattccataaccaatctgattcttatttccatcgttattattaagcatattatttattttatttaatgtttcttcatccatacctcttccattatcagctacagtaaaacataataaattatcttcaatttttcctgtaattaaaatctttccattgccgcgcttttcttttattccatggtaaattgcattttcaacaaggggctgtaatattaattttattaacttataatcaagtatttctttatcaaattgaatttcgtagtcaagcttgtcttcatatcttattttctgaataattaaatagctctgtacatggcttaattcttctttcacacttattacttcttttcctttacttaagcttattctaagcaagttagtaaatgcttctattatctccactatgtcttcttcattatgttcttctgccatccaccttatcgtatctaaagtgttatacataaaatgtggcttgatttgagcctgtaaaacattcatttcagccagtcttttatttttttcttcaatttgtactaattttataagattatttatttcttttaccatggtattaaaagaaccaccaagttcccctatttcatcattatacttagcattgaatgatactgttaaatctccttcttgagcttttctcattaacctttttaatttttgaattggatttacaatagatcttgtaaagattataactaaaatttcagctattattaatgccaaaatagctactacaaaagaataatatcttatatatttaataactcgtaaactctcactttcaggaaatactccaattgtttcccatcctgtatattttgaatcaatctttgtcaattgataattttctccattaatattttttattattatattgttgttaatattctctatccattcatttttaattctatatactatattattaacaggagtataaacaatctctttgttcatatccataatataaataaaacccgcagttcctggtcttgaattctcaataatgttcttgatggcatctaattttatatcaataagtattacaccttttatttggttagtagatgaatccacaactgccttcgacatggagaacacttcatcagcggaatagcgaaaaatattatcaatgttcctacctattggtttagtaaataagtgtatagtttcaggcttattgtaggcctttgtataccattcttcattatataaaggatctcttgatactctgttcattacatcacttatatagccaccattagtgtttaccaccattattccagctatttccggattgaatttaacaaagttataaatagatttatacgcttcgtcttcaatatcagtatcttcagatttattatcattaaggaattttattattctaggatcgattgacatataatttataatgttttcagtattattaacataagattcaatattgctatttatttgttttattatttgattagtgttttcattttgtgaaaagttaattgaatctttatatagtaaatttcccaaagtagtaatagtaatagtaacaatgaggattactccaaaaaaataaaatataagtttatcccctatgctcttattcataaaatatgtttttaaactattcaccctatacctccaaaacatttgtataaatcatatctatcatccacaaattagcacatctatatttaaaattttattattaactatacttataattaacaatcctatatattaaattatagctcaaactaccaatacttggcatacctatttatttagatgtgatatattcgtgcaaaaataaaatgagcatttgtgttttcttatcttaaaagattatacaaatgctcattttattatattaatccatattatattatttagtttaatcaagaagatgaagcattttttcgtttttcatctctaattacaataattctctgcaatacaataaatatgaacaataacattccaaccgctatcttagtccaccatgaatttagtgttccatcaaacattataagactttgaataattcctgtagttaatacaccaaataatggtccaattatattcccatatccacctgttaataatatacctccgattacgcatgctgctatagcatccatttccattccattacaatgaagaccataacctgaaagagtatatattgtaaataataaaccacctaaagatgaacagaaacccgaaaatgtatatacaagtatttttgttctttccactggtaatcccattaatttagcagaattttcatttccaccaattgcatacacagttctgccaaaccttgtaaacttcatcatataaaatgcagcagcaacaactatcaagctaacgataacgttaattgatataaatgcatttggtaatattgatattctataagatgaaatctccgtaaaaactggattatcaattataattgtatcaatgcttatgacataacttgctcctcttgcaaagaacattcctgcaagtgtaactatccaaggatgtagtttaaacttttgaatcaagataccctgaactgttccaaaaataattccaacaataagaactattagcattactaaaaaaggatttactcctttttgtaataaacttgctgtaatcatacttacaaaagctatcattgatccaactgaaagatctattccaccagttaatattgcaactgcttcaccaattgccaccactattaaatatgcattatcaatgaacaagttagtaaatacttgtgctgacaaaaaacttttatataatactgatcctattagaaacaatcctataaataatgcgattgtagcataaattgcaatataatctttgtttattttgaatgtgttcctctttcctattagcttattcatgctttaatcacctctttttcttttagattgatttttgtatttttctttatcttaagaatttttctaaattcaggagattgaattatgcatacaactataactactattgctttaacaactaatgtaatttcaggtgcaacacctaagctataaattgttgtagttaatgtttgtatgaacaatgctcctacaacagtcccagaaagataaaaccgtcctccagccatagatgtcccacctataactgtcgcaagtattgcatccaattctaaccacaaaccaacattattagcatcggcactttttatattagaacataaaattattcctgctattcctgctaacattccacatataacataaagtgaaaatacaactttcctagattgaattcctgcgaatttacatgaattattgttaactcctatagactcaataaataatcctagagcagttctccttattaaaaaatacataattaacgctaccgcaatagctataaatattgctataggaagcaatatgtagcctgtccctataaatatgaaatccttattagtaaaagttaatatttgtcctcctgttataagttgagcaacgcctctaccaactatatataaaattaatgttccaaccattggttgtactcctatatacgaaactaaaaatccattccatattccacatataagtccactaattattcctattgctactgctaatggaactgaacctccatcaactattacagttgcagaaagagctgcacttattgcaattattgatcccacggaaatatcaattccttgagttgcaattacgagagtcattcctagagatatcaatattaatggggctgcacgatttagtatatctatagtatttccaaataaatgtccgtctttcatgcttatgctcaagaaacttggtgtcattataaaattaaacaaaagcaatataattaagcttgttaatggccaaaatattttagcattataaattttaaggaaaaaagtttgtttcttattattttccatattatctagcacctcctgctatagttttcatgatattagattcctctatttcatttccaactagttccccgataatatttctatctctaaggacaattactctgtcacaacacttaactacttctggtagctctgacgaaataaacaaaattgtcattccttgtttagctaatgttaatattaactctgttatttcaccttttgctcctatatcaattccccttgttggttcatctaaaattaataattgcggttctgttgcgagccatcttgctaatattaccttttgttggttaccaccacttaagttacttattttttgctccatacttggagttttgattctaagtaaatctatatacttttgtgaaatttcttgttgttttttcatcggcaaatatttaaatattcccctattagcttgcaatgctaatattatattttctcttattgttaaatcaccaactattccttcaacttttctgtcctctggacaaaaacctaaaccttcctcgattgctttttgaggataaatatatgaatagttttttccatttatagttatatttccactagtagatttatctatcccaaatattgttcgtgcgcattcgcttctaccagacccaagaagccctgcaaatccgagaatttcacccttcttgatttctatattaaatggatttatagttccagaccttccaaaattatttgttgatattaaattctctctctgttcatcattaactactttctttgttcttgtacttttttctatctcgctatagtctttaccaatcattttagaaactaattctattctagaaagtttgtctgcatcataggtcccaaccaactcaccatttctaagcactgtaagtttgtccgaaacctcatatacttgatctaaaaagtgagtaacaaatattattgacataccttcttctttaaattttttcataattttaaataattgctttacttccttatcatctaaacttgatgttggttcatctaagattaatataccttgagatatatctacagcacgtgcaattgctaccatttgctgcactgcaaccgaataattatttaaggccttctttacatctacctttaaattaagcctttcttctaatagtttctctgcacttctattcattttcttccaatctatacttccatttttcttgggttcacgtccaatatatatattttctgcaactgatagatttggacatagatttacttcttgataaacagtactaattccatgactctgagcttcctgagtagatgatatttttatttcttttcccctcaatataattgttccttcatctatcttataaacacctgtaagaacctttatcaatgtcgattttccagcaccattttctcccattagcgtatggatttcaccttttcttagtgtaaaatcaacatttgaaagtgctctaacacccggaaagaacttgctaatatttttcatctctaaaactatattagaatcactcacttatatcactcctcttgttttaacacaattacaaacatgtacgtactacatcttttttaacataagagcatggattgaattccagctcttatgcatattatcattaatattttctgtttggtaattctgctccagcatctttttgtaagaattgactttcttttgagtttatagttctttcaacttctttaccatctaatatgtttttagcaacttcaagtaattgaggcccaagtagcggattacattcaacagttgcattagctttaccatcaaccattgcttggaatatatctttaataccatcaactgaaactataaatatatcttttcctggtttctttccatattcctctatagcttgaatagctcccattgccatatcatcattatgagaccatagtacatttattttatcaccatctgattttagaaatgcttccataacttctttaccttttgcacgagtaaaatctcctgtttgtgattttattatcttataattaggacaatcttttattgcatcattaaacccttgttgtcttccaaccattgcagtagaccccactgttccttgaagctctgctatattaagtgttgcgtctttaccgaattgatctattagtatttgtgcagcctttttcccctctgcaaccatgtctgaacctaagaaacatttataaagtgaatcatctgaaactgtaacttttctatcaacaatcactactggaatttttgcatccttagcctctttaagaactgtatcccagccagtttcaacaactggatctaaagcaattaaatctaccttttgtgcaataaatgatcttatggcttttatttgattttcttgtttttgttgtccatcagaaaatttcaagtcaaagttaggatctaatgttggaattgattttatagagtcagtttctgctgttctccaaccactttctgcaccaacctgtgcaaatccaattacttttttactagatgaattcgccgatgatgtctttgctgcatcgcctccaccagctccagatccaccacaccctgaaagcatgccaatacataatacagcactcgccattaatgccatcatcttttttaacttcataattaattccccctatattcatgatttcgttttcatgaattaattatatatttatacttacaaattgtatttgcattaatcagcacttttgtatacttttacggaatatggaaatctatatatttaatcatttaaagtatctttagttattttattgcattttagtaacacttttttaggaatatcatctttcttgttcagtatttttattgcataatctacagcttcttttcctccagtcttgcatgtaaatgttccttgcaatatgccatttctaacaaggtctatacctccttgaggtccttctaggccatcaacaccaattattttaatatttttcgaattagtacttacggtagcgtaatatgccccaagtgccatataatcactgtgagcaaaaattatattgacgtccttatcatctttcaatatttcctctaatttatcttctgtttcatttttttgccaatttcctacaatggttctatctatagcaatatttttatagttgctaattgcttctttaaatccattagttatttctttatctgtacttgaatctaatattccttgaacctctataacattagccttgctattaccagccaaattagcaattaattctcctgcctgcactcctatagattttgtatcagcccctatatataaagtataatcgtatccctcaacagctctatccaataatataaccggtaaagattcatacgcttttcttacagttggtgctagttctttggagttattaattgaaacaattagcaaatctgcaccaaagttcatcaaatcttctatatcctttttctgtttttcaacatctccacctgcatccttaaaaattatttttatattgctatgtttcttggcttcttcctgtatttctttattcatgcttattctccatggttcatataggtttgcctgagacataccgattataaatgtatcctttttttgagagtttgtcctatataaatagattgcaaaaattattagtccacatatacaaactataattatagataaataaataatttttcttttattattcactctattttcccctcttatattccgttggtgaaactccaactacttttttaaaagctctacaaaaataatgttgattactgtaacctactagttctgccacatcataaattttaactgctggatcctccatgatatacattgctttttttattcttattttagtaaggtaatcaataaaggataaccccgtttctttttttaataatttacttaaatatgaggatgttacttctaatttatttgatatataatttatacttaactcatttgaataatagttatcttctatatactttattgctagtaaaaccatagaactgcacttctttttttcattaacgctattcattattttagtatattcatcttttatcttgaatacatcattaaaaacactagcttgctcaattaatacattacattttaaatatttatatatctccttctgtatttcttttgcactagaaatccaccatcccatatcatttatcttgcttactaatattatatttttcttatcatcattaaaaatatattttaactctaaatctttaaatccatcatttaaaatattagctattgcaaactctaataattcaatactccaattcctgacacttacttcaacattaagtttttctacaatttttataaccataattccaatatttcttccaaactcgatatcaaaaaaactcatctcctttaaaacttgttcatcacttaatttattgttaaaccattcactaaaaaaagttttttgtaatacttccttattttcagctaattgtctttttacccactctaagtaattgttttcttttcccttttcaataagtttattggttgctttaattattatctcctctatgttctttttactcacaggctttagaatgtaatcgaaaacattgtactgtaatgctttttgagcgtatgaaaaatcatcatatccacttattataataacaatcccactattaccgatctcttttagcttttgtaataggtctaaaccatttaagaatggcatatttatatccaataatataatatctggtctgttttctttaataatttctaatgcaatttctccatcttccgcttgccctactatctcaataccgaactcactccaatttaaaatattctcaatacctcttctaattttaggctcgtcatcagcgataactagtttccacataactcctccatttataatatatattacaataataaatttatatttaatattctaacgagctaaggctgaattaatattaaaatatagaaaattaattgcaagatatattttttattttgttactataataatttttattgttttaatgctccattaatgtaattattaagcatatatttatattattttaatatatttccaaaataatttctagaaataattgtatgtacaattttaatgtaatataatatacttgtacatacatgaaaccgatatctttaattatgtaaatgtatactaaaaaatatgtagtaacttattaaatacggaggtgttatcatggcaatagaaaaaaatgttttcggaacaatgcctgatggaaaagatgtttatatttatactttaacaaactctaatgaaatgaaagttgagatttgtacttacggtggtacaatagtttcatctttggttccgagcaaggatggtaaattaattgatgtaatgctaggatacgataatttagatgattatttaaaaggagataaattcttaggtgccttaataggacgttttggaaatagaattcaatatggaaagttcatccttaatgatcaagaatatactttagctcagaatgatggggaaaatcatttacacggcggcttaaaaggctttgataaagtagtatgggattcaaaaatagttgaagattctcctaatacattagaactttcttattttagcccagacggtgaagaaggatatcctggtaaccttaatgttaaagttacttatgtccttactgaagataatgctctagagataaattatagtgcaacttctgataaagatacagtcgtaaatcttacaaatcatgcttattttaatttatctggtcattcatctggtgacgttcttaatcaaaaactgatgataaacgcagataagtttacagtaaacgataaatattcaattcctacaggcgaaataaaagaagtagctggaactcctatggatttcagaacattaactcctatcggcaaaaatataaatagcgattatgaacaaattgattttggaaaaggatacgatcataactgggtactaaataccgatggatgtgatagctcaaaagctgctcaagctgttgatgaaaattctggaatagtattggatgtttatacaaccactcctggaattcaattttacagtgggaacttccttgatggttcagatgtaggtaaaaataaatctatttataatcgtagaaatggattttgtctagaaactcaatattttcctaactctataaactgtagtaaatttaaatctccaatacttagagctggagaagtatataaagataaaaccatttataaattctctacattataaattctgatattataatgcactaatataaaaaggtacttaaccaataaacatccatagtggataattatgttttatgatttaattattaaacaaaaactcacataaaatataaccactatggattatacaaatattataaagagcactaaaaaataaacactttattttccatgattgtatgctaatccaactttgtcttaaagattgctttctgacctaagtcgcctaataaatactattctaaatgaaatacgttaccatacaatcattgaaataaatcaaggaaaatccatatctacaatggcgacgctatctatttataaagttgataatataaaaaaacatgctcagtcctaaaattaaaatttcttattaaagtatattaacctcaaaagatattcatcacgctgagtatactcaatacgataaagttgcttgaatttatgacttactaaatatattttaaaatacaacttttagaatgttttttgtaatctatgcaaatacatttcaatatttatacatattttaaaattaatgcttattataactttatacttagacttattaaataccttgcgcttatatttttaatgtcatttttgttaaaggagaatttatatgtataataaattaaaaaaagttattagtaactatcctattaatacaaaatttaaaataactttttcagcaattttaggacttacttcttttcttatggcagttgtgatatgcataatattgtttatttcatcacaaacaaattcactatacaatggaccgtacaaagtttctgaaactatttctaatattagagtaaacttgcaaacaataaaaatggacatgtttagatcaatcacagaaacagattcaggaataaagaacttttatctagagcaagctgatacagaatccatagctcttgcaaaaaatatagaaattttaaaagaaatacataagggagatccatcattattaaatgaatttttatcaaatgtaaaggatttagatgataagagagaaaaattaagtgacttactaaaatcaaaaaccaatcaggctgtaatgaaagtcagccaagatgcttactcttcacaaattaaagagtctgaagagtgtatacttaagctttttaagtcgtcccaagaagatgctaattcttttgttactaattcaaatacttatagaaatatatccctaatttctattacgtttattatgataatattaattgtaatatcattattattaattagagtattgaacgatgtattacttgaaggtattaatcatattaaggatattgccaaaaacttagctcgtggaaatcttaaaataaatactgaatataatgcaaaagatgaaatgggtgaaatgtctcgcgatttatctaattccatcgggatgttactttcttatattaatgacataacaagcactttggaaagattagcagatggagacttaaatatacatttagatacttcaatagaatatataggcgattttaatcctatacaaaagtcaataaaaaatattattgattctttaaatattatatttcagaatatggatcaatcaatctcattaatttctaatggttctgaacaattatcttcaactacccaaatactctctgaaggttccataaatcaggctggcgccgttgaagagctctttaatagttttaaaaaaatactacaaaaagttaataatactactaataatgcagataaagctaaaagtttttccattaatgtaaagcacattgtagaagaaggaaacgaaaaaatgcaaatattgatggaatctatgaaagaaataactatctgctcaaaacaaattgctgaaattataaaagcaatagaagaaattgcttcccaaactaatcttttggcattaaacgctgctatcgaagcagctagagccggtgaagctggaaaaggctttgctgtagtcgcagacgaagtcagaaatcttgctgagcaatctgctgaagcagtaaacaatacttctaagattataaaaaattcattgcatgtagtagctaatggagaaaagctggctacagagactgctgctgcactagatataatagttaaaaatgttgatgatacaactaatttagtgaaagaaatagctgtagcctccgaggaccaaactgaagctataaccgaaatgactagtaaggttgatcaaatttctcaagtagtccagactaattctgcaacagcagaagaactagcagcatctacagaagaactagcttctcaatctcagataataaaaactgaaatattaaaatatacactaaaaaataaataacaacttttgatcttttagatctcaatatttatttgaagtcaaagaattagaatgtaaaaattctttgacttcaatataaaaagctatattatatctctgctattggcatagcgccatgataaaactgctttatttagacgttaaagcgcaatcatataatttctttttatttctgttcttctaaaactctatagattgcttttgctactcctaaattgtcatttgtgtcagttatatattttgctatttcttttatttcaggaatagcatttcccatagcaactgattctttgaattctgtaaacatagaataatcgttaaaactatctcctagtactaaaacttcatctcttttaaatcccattttttcagctacttttgcaagtataatacccttttgagctgttatatctgtaatttctatattgtctctgaatgaagatgaaacggcaattccttttaattctccgataacttttttcattttatttataagctctatatctttgtgaaaagctacaaactttctaacttctataccgctgcttaaaaatttatccaagtcagaaatataattaagttgaacaaaatatggttgaactttagcaagttctaatgcttcttctggagtaagctcaggattaaaggataacgttctatatgccatttcctttaaagcttcctctttagtatctgtagtatatattcctttgtttgtaaatattcttgcagatactttttctctttgaagtatatttataattttagttgcagttcctagttctatatttatctcttctaggatatttccatcctcatctctatactctgccccattcataagtacacattgacatcttatattattttccatcaaaagaggtttaacagtgtcatattctcttcctgttgaaattgcaaatacaattcctgccttctcagcgctcttaatagcagatacggtctctttatctattttatgttttgtattcaacagtgtcccatccatatctgatgcaataagttttatcatttgggatcatctcctcgctattttattaaatttctcacaccttaatattataacaaagtttattcaattgtaaaaataagcaacattgtttcacttttatcactttctacttaaaaataggttttattgattcctaatttttatttagcattttttctatttatcaaacttataacaaaaaagcctaccctttatataatacaaagtgcaagcttttttattcacacaaaataattgaaattcttaactatacaaattactaattcatgaaaagaaatatattctctatatattaatttaaggttatttaaatgcttgatttattataatttgaaatatattttttatataataaatctacgtttagaactctatcaagccaagcattcaattaagaccataatatagacacttatttgcaacatctatataaatttactagtaaaacatataatattaaattatttagttaatactagttaagcttatcaatttcatatttttatagttaaatttctctacagaaatatcaaatactattccactacttaaaaatatagtattatttaaaactaaagctgggtcatccttttccaagttcaaaaaacttgcttcttcttcagttaatttttcagaagttattattctatccgcaaatcctatttttaattttaaatcatttgtaatgtaatcaaatatagacttactacatatttcttcattcaaataaggaataatatctttattatagtaagattcctctatttcaattggatctccatttaaatatcttactcttttaatataatatatctttgtgccaatatcacatttcattctatttgataatttttcatctgcattaattaacgaaaattcagcaaccttactttcaaacttttccttagaatattgttttgataaaccatttatatctcttatttgagcgcagccattttttgcaaactcccttaaaaatatcccactgccttgcactctataaacataacctttagtcactaatatttctatagcttttcttatagtatttttgctaacattaaatttttttatcagttcctcttctgtaggaagttttttactcaagctatatttatcttccaacatttctttttctaaaatattaacaaccatttcatactttgtttgcatctctataattcctcgctttattttaaataagtattttgactaatatcttcttctaattcgtaacacgttaatcctaggctataaaatttcttaaaacataccaaaactatttatataaagtattaaacccaatatttcctctttcattttcaatcgaaatattgggtttaatacttgataattaccttcaatgaatatcattatcatacaaattcacttttttcttctctcaatttatttaatatctttattaataaattacctctttttcttctaagtatttaaattttatatctattgatgccttcactgcgtgaaagaatttaactatttgtataattctttggtatgatatattatattatataatatatcttttgtaaaggtttaaacgccttgatttaaacgcgaagaatagtaattaaaattagaatataagtttaatagtgattctatactattaattattacataaatttaacctttaataatatagtatacaaaaatctttaacgcaacttatatagaaccgctaattattttgtataatcagcagttcttacttaacttatgtatcatgtatatttatattaagaacatactagtccaaatattaatttgaaaaagtctgagttcccatatatttatcattaccactaattacacctataccaaccttcgtgtaagaaggattcatcatatttgccttatgtcccggcgaattccaccactgattgaataattcaactggttcataattattgtatgctatattttctcctgttgtagtatactcataattaattgctttcagccagcttgtccaattattcccctctggagtagtatggtcgaaataattatattgtatcatatgattactcttatacctagctatttgaactaactcattatctataactaaaggctttaaacctgcttcagttcttttttcattcattaactcaaaaattttgttttctgccattgcttgtatacttatagaatagtttcttggtaattgaggcagtccatttatatcaacagtatcattatctgctgaattataggcactagcttgtccgctatatcctgaattactaaaaagttggcttgagccatttgatgattctattaactttccagactcatcaaagcaataaatctttcccgcaatattttgaatacctgtttgcattgctccattgctattcatataataccacttattattatcctggatccaacctatttgcatctctccactattgttaaaataataccagattccattgatattattccaaccttcttgcattactcctgaattatttaagtaataccagtttcctttgtcataagtccaatctgttttcattcttccgctttcattaaaataataccattcatttgaaatattcttccatcctttagctaccttgtttccttctttatagctccatgttctatcatcattctgagtccattccgcagatgcttttaacggtgatagtgtagcaattgttgcagccacaataactgcacttgtcatttttgtaaaaaaagttttcttcattagttttcctcttttcttttgttattctgttatcttacatatcgttagtataactccttataaaatcgttttcagaaccacatataaaagtttttccatataattattctaccataaattcgacatttttcaacccattttattctaaaatattttataatagctaaacagactatataattgtcttttttccttctgatttattgttaacttattgcaaaatagttatattcatatatatattttatttaagtacttatttctttaaaaattcaaatgcaaatttattgttgcattatatatataataagaaacttacgttaacacaattttttaattaggttaattttcatataaatataacaattaatgattttaacatctgattaataaactcatatattgaaaatagataatattttagaggcgttataatgtataaaaaaggtgatttccatatccactcaactttctcagatggaaagtgtaccccaagggaaattgtcattctttctaaaaaaagagaagtggatattatttctataacagatcataatagcacatctggtttagatgaagctatcatagctggtgaagatcttggtgtaagagttattcctggcgttgaactttcaactaaatacaattcttccagggttcatgttttaggttattttaaagatgatagctataaaaacgaacttttaattgaaatattaaaaaatgtaaaaagtcataaggtttccaatataaaaaaattattaggaaagaaactagacttttgtaatactaaagataaactttccgtagaagccggcataaaaattctaaagttttttggagctacagtagttttagcacatcctgtacttttgagaagatccgattttgaaaaaatcatagaaatggactttgatggacttgaagctaaatacttcagtaatacagaaaatgatactgaatacttcttaaaagtagccaatgatagagatttgctttatacagctggctcagattttcatagttgcaaggaattttatagagttcacgggataattggtgacgtttatttaaatgaatttgagatatataattttttggtcagaggtaaactaccctatttataaatactttactgcaattattcaaaattaaaaattagatatatgtttaattggattatcaatgaactacatatatctaatttcttactccataaactatatttcttctagcttttttcttcttttatatatttggttagctactaagcatgctgttacagtagttcccaaaacacatattgcagttggagccactgctataaatccagccaaaagcagcccttttcccgaaacattaatatcaacacttctatcttttgactttatatttacattaatacttcctgtttctttattagctttactaatcctgttaaaagatccactcattatctcttttttaaagtctaacatttaatcacccctcatataatttacaatttatatttctgctttatctatatcatattaatttaaatctattatatacaaaaaacttccagatttaaataaaattctaagcaaaaaaattgtaactatactatagaaaaaatctatacatagtcacaatcctaattataaagttcattaactattttattccagttgttaagcatgcattcagctattttagaatcatacattattcctttattcttctttatttcatctttgcataactcatcacttatggattttctatacggcctatcacttttcattgcatctatggaatcacaaactgctaatattcttgatgcaaacggtatttcttcttcctttaatcctttaggatatccttttccatcccatctctcgtgatgatataagactatcctagaaatatattcaaacgtactcgttttacttagtatattatatccaatatacggatgattcttcattaattcccattcatctacttccagactatctggtttatttagaatattatcaggtactccaattttaccaatatcatgcagatctcctgctatatgtattaattcgagttcttccgttgtcattcccaagacttttcctaatttataagccatatctgctactctagtcgaatgaccatatgtatagaagtcttttgcttccaaggttgcaaccatacttcttacaacaccatgatacatatcatcattatattgatccaatatttctcaccaccttactaattttgctagtcttactaaatataatatcataaaatctactgtgtttgaatataattatttaattcaattaagataattaaaaatacttttaaaatatttataaaaacttgacgattaaattacaatatagcattcattattaggatcatattcttctgtaatttcgtcccaattttcaatgatgcaatttactatttcaggatcatacattatacccttatttttaattatttcattcttacattcttcatcgcttattaattttctataaggtctattacttttcatagcatcaatagaatcacaaactgctattattctagatcctaatggtatctcttccttacataatccatttggatatcctcttccatcccatctttcatgatgatgtagtactatttttgaaataatatctaagctttttactttgcttaatattttataccctatctctggatgcttcttcataagctcccactcttgtatgtcaagtttacctctcttatttagaacactgtcaggaaccccaatcttacctatatcatgcaaatgtcctgcaatgtgcaaaatctctagttcctcattctttatccctaaatacataccaagcttattagccatatttcccactctagtagaatgtccagcagtataaatatcttttgcatctagcgctgcaaccatactttctattatatcgtggtaaacttcactactaaataacatactcataatcatacctccttaaatcaaattaaaacgtccttttattaatttaaacttctaaattatacttaatttatttaaatcatctctcattgaaaattattatcaattatattatatcctattttacttattaatcaacatttaacttttatcataattttatgataaatatgaatataataacttaatatcctattaaattcttacctttatcaatgctatttttaaagaacaaaattgcataaaaataaggggagttaaattaacttcccttagcttttaaataacaatatttaattattttctaaacattcttatgataaattttataacttcatttactactataaccataaatgctaaccctaaaactttactccacattattaccgataaagcaactgaactaaagaaagtagtaaatacttgagtaaatattatttgagctaatccagttataaatattacttgaatggctatcttattcttaaaaaagttaggaaatatgctttctatcccaaattctctgcagttaaatgcattaaatagtgcactaaatgcaaataatccaaataaaacagtttccatctcacttgcaaatccgcttttttctgtcgatgctcctaaaatattgtacttcatctgtataagtaaaatcgatgtaacatatattgcatttagtattattgaggtgatcataccttttgtaattatacttgaatttctatttacaggttttctattaaaaacattccttctaattggttctaaacctaaaaccagagctggaggaccatccattattatgttaatccataataattgaatcgtagtaaatggcatttcaaaatttaatatttgtgaaattattgcaactaaaaatgctattatgtttacagtaatctgaaattgtatgaatctttgaaaattttcatacacgcctcttccccactttattccatcaatgatagtagtaaaattatcatctgttaatattatgtctgcagcacttttagaaacttctgatccagaaatccccatagctatcccaacgtctgcttttgttaatgctggtgcatcatttataccatccccagttactccaactacttctccattgctttgaagtgcttcaacaattctcatttttgtctctggcttacttctagctacaatagctatatttctaatctcgcttcttaattctttatcatttaaagtatcaatatatgtagcttctactgctttttttccacctttaagcattccaagttcgtttcctatcgctatagcagtatttatattatctccagtcaacatcttagtttcaatcccagcttttttagctgtttctatagccttagctacatcttctcttagtggatctcttattgcaacaaatccactaaatattagtccgttgtttccatctaagattttaggttttaaaatacttatctcacttgtaatcgcagcctctgcttctacatcttcaataattctaaatccaaatcctagaattctcatagatttagcctgtagtttctgtatttcttttactatttcattttttctctcttgtgtaagatctataaatttattatttatgacttcgctagtagcatttgataacagtatttcaggagctccttttacgagtactacattcattcctttaatcttcataacagtagccatgaatttattttcagagttaaatggtatttgatgaattacttcactttcttttctttcctgcttataatcatattcctctagatacgaaagtagtgcacattctgttgaattacctaagtaatttaacttatctccctcaaaacttatatcagccgttgagtttacaaggcaatttttcacaaaataatcatctatatcgcttttatcatcaaagaactttccatttaaatagagattctctacagtcatcctattctcagttagagtacctgttttatctgaacaaataacactgacagagcctatagtttcacaagcttccttttttgttactaacgcattaatcttagccatcttttgcattgttattgctaatgtcatattaatcatagttggcaacccttctggcaccgctgcaactattaaagcaatacatacaacaaaggcagttttaacaggatctatagaatttaaaaaagatattactcctgatgtatttatatttaaattaccagatagaatcattttggtgaccataaatataaacagtaaacctgctataacgcttgatattttagtaattgtcttacccaaatctcccaattttctttggagcggtgtttcttcttcatctctttgaagagtttgagctattttacccatttcagtattatcaccagttgaagttacaaccattgtcgccctaccgtaagcaattagagtcccgccaaatcccatattaatttgctttgctggaattggatcctgtatttctttcttttcttttacttgtatttcctccatattaacaattgcttgagcattttttgtaacatcttctgattcaccagttaacatatcttccctaacctttaaatctattgtctcaatgaaccttccgtctgctggtatcatgtctcctgtttcaaggtatatgatatctcctggaactaaatcattttttcctacttgagttactttaccttttctcaacacctttacaacaatatcttctgtcattttggccagagcttctgctgctttttttgattttccttctgtaattattccaatagttattccaattgcaacagcacatactattccaactgaatcataatattctccgataatcgcactaactaaagctgctatcaaaagaataagcatcattggctccaatagcgcattttttatttcttcaaatatatttccttcttttttatgagtaaattcattttttccatacttctcagttctctctcttatggatgaatcatttagaccaatctctaaatcgacatctagttcttttaaaactgattctatatctttattaaaatatttcattaattaaactcctcttattaacatgtatctccttcaaatatgattctaaaatctttcagtatattttaacataaaacatagtcaatattaagttaacttataatatcgacttaactactagtttatattattaattataacctattttactagaacagtatcaatttttagatacttttgttaattagcttctttttgcgcaaacattcttattatatttaataactctcccccataagcttcaattttttttgttccaactcctctgatctccaacaattcatctaatgttctaggtctgctattagatattgcaatcaagctcgtatctgagaatattatataaggctttattttatctttatatgccctatcttttctccaagattttaaagcttcaaatagctctttatttattataggctccctgctatctaatatcttaaatacaactgattccttactcttcaaaaccctaattgatctggaattaagttttaacattgaatatgtgccttctttcaaatcaacgtatccatcatctagtaatctttttatcaactcttttataaatgtacttccatattccttcattattccgtatgttgtaactttatctagattattttgtattattttaggtcccttaaaacctttcaaaatatccacaagaactgatattccatactgttcttttgttctaaaaactgtggacaaaatcatctgactctctttcgtaaaatcttttaactcgtcatcatttaaacagttgctgcatttattacagtaatttagcttccggtcatttccaaaataattcaatatatattttctgtagcattcctttaaattacaataatcaatcataaattggaactttctaagctgaatttctcttctattcatggaagaacttttgtttataatatattccactctacttatatcttcttcacaataaaataagtaacactcgcagttctctccatctcttcctcctcttcctatctcttgataatacgattctaagttttgaggaaaagtaaaatgtactataaatctaatatttgacttatctattcccattccaaatgcatttgttgcaataattacatccaaattctcatataaaaactcttcttgaaatctttctttctcttcatctttgagtccaccatggtacttgccaacattaaatcctaggtcctttaaataataatataaattatctacttcgtttcttgacgcgcagtatacaataccagattcaccttcattttttctaattatatccttaacagtttcaatcttatctacttccttaagtatattaaggctaagattttccctattaatatcgcctttatatatataaggtttctctaatcccaataatttaattgagtcttccctaacttcactcgttgctgttgcagtaaacgctgatattataggtttagttttaaggcttttgtaaaaatctgatattcctaaataactctgtctaaaatcatgcccccactgagatacgcaatgagcttcatctatagcaatttgacatatatgaagatctttaatcaattctctaaatattttggattctaacctttctggtgatatatatattatcttgtactcccccatggatgcttcaattaatatatttcttatagtgtccatattctgagtactatttatatatgctgctttaattccagccccaactagattgtccacttggtccttcataagcgatattaaaggggatataactatagttacaccttgcataattatagctggaatctggtaacaaatagatttccctgcccctgtaggcataagacaaaaagtatctacaccacttaaaatactatttataatctcgaattgacctcttcttagagtatcaaatccgtagtatttttttaaagcataaaatatcttttgtttagtatccatctctgcttccctttctcttatatataataaattctacttgtaaatttctttttagcatattaaataaaataacgagtctcaaatgccacgattacttttcatcaaacaaggaattagatttgactcgtagtaagcatattaaactaatatgcttatgagaagagaacccaaatctgtgatttggtgtaaatctcttactcagcaagtgtgtgcaagtcgagctccccatgtctgaaaacagacttggaagatgaatttgttattttttcgattataccttaatactagtatataccacataattaaaatcttaaacataaaatgattatctccaaattaacccacataataactcaaataattctaataaattctttggattttttcctgttaatttttttattttttctagtctataatttaaagtatttctatgtatatttagcctattagcaacattaccaatatcaccattttcttcaatatatgcctgcacagtttgaataagttctaacttattccctgccttatcaaggtttgacatcattgatactaaaggtagcttattatcatgcgataactttataaaaaatctcagttcgtcatagttataaagtaaacttgacggctttatcttcacaccaaattccattgccaattctgcactttctaatgaaatagctgcaacatcttccattgctccaatgcctattctccttacgtttttatttgtctttaggttctctagtaatccattatataagtctttagatgtaacaaaaaatgctattctattatcaacctcgctataatttgaatacttctgatataatattttaaaacttctagagtttatatttccatctacaagaataactctgaatttcttcgtaaggtctattccataacttttagctctttgatggaaactttcatcatattttgtctttctatgagctagctcattataaaatttctgcatactcaatcttttgttctgagtttcctcgtctgctttagattgttctattaacaaaactgctgttacgcgaacaagtttactaaatcttcttacctcatcaggatgcccagttatcccaatcacacctattactttatcattgataataataggttcattaactccaggtttcatcctgtcatcttcttcatagacttcatttatttgttggttatctatagctttccttgcgccttcatgcaaatttccaatccttttactatcaccactgcctataattattccactttcatccatgacatttatgttataaggaattacattcatcatttctaaaacaattttttgtgctatggttttagataacgtcatatcaaccatccctttctaatatataattatattataataattcaaagctataattagtgtagtatctattgcaaaatataaatctaattcttagttttttatctacaaagataaaaaaactataatctacacttaaaaaactataatctacacttattcgtataactcaccgaaatcataaatattttgttccgaaaagctatgaaaatgagcttaaaattctagcaattttgtaaatctgttcatctaataagtcgaattcttaaattggatatctatagcttatgattgtgttatctatatacaatgcctattattatactttttaacactaaaacaaagctaaatatatataataattagatcataaagccaaagcaatatctacattatcatcatatataaattaaaagtgcgtcttaaaataaaacgcacttttaatattatacttatattagattaattacagtagattcataagcctaactatattctcagcagtcttttcaatattctccggaccttttaccaaagcttcttctaacgaagttgctcccttagttattccaaatattgaatctattccactttcatatagaacttctatatcttcaccaactcttccagctaatgcaattaccggcttattatgttttttagcaattgtagcaacacctaaaggtgtcttaccgtattgagtttgaaaatctatgcttccttctccagtccataccatgtctgcttctttaactttttcttctaatgaagcatattctattaccatttcaatacctttttttagagttccatttagaaatgccataagtccagctccaagtcctccagctgctccagctcctggttcatttaaaacatcttttcccaattctttttttattacatctgcataatgtcttaaattattatctaatatttctatcatttcctgcgttgctcccttttgtggtccaaatacatttgaagctcctttttcaccacaaagaggattattgacgtcacaagctacctcaattacaacatcttttaatcttgggtcaaaattctttaaatctaaactatctagttttcctaattctccaccgccaagagctaattcattgcctttaccatctaatagttttcctccaagtgcctgtataactcctgctccaccatcattagtagcacttccaccaatacctattaacaacttttttacccctttatctaaacatgcttttataagttgtccagtaccataagttgtagttagtaaaggattcctctgatctggtggtactaaatgtattccacttgcactagccatttccaatattcctatttctttatctcccaaaataccatactgtgcttctacttcattaccaagtggccccattacctttaatgaatatatttctccattagtagcatctactaatgactgcatagttccttctccaccatcagccataggcacatgtaagcattttatattactatttgctttttttattcctctttccattgcctcgcaagcttcttttgctgtcatgctctctttaaaagaatcaggtgctaatacaataactaaatcttttttcattttcaacgctcctaactaaatttttatattttgtgagattaataaattgaataaattttacttatacttatcttattattttataaaaccgtatattattattgatacgataaccatagatcctccaactatagattcatatggcattaatttcatacgttcctttatattcatttttactgcatctgctgatgcatggaagaagttaccatgaggtagatgatcgataactacagctcctgtattgatcataattgctgcacttaaaggtgcgacaccaacagctagtattgctttcgcaaaagttcctgttgctacaattgcacctgtagatgttgaagccgtagctgctgccatcaatatacctgatataggtgctaaaaatactcctgaaatacctgtttgttgaatgcaatatactactgcgtcacttaaatttgatttagaaatgatacccgctattgctccagcacctattaatatcattacagttggtgtcattctatttaatcctgatgttgtatactcaagaatcttactacgttgtcccattgcaaacaatccaattaatcctgctataggcaatatatacattgcatctatttgaatagttgctaagaatttcagatgcaacatattcgctatagggttaagtgctaataatattacggcaactattggcgctaccatcgcctttccaaagcttggctttaccttattatccactctaactggtatttctgactctttaatcatttccccttttttactaattaatgtcgcaacaaaatatgtaactataagcccaattacagctggtataaatgctcctatcataacttgtgctaattcaacattaaatcctttagctaccgcaattgtattaggatttggagaaattatatttccagccttaccccctcctatcatagctaaaagtatagacgatttagtgattccaacttttttagccacaggaagtgctataggtgcaactataataactgtaaccggtatgaaaactccaaccgctgtgattatcatgcttgatagtgcaattgctaagagaacctttttctctccaaatttttctactatagtctcagcaattttctctgctgctccagactcaattaatacacctgcaagcactcctgccgctattacacgaacaactgctcccattacgctattcgtaccttcaatgatagcctgtgctgtattagctaaactagcaccaccaattagtccacctataacagcgcctccaaaaagtgcatatacaggattcactttccttaaaattagtattatagcgattactaatccaataatcgctccactccaatgaataactgtcattatatttcctcctcaaatttaataattatacaaatttatcctttattataccgtgtaagcgagttaacgtttactaacatatacataataatatatttagtgagaccttgatattgtttacttgacatttttttttgtgtatttgaacaataaactcttaatttaaatcttatgttctactttattagtttaattttgatgctatacacagcttttaaatatctattccttcttaagtgaaactacccgctgcagctagtctttcttcataaatttaatattatcaactctgaaatcttggcttttaataatataatagtaactattctaactgttttacttcttcaatttattttatctattgtgcattataacaataatttaaaaattaaaagctgccgacattttgccagcagccttagaatagaataactaaattcaaattaattttgttatctctaaatttaaattatcttaattttctatttaaacatctctttaaataatctactttcttttacatcttgagttactttagccaagttactagtatctccaattaaaatggctccacataaacgattgtttgcaaaataatattttgtatatgtctttttgactggatctttaaattcaactgttttatattgaatttctggattcttaccgttatcgccaattgcatacagtgaagtattagctccattaaatgttaatgctgcatctactgtctcatacgttaatgagtctccagctgcattagcacctgctacttttcccatttctagagcttgtggccatattccataatttatcccattatattctgcacaatctccacatgcataaatatgagaaacattagtctccattttttcatttactattactgctctattaacatcaattcctgcttcttgagctattttagaattaggcacaataccacaagatataacaactaaatcagctgcaataacttctcctccattaattctaactccagtaactgaatcttcaccctctatttcatcaatttttacgcctaatctcacatcaattcctttacctttaataatttcttcaaggaattttccaccttcataatctaattgacgtcccattaatttatcagcaagctctaatactgtaactttgcattttgcttttgttaattcccatgcagcctcaagtcctaaaactcctccacctattacaactgcattctttacctttggcaacaattctgtaattttatctgtatcggaaattctacgaattgctataacttccttcttatcttttcctgaaattggtggaacaaagcattcagctcctaaagcatatatgcatttatcatactttaatttaattccatctttaaacactgcctctttatctttagcatttatttcaattaattctctatcaagaacatttgtaatattattttctttataccaagcttcatcatgaactgcaatttgttttgaattaaatttagctatcattgactttgtaagcattggacgattataacctaacacattttcattagaaactaatactatagaacaagtctcatttctttctcttatagccgttgcagcgcttatacctgccgctccatttccaagaattagataaatctcatttgtattatttttataattgctatcatctatttcaaccggtacgaagttttcctttcctacaccacaaactggacatatttcaagacttgaatcaaatatttctccacatactaaacattttactaatgtccttttggctgactttttctttggattttctttattttgaagtatacatccaaaattatacccgtagtcataagcctcacttaattcactatcactaggcttaaatttaattctgaatccatcatctacaaccttcattctaagttgtttcaatctttctataatgtgtggaactccttcaccactccatccataacttccaaaagcactagcaagttttcctccgtgtgttctagcaaacatctttatagttaaatcccaaattggctctaaagcctcaccaactatagtaggtgttccaaataaaataccatcagcaaatcctaattcttcaattactttttccttatcctcttctactaaatcgtatgatcttacatctatatctccgctatctttaataccttctgatatttttccagctaactccttagtatatccatacgcactaacataaggtataattacagtttttcttgggttaggattaactacagtacaccattctttataaagttccatgatttcgtcaattctacaatctataactggaccatgccccgtacatatcatatcaatatctaaatctttaattctatccaatgctttaaccatatatggcgtcttaaaaggcccaataatacaatcaaagtaatatttagtagctcttaagtagccctcattatctttaaccttactcaatagtatttcatcaaaactatagtgagacccaaacgagtcacaagttatcagggttttatcctcttcaatatatgtatacattgtatctggccaatgtaaattaggcaaaaacatgaaacgtaatgtcttatctcccaactctaaagtatcattttcctttactgttatgctataaaagtcacgatttacaatattttttagaaatcctatagcaacttgtgtaccaactattttaatattaggattgatttcaataagcttttctatgctacccgcatgatcaggttctgtatgatttactacaatataatcaatatcattgatatcaactaatttatttaatgcacttaaatacccatcccaaaatttagctttggcagtttcaaataatacagtcttttcccctgttttaagtaagtaggaattataagatgttccaaactctgtctccataactatatcaaatacttttaaaccaggatctaaaactcctgtccaataaaaattcttttttaattctaatatttccatataaaattcctccctataactttcatctatatgaaaatattatacctttttttatagtaaaactgtatcaaatactagaaaattattataattcacaattaataaatcttttttataggaaataataagagtttaaaaggtatgattcattatattttacagccatcttaaacaatttattttttattaattttattgaaactttgccatttttataatcttcaatgctttttaaaaagttaagtttctctttatcatctgctaaattcttaaaatatccccatacatgtaatgcagtatttattgagtttccaattgttatttcctcttccatagcgtcttcaatgtaattataaaactcaaccgctggatactgagttttatctttgagtaacttccttatttccaagtaatttgaaggagaattctctaaaactttgtatttatatcttccccattcttcctcaagtttctttattttgctattttcagctatagaatttatacactttacagctgaaagatttttatccttaacttcaagcattatatctatattttgcccttttacactttcatagaactctataaacttactaatttttatcgtatttgaatgagaacctgactttttcaaagggtcttgctgagaataatgtattttctgccttccatctttctctttccatgttttattgcactcacttatccaatatgaatcgcttttttctctatcataacaatttatatcattatgaagattatcaaaaacaactggaatatttagttcatttcctattttaagaacatcatttatattgtatgatttatcatcattttcaataacaagtctttcttttacttgataatttaatcgtttataattatctgcgaatctgtttatcgcctgctctttatcattataaactccaccgatatgcagtataattttatgatttgctccaactccaaagttatccaaaactttaacatgataattcaaatcttcaatagctctctttacaacatcatcattaggagaattaagtactgtatattgccctggatgcatagatacccttatatcattatccataatctttctacctatttccgcaaattcttgcgaaaatatattccaccatgataattggttcaaatgactggatccgaatggtattaagtctgaactaatcctaaaaagctttatattattctttatattatattcaattatatttttaagagatttcaaattatacgatattatttccaataacttttcttcagttaaactcttcgctgtgcagctttttaaattagtatctggaactcctattgttaaacacgcatatcctatactcattatttaagctccttttctaagaatcatagttactcattcgtttgttttagtactcttttaaaaattatacctttgattctttaactcttgtttagtatcaaatatatacaacaatccaaaaataacaagtcatttaatttcctttatatactgttgcgtataattcgtgccattaatccgatattaattcaagtaaacattttcacagattcaaaaaagtgtaaactaaatctttgacttgttattttacaatatattaattaaaattaggacttattacaataagtcctaataaaataacaattacatattaatttttatttagattttccttatttaaaagcaggaatccaaaattataaccataatcataagcatcacttaactcactctcacttggtttaaatttaacacggaatccttcatcaacaaccttcattctaagttgctttagtctttctataatatgaggaacagcttccccactccatccataacttccaaaagcacttgctagcttattaccatgagttcttgcaaagattgaagtagttaaatcccatattggctttagagcctcacctactattgttggagatccgaaaagaatcccatctgcaaattcaagttcttcaagtacctttgcttgatctgctgtttccatatcatatgttctaacatcaatatcaccactagcttcaattccctcagctattttatgcgccaattctcttgtatatccataagcgcttacataagggattataacagtctttcttggatttgggttagtaacattagaccatttcctatagtaatccataatttcatctattctacaatcaagaactggaccatgccctgtacaaatcatatcaatttctaaatctttaatcctatctaatgctttaaccatgaatggattcttaaaaggtccaataatgcaatcaaaataatatttaagagctcttaaatatccatcattatctgtaaccttacttagtagaattccatcaaaactataatgagaaccaaatgaatcacaagtaactaatgtcttatcttcttcaatataagtatacatcgtatcaggccaatgtaaatttggtactgacataaaacgtaaagttttgtcacccaagcttaaagtttcattttctttaactattattccattaaattctctgttaacaatattcttcaagaatcctatagcaacttggcttccaataatcttaatattagggtttatttcaataagtttttctatacttcctgcatgatctggctcagtatggtttactacaatatagtcaatatccttaatatcaactagcttatttagcgcctttaaatatccatctaagaacttagcctttgcagtttcaaataatactgttttttcacttgttttaagtaaataagaattataagaagttccaaattctgtttccatgataatatcaaatacccttaaattagcatctaatactcctgtccagtataaattttttttcaattctaatatctccatgtaaaaatccctccctagatatatttcgtccaaattagaacattatacaccttttttgtataacaaacaattaataatacctttaacatctttatactaatgtattttgtcatatatattatatataaattcttacatattttcataaaaacatataagatattgcttgtttcgttaattttagtatacatttataaattccaagcatactcacatactattttacttattcctctccaaatgttgtttatatatatctgaaaattcaatatttattttttctacacgagtattgattatattattacttatattaactttttctttgcttttatttaatacctttaccggaagcttaatcgtaaatttggttcctaccccatatttactttccaccgatatcgtgccatcatgcatctctactagcgactttacgagagacaggccaattccacttccttcataatttcttgtaaaagatttatctacctgcctaaatctatcaaaaataatatcaactttttcttccggaattcctatacctgtatcttctacagataaggttatatattcttctccatcaaatatatttacaaatatgcttccattatcatctgtaaaccttatgcaattagagagcaagtttaacataattctttcaatcttatcaggatcacaagcaataattttttcttcaacatcggtatcaaatataaggtttatattgttattacttatataactagctactgacacggtaatttcttctacaacacttacaatgttacaattaatcatatcaatctgaaaatgtcctgcatctaatttagttgaatcaattaaattatttattaaacgaagtagcctgaaacaattttgtctttcaatatctatattattaattatttttcctttgtcaatcggtttttctttatctaaaagatctctttttagaatttgtatcacacctagtattatattaagtggtgttctcaattcgtgagaaatattagcaaaaaattcagttcttaatttctctaattctaaagcctcttcttttgattttaattcagtattttttctttcagttatgtctcttacagttgcaataataaccttctgctcattaaatattactgcacgactattactctcaatccaaaactctttatgatttttatctattgaaatagcttcaagtgttactggagtattgattttacttttctttctatcattaatcaatttgagtatatcatcatatatgtacggtgaattttttgaaataatatcttttatactcataccaattagttcatcaggtagatatccatatagcctattagcagtatcattaactttaactataatcccattaaaatcatgaatcaatattgcatcacttaccgaattaaaaatagtgcttaagtaaacttcactcttctttaattttttatttgtttgctttaactcgtctataagcttaatatttttcattttcaattcatatgtctccaaggccctttttacggaaattaacaactcatctgcctctaatggttttaaaagaaatttataaatatgtccttcattaattgaatcaataatatctttcacatccatgaatccagttaaaataatacgaattgcatttgggacaatagatattgtttgctttaataattcaacccctgtcattcctggcatgcgctgatctgagataatcaaattgatttttttagaacatgattcatctttaagtatatttaacgcttcaaacccattttctgctttaattacatcatactcttcgtctaagagtcttgttaaagcctcaagatttgctagttcatcatcaattaatagtattgtatattttttatctttaccatctgttttattaagttctctaagcttgtccttatttataacaaatttcatttatcttctccttactgaaattaaaatattattttagattatggtgccttattgattttattattaatatctttagtaaggaatatgaatagttatagttgaaccttcccccaccttagattccacatcaatacttccattgtgtttttcaataataccatatgatatagacatacctaaccctgttccttgtcccattggtttagttgtaaaaaatggttcaaatattcttgatattgtatctttagccataccacacccattatcacaaaattcgattataatttctttgttattgtcaaaaacgcttattactattaatccatcattctcacacactaagtcattttgcttctcaactatagcatgacacgcatttacaattatatttaaaaatacctgatttaattgtgaaggatagcacactatcttcttattagtttgaaagttcttaataaatttaatttgtttagtatattgagttttaactaaccttattgtcgtttccaaagcttctgaaacatctatctcctttttaacagcctcatcaagcctagagaataatctcaaatcgttaactatagttgttacttgattagatccatctagaatattaattattgatttagaaaatttgttgaaatattgttcaaaaaaatttaacacatcatcatcctcattatccaataattccataagttcctctttaaaattgtataaatccatatccagaacttttgaacttaaatatatataattaatgggattattaatttcatgtgctacccctgccactaaagtgccaagactagccatcttttctgactgaatcaattttgcttgagctgatttgagcttattatgttgttcttctaattcagcaagagtctgcataagttgttttgttcttccattaactttatcttcgagttcatcattaactcgtttcaactcttcgctaatttttttacgttctgtaatgtcattccaaacaaatattatgcactctacgcagtcaatttcaattatttccgttgaaaataatccaactctaacttctccatatttagtattccaagttatctcttcattacgcaacatgcctccactatctaatatttgaatcaccttcaaacgatgttctttattttcccacaagttaaactcatcagaataatgaccaattatatcttcacgtttatatccaaaagtgcgtaaaaacgcttgatttatttcaatgtatagtttatcgctaagccttacaatggcaattacatcggcgctataattaaatgccttattgaatttctcttctgaagatttgagttcatttatcgcttcattcctctgctgaatcatattatataaattttgagccatattattaaatttaatagccacttcccctatttcatctcttgaattaataaataatctgtgattcaagtttccatttgatatctcatcagttcctatactcaactcatatatcgacttagtaacaatacgagaaacaaaactaatcgctaaccaaagaagtaaaaccattatcaaaatccttatgattgttgcaattatgtaattttcaataactcttgatttataataccttgtaatacctatagtgatttcacctattggtatttcatcttttaaaacattaactttctttataatcaaattttgctcagaatatatatcatcatttttatacttattgtatatttctccgttacctttagcttttacttgaatataaccaatttcttcatcctcaaataatgcatcactaatttctttaattcctacaatattcaaattccaaattggatcttgatagcttagtgccgccaatctagttattgtttcgactttctgcaatgaatccctatttatccctacaactagcattattattcttattatttcaaatattaacatggtaattataactactgttaatgttgaaattgtaaatctgcgcttaatcttcatattcctaaatttcttttttatgctcataactcaacccttatttacccatatgatttaatactggtatatactctttacttccaaataaatcttcatacttaaatcgtgaaatattatcctttgaaattataggcacacacggaccactttggaatggaaaatctattcctgccttttctccatttaaaattcttacaatcatatctagtgctattctgcattgttggatagtttgatctgatggagaagctaagacagctcccttttctattaaattgaaaacatcacttgtcatgtatgttgatacaattcttatatttttaaatttttccttatgtttagcaataaatttttcagcttcaatcactgctggagcacaaccaactaaataatcataatcatcattattttctaaaacacttgttatatgtaatcgctgcacatcaggtctagtgtctccataaaaaggattgctaatatctatcttttgatcatttttctttaaccttgaaactgcgtctttaaaaccatttaatgtatctgctgcccatcctgattcttttggcccaggaaaaaatgcaatttttatatctttccccgctgaatcttcaactaaatactctcctgctttatatcccatatcataataggaaactattgcttttgcgctaatatcaggagtattaatatcatttactagtgcaacaataggcttattattatgaacaatgctctctacatctgaattaaattttttattatctaatgtagcaaacactattccatcaattttatcatcctctgctaaatccattagctcctctttttgatttccaaactctatatatcccccaaccgcatataactttaccttcactcctaattcctttgcataatttattattccataattcgctgagacccaatattgatcttcaaaatgaggcagcaaaacgcctattgtatattcttttttaggcttaatatgcctccacttttcttttacaacgcctctaagatcaccctctttactatttgaagcagcatcaacattataatagctatttactattaatttttttttacctatttgtgtcaaaattctatcatcatttgtttctactgtagttatgctcttcgatactcgttctctttccacgtatttttctttttcttttccgacaatatcattagatcttatgtttttgtgattttctatatatactaatcccaatataaagactactgacgttatcaaaattgatagtcctaaccttctattgatatgttttctaaatttcgtagcaaagcacatccttactttcaagatctatatggagattatctgcagtattactttaatcgctattaaactccattaaacttgctattctactataatctttatgctatcttaagtttaatttttttactataatttgtcaaaacatactatatgacaatattctgcaaaatatattttatacttaatctaaataagaataaaataaaagcaccataccagaaattccagtaaacagtgcctttaaaatactatatatttaatagttagattttaataaattcattttttaattctttagcggctgcagtaatatcttcctttgctataatagcagaaactattgcaagtccatcaattcctattcctttgaaatccttaactctatccttatttattccacctattacaactataggtatagatacattttctctaatttttcttaattcattcatactagttgaatctgcgtcttttttagtgccagttgaatacatcgcaccaactcctaaataatccgctccatttttttctgcttcaagagcttcatttacagaccctgttgaaactccaaggattttatcatttcctatgacttttcttacaattgctgcaggaatatcactttgtccaacatgtactccagccgcatccactgctagtgcaatatccactctatcatttattattaatggaatattgtgtttatctgtaatctctttaactttcacagctgtattatagaagtcgagtgatgaacaatctttttctcttaattgaattaatgtacatcctccaattatagctttttctacagcttcttctaaagtttctgtactcattaaatctctatctgttacaagatagatactataatctattttaggtttcatgaaacttctctctccttcacattatattttagataagttcatatattaatgcgtgtatttcatttttatgatatacacgcaaacattgtttattatatttcctttatcttattcatcttttcaataatatcagaagtcaaattgcttatggcatctataattgcaatatgaaaacttcctgttccaatcttccctgctttatccaaagcaatttcacccgatattcccatggaaataataccagaaactgctcctataaaataatctgaacctgccccacaaaacgctccaattaatgcagttgtcatgcagcctgttcctgtgacattagataacatcttagttccattttcaagtataactactctttctccatcagatataatatctgttgcccctgtaatcgctacagtacactgaagctttttagctaaacttttagctacgtctactccttcatcatttcctgttcttgcatcattttctgaggcatcaacccctttagttgtagagcccaatccgcttataaatttaatctcagacatatttccacgtaaaacacttattttcacttcttctaataatctctttgttgttgaatttctaaaatctgatgctcctgctccaactgggtcaaaaacgactggaatatttaattcatttgctttcttaccagatgcaatcatagattcaatagttcgctcatttaatgttccaatatttattacaagggcagatgaaatcttagtaatatccgctgcttcttttatatcatcagccataattggtgatgcacctattgcaagtaaaatattcgcacaatcattaactgtaacataatttgttatattatgtacaaggggtttcttattcctaacttcatttaataaacttcctattttaattgatatttcattactcataaatatcttttagtaagaattcattcttttaataattctcactaaaatacctcctctcaaaagtaaaaatttttcaaacttattttgcttgatatctatgttgaaattatgaacttgtatttaaaattttaataagacaagtgctaaattaaaataatactatagaaatccaatttcaacatatataattataactcgtatagatcttatttctggtcaaaaagctccactttatcgccatttaaaattctgttagttgttcttactgcacacattttcccgcacatagaacagctatgcatatcttctggtggtacactttcaaaatattctctagcctttttcccatcaatagcaatcttgaacatctcttcccaatcaagtttttgacgagcatctgccattgcattatctctatctctagcccctggaagtccattagcaatgtctgctgcatgagctgcaattttagatgcgataattccttctctaacatcagataaatcaggaagtcttaaatgctcagctggtgttacatagcaaaggaaattagctccatgtgttgctgcaatagcgccaccaatagctgaagttatatgatcatacccaggtgcaatatctgtaacaagagggcctagtacatagaaaggtgccccatggcataatcttttttcaatttgcatattagctacaatctcattcattgccatatgacctggtccttctatcataacttgtacatctttttcccaagctctttttgttaataatcctaactctataagttctgtaatttgtccagcatctgttgaatcatcaatacagccaggtctcatagcatctccaagacttattgttacatcatattctcttagtatatcaagtaattcatcatagtattcataaaatggattctcatttcctgtcatctccatccacgcaaatagtaatgacccacctcttgatactatatttaatcttctcttatcttctttaaatagcgaaactgttcttttatttattcctgcatgaatagtaacaaaatcaaccccagctttagcatgagctaacactacgtcaagaaaatctttagcttttatatctaaaagatctttttcaaggtatccaattgcatcatacataggaacagttcctatcatagctggagaatattctataagcttttccctgaactcttgagtcttcccataattacttaaatccattattgcttctgcaccaaaatcaattgccatttttactttttccatctctctgcaataatcaaccgaatctcctgatatccctaagtttacatttatctttgttcttaatccatcaccaatcccctcagggctaagtgatttatggttgatgttagctggtatagctactttaccttctgcaacaagtttcattaatttttcttctgaaattctttctttttccgctactgttttcatttcctttgtaactataccttttttagctgcttccatttgtgttttataattcatttctttccctctcctcataccattattatttaatttattagttataaaacttaacttgagttatatagtattaattgataactacctgataaatacttctaaataaaatctcaaagattattcaatcattcctgctttcttatatagctcgtaaaaatgattagtagggcctacacctttaccaagctcaaaaccatgttcgattgcacatgttatatactctttaccacttctaactgcttcctctattgtcatatttttagctaaatttgctgctatagttgaagataaagtacatcctgttccatgagtatgggtagtatttatcctttcttgttttagaataagaaagttctttccatcatataacaagtctgttgcttccccttctaaatgccctcctttaactaaaactgccttcggacctagttctttaagtttcaaggccgcttccttcatttcatctaagttttctattttcatccctaaaatttcttctgcctctggcaaattaggagttattaatgttgctaatggaaataattccttaactaaagtatcttttgaatccttcgataacagattaaatccacttttagaaatcataactggatctagaactatcactggtagtttctcaacttttttcaaagattttgatatagcttttatagattcaattttagagaccattcctatttttatggcatctactcttatatcttcaaaaataacatctatctgagattcaatcatttcaggatttatatcttgaattccaaaaacccccatagtattttgagccgttaccgctgtgataacactcatcccatatactccatttgctgagaaagcttttaaatccgcttgaattcctgctcctccacaagtatctgatcctgcaatagttaatgctctaaacataaactcatcctttcacctgtaatatttcatttaaatcttatctatgttattagtttcctctctttttacttgaaactcattatctactagtatttttttaatgacaggaacttttacaaaaaagtaagctataatcgctccaacactacaacttgatataaacggaacaacatatacaaaaattgccacttgttttcctaacaccattgtagctataggataagctaataatgctcctaatattccagttccaattatttctccaattactgcaatacccggctttctaaattttttataaagaattcctgcaagcaatgctcctaccatgcttcctggaaaagccaataaacttcctgttcccatgaaatttcttattagagatgtcacaaatgcattcataagagcatataatggcccaagtgttattgctccaactacatttacgaaatgttgtattggagatattttagcagctccaatcggtattgaaaatgttccaaaaataacagaaataccgattaatacaccacttagtgccatcttctgtgctttactcttttctttcattaaaaatcactcctttaataataaaatcaataaacttaatttttaatgtgaaataaatttgctaaatcacctttacaatgacgtttaaattgattaaccttaaaagaagttaattattttgcataaaaaaaatgtatccacaagggatacatcaataaattatgcacaaatcatatcaatacttacacaaataatattaatatacttccctacgctggtattatccaaatcaggttataagagtctaggaaatcaatctttccaatctcagccaaaatattagctcccctagttattcaattataaaattttctttcacaatttaaaggttataccattaagtttcaaacgtcaagtatattttattattttgctttattcaaagcatttgttacagcactcatgatacccttcgaactataagttgccccagatacagtatctactgatgttgattgtttcgaaattatacttttagttatagttccttctactctttgataaaactttggagtatcttgattagatatagcttatatactcgatattttcccatccgaaacagtcacagaaaccttagttgttcctcctctatagcctgttccacttcctgtgtatctccctctttatattctaaatatttgctgatatttttaatcaattgaacaagaagatattctaaaaaaagatgttacaaaatataataattatttttctacattctaaccctaattaaacgcttagattactatagttttaaatataaatttattattgcaacgtgtatagtaaatttttttacgtactgaattcctctatatcatttattactaataaatttaaaatatttcttaattaagtgatatactaattttaataactattatagaaagaaggatcaatatgataaaaatagtagccaaaagcgttatcaaaactgaacaaatagaaaagtatcttactcttgcaaaagaattagttgataaaagtagaaaagaagaaggctgtatctcatatggcttgtttcaagatattaatgatagttctatacttacctttatagaagaatggcaagacgaaaaagcaattaatttgcataataatagtgagcattttacaagaatagttcctttactaggtgagcttcgtgtaggcaatggggaagtaaatttatacaaagaaatataaaaatactcgcaagtatttatggataatttaaatttactgctgaactccagaaatggaatatatgcgtttgttccggttctttgaagattttgctggattattctaagagcacaagttgtacccaaagtgctagcctcaaagcaaagctttgaacaagcacatttgcaacaacttctactctaagaatcatagccagcaaactcttctaatgaacactgcacaaaagcatatatcccatttctttgcacttaggagtaaatttaaagtaagactatatccatgcaagtatttttatatttctgcggttagcaaattgggtatattaaaacatatatttctaattatgatatataactttaatcttactttaggcatctagtgattcatcctacccagcatacatgcattatttttttccaaaaacctgttctttaagctttagtcctgttttagttacagctattccacccaaagctgtttccctaagtgattctggcaagctttttcctaccttatacatagcacttactgtatcgtcaaatggtatttttgaagctacacctgccattaccatatctgccatgcataaagcagttattgctccttgtgcatttctcttggcacatggtatttcaacaagtcccgcaactggatcacaaacaaggccaagtacatttttaattactatggctgctgcatctaaactcatctcaggagttcctcccatcatctcaacaacagcagctgctcccattgcggaagctgacccacattctgcctgacatccaccttctgctcctgctagtgttgcatttaatccaataatcattcctacagcagctgcggcaaataatccatttatgagtccttcttcatctaacccaagtttttctccagcacttaaaattactgctggtaatattccacaagaaccagccgttggacatgcaactatcttacccatagacgcattaacctcggatgaagaaagtgccatagccatagctatattagttacgtcacctgtcaaagtttttcctctcctagcataattatgtatcttaaaagcatctccaccaattagtccgctaacagaatagacttctttttccattgcctcattagcagccgagatcataacgctcaaatttttcctcattttctctattacttcatctcttgacaatcctttttcttctacttcatatcttattgcatattcacttaatgaaatattatgtttttcacatatttctaacaattccatacctgtttttgcaaacatttttattcaccttcctttgctgggcttattgagattacattatgtactaattctatttttttaattttctctattaaaatattattcactttattgtccatctcaaaaatcattatagcttcatgccctttttgctgcctaaaaactctcataaaagctacatttatattttcactatataatatacttgtaacgctattaattacgcctggcgcatctttatgagctattattaaagtttcatacattccagtaaaatcaaccttattattattaacttctataacctgaatatttccaccaccaattgatgatcccataacttcacaatacttcccatcaactgttttcataatgaattttactgtgttaggatgaacatcccctaattctgcctccttaaataaaaatttaacacctttttcttttgctatatccatagaatacctaagtttttcatcgcttggttccattcctaaaataccagcaactaaagctctatctgttccatgacccttatacgttttagcaaatgaaccatgtagtaaaaatgtcacctctgatacatctccacctgctatactccttgctatcttcccaagtctcgctgcacctgctgtatgtgaacttgagggtcctatcataataggccctaaaatatcgaaaactcctatccctttcattttgagaaatatcctcccttttatttattatatatatcattagtttttctttattaatatatttatactcctagctttttctacctaaataatatcataaatttgattgcatatatatgtttcaatttagtttctacatattaatcttaaattagcacttggcctactagaaatttaaatgtaattattattagatcttatactttataaaatataatccataataaaagcatcatcaatattaaatattgatgatgctttaaccaaactttcattagtttctatttttcatgtatatttcttgtcgcaactatatcaacgccagttccaagaacatcttttattacaacatctcctattttaacaggagcctttattgttactttatttatttcttccatacatttgaaattaagtcctttaggaattggattatttgttttaacaggtactactggtaattctccattgtctactttaacagtcgaagttattactcttactggatttgtaacttcatttattccatactcaatacctctattacagccattaccttgtacacttttattttcagcatctacttttaaatgacatcccttagggcaacatatacaaattaattctttttccattttattcaccatcctctaatgatattgttatatcacctttaactttctctaatagcaccttacttaaaactactttttccatttctgatggtgctaagtgagctcttttaaatttagctataacttcatcattgcatcttacaactaatgccttattatgatatatgttatttactctcataaatacagttagtttatcatcaacagcttctgcattaactttttgtggcactgtataatttatatttgcaccatttattatgtttacatatttgtctttcttaagttcacccttaatgtatttagcagcagaaaaacctgcgtgttttgactcttgagttacaaaatcaactaagtcatgaacatgaactacattaccacatgcaaatattccttctactgaagtttccatactctcattaacaattaaaccattagttcttctatcaggttcaagtcctgcattaaatgatatttcattttctggaattaatccaactgatagtagtagtgtatctacatcaaattctttttcagttcctttaataggtctcttattttcatctacttctgctattactactttttcaagtctcttatctcctacaatatctacaactgtgtgtgataaatatagaggaatatcataatcatttaaacattgcactatatttctgtttaatccatttgaatatggacacaattcaactacagctttaactttagcgccttcaagagtcattcttctagccattataagtccaatatctcctgatcctaaaataagaacttctttacccggcatatatccttctacatttatatatctttgggctgcacctgcattaaatacacccgctggtctatcgccaggaatatttatagcacctctagttctttccctacaacccattgcaagaattatagctttagccttaagttccatatatccttcttctgtatttattgcataaacagttttatcttttccgatttctaataccatagtgtctagtttaacttcaacattagtatcttggatcatttcaatgaatcttcctgcatattctggtcctgtaagctcttccttaaaagtatgaagtccaaaaccattatgaatacattgatttaatataccacctaattctttatctctttctaaaattaatatttttttaattccactattatatgcttcatatgctgctgcaagaccagctggtcctccacctactactattaattcataactcataataacacctcatccttctattttgtcttacctaataatatatatgaacctgatttttcttgaactacatcttcgagtgggacattacattctcttgctattatttcttgaactcttggtccgcagaatccaccttgacatcttcccattcctggtctacatcttcttttaatactatctaaggatggtattcctatacttctctttattgcatctacaatctcaccttctgttatgctttcacatctacaaaccattcttccatattgcggatttttctttattaattcagctttttctttagccgataattccataaaatgaatttgttctctttttgccttaaaatctgattttttatctaacttacatcctgcttctttcaatatttctacaacatcaagagctatagctggtgctgaagaaagacccggtgatttcattcctgcaacatctatgaaacctttaacttcatcattttcttctactataaaatcccctgtatctggattagcacgaagacctgcaaaactccttattatttctctaaaattaactttattagttgtacgcattgaagcatctcttacttcatttaatccttctgctagtgttccaacatcgtctttatcttctatatctctggcatcaggtccaactaataaatttccatgaacagttggagtaactaaaaccccttttccaagttttgatggacattggaatattgtatggctaactacatttccctgagttttatccattacaaagtattctccgcttcttggtactatcttaaagctttctttacaaactaaattatgaattttatctgcataaagtccagctgcatttattacaaattttgattctattatttctccatctttagttgtaattttgaatgtatcatttttttctattgcaataacttctttttctagcttaatttctcctccattagctactgcattttctgctagtgcaattgtatattcaaacggacctactataccaccagttggtgcatataaagctccaaaaatttcttgattaaggtttggttccttttctagaacctgttctttacttaaaatttgtaaatcttttacgcctatttttgttccattttcataaagagcttgtactgttttcatatcttcatcgttaaaagctattatcagagatccgtttctcttaaaaggtacacttaactctttgcaaagatcttcaaacatctcatttccagctacattatattttgccattaaagtaccttctttaggatcatatccagcatgaactattgctgaatttgctttgcttgttcccatcgatacatctttttctttttctaaaacaactacttttaaattatacttagttagttccctaaaaatagaatttccaataacccctgatccaattattgctacatcatacatattacatcctccttattaatagcgcataaaaaaagtcaagctaaaaacaaggtgtaatccaccaacgttttcatgcttgactctatattctctcagcatttattttaaattatatatacattatatcatgtaaatgtatacttgtctactatttactctgaattttcaattttactttattttcaaataccattttaaactatgtaccctagatgtcatcaacatttagggtacattataatgctcaaatcttgtgattaacttagactaatcttgaataataaacacttatttaagtataattctattcctcttcccatccttctgctctcttaactgcttttttccatcctttatataacttttccttcttctcttctgctaagtttggagaataagactgacttacagcccacttttcagcgatttcttcttttgattgccagaaacctacagcaagtcctgctaaatatgctgcaccaagagctgttgtttcagttataataggtcttacaacctctgcccctgttatatcagcttggaattgcattaataaattatttctacttgctccaccatcaactttaagtcttgttaatgtacatcctgcatcctcttgcattgcatctataagatccttagattgatatgcaatagattcaagagcagctcttattatatgatttctattagcacctcttgtaagtccgaagatagcgcctcttgcatacatatcccaatatggagctccaagtcctgtgaatgctggaacaacatatactccaccattgtcttctactttctgtgcaaaatattctgtatctgctgcatcagtaactaacttaagttcatctctaatccattgaataacggcaccaccaacaaatactgaaccttctaatgcatattgtacttttccatctataccaactgcaatagtacttactaatccatttttactatgaatcattttttctcctgtattcataagtaagaagcatcctgttccataagtatttttaacactaccttcttcaaaacaagtttgtccaaatagagcacattgttgatctcctgccataccagctattggaactctaacacctcctgtgcctccaagatttgtatatccataaacttctgatgaatttttaacttctggtaacattgattttggaatgttaagcttttctaggattctttcatcccatcttaattcctttatattataaagcattgttctagaagcattagtataatctgttacatgaaccttaccatttgtaagtttccaaactaaccaagtatctactgtaccaaataataattcacctttttctgctctctctctagcaccttccacattgtctaatatccattttattttagttgctgaaaaatatgcatccaaaagtaatcctgtattttcttttacatattcactaaattctttgtctagtttaagttcttctattataccggctgttcttctgcattgccatactattgcattgtatactggttctccagtatttttatcccaaactattgttgtttctctttggttagtaattcctattgcagctacttcttcttgagttatattagtttttgcaataacttcttgtaatacgccatattggcttgcccatatttctaaaggattatgttcaacccatccttggtttggataaatttgagtgaattccttttgacttactcctaatatattttgttccttatcaaagattatcgctcttgaacttgtagttccttggtctaatgctattatatattttttcatacaaaacaccctgctttctaatatttatatattctaatatttacctagaaaaggttaaatttattatttatattttaggaaatgaatttaacaaatagttgacctaaaaaattgagttagtgttctagaagtaattttagcgacaattaaagccacataaaacatccatttatacagaagcaataatatttatctttactgcctcgtacaaatttaaaatttacttagtccattaagtgtttcccaagtaaattcagttttatgtggctttattctctaattctcttcagcctacatattccaaatttcttttttagttgtagatacgcatgttgctcccgaatttaatgcctgcattacctcttccttagtttcaattagtcctccagcaacaactggtttgctagaatattttgaaataatttcaattacttttggaattattcctggaagtacctctattgcatcacattcggaaatcatatggctttttacattgtttaaagaaagtgtatcaaatataaaaactctttgaactcctaataaattatactttttcgcaagttttacaacttgtggctttgtactaattattccactaaatttagtttcttcttttatatactttacaacaatttccttattcgtaaatccttcaaccaaatctatgtggattatccctattttatttttagatgttataagttcacttatccttttaatactcattacatccccaaataaaacaaatataatttgagcctctgaatctaacgcctgatctaattgttcttggttttttactgccgctataattggattttcttctaataactcttttatattcattggccctcccatgtaattgttttcttttttattcttagtattacatacttgtttgcctctgtcaattctaactattaattaacttttataatattccatgtaacattacataaaataatgcagctaaagttcctcccacaattggtgcaacaacaggaatccatgcatatccccaattggaatctcccttatcaggtataggtaatactgcatgtgctattcttggcattaaatctctcgctggattaattgcatatcctgttggacctcctaaacttacaccaatagacaaaattaaaaatgctacaaacaatgttcccattccatttgatagcttttgatctcccattcctaaaattgcataaactagtacaaatgttcctacaagctcacttataaaattaattgtagtattctttacttgagggcctgtacaaaatacaccaagcttgcttgctttatcatcagtggctttaaattgatcattataaacaataaatactaaaactgctcctaaaaatgcaccaatacattgtccagctaaataaatcggaacttgagcccacgatactttacctattgctgctaacgcaattgttaatgctggattaaaatgagctccactataacttccaaaaatcaatgctggaattcctaccgcaaaagcccatcccattgcaattactattaatcctgatccagatcctcctgatttttttaatacgacattggctacaacaccatcacctaatagaataagtaataaagtacctactaattctgcgaaaaaaattgtcataacattatctcccttctacttcacaatacttgtttgttttttaacattttagaacggttaatattactagaaaacaacacattacataatattcataatttattttagtatgactaatttaatttaaaagttttaaatcaatgtacatccagtaatttgggcataagtatagccacataaaactccttacattttaaacaatcatatatttctaactgtttaaaacataagttttaaatttacttggtaatcataagatttcctaagtaaacttagttttatgtggctttattctctatttctctatagcctacatttctaaaatcttttcagaattgcaatgtaattgttttcttgttagatttagtatcacatatttactttatagtgtcaagcttagttaataatataacaattaaaatcaatacatattatttgctcattcattcttaattacttgactgccaatgcatcttatttcatacctaattattgttccttattttcttcttttaatccttatttttacaatcaaacattgttaatattttatctattataaatttatcttaagaacacaagaactatagataaatgttcaaatttatctatagttctatataataatattagtgaaataacatacttaatttaatattcataaaaagctgatcctccgataaattctcttaacagagaattctttggcacttcatcaacattaatctctttgaaaaagttcaaaaacgattttaatcttatagcttctgaataaactgaactttcttccgttatttcatctagctcttttaatgcatatggctttaaaacgccgagttcataaaccaatgtagaattaaatgctacatccgcaccttcttgataaacaaatatattatttttttctcctttctttatagatttccacatttttaaagtttcttccgccttatatcctcttgataatgaatctctaactattcttctcacctttcgtacatctgttgtagaaattctattatgattatctatatttagctgtgtcaatgctgatatatatattttaaatacattcctatttaaattgcttgaaattaaatttggatttaaaccatgtatcccctcaagtatcaaaactccatttttaggtagtttaactttatagtcattccattctttttttccagttttaaaattataagtaggaagatccacttcttctccactcattaacctttccaaattatcattcaacaaacttaagtccaatgcatcaatggattcatagttataatctccattctcatctttcggcgtttcttctctatttacaaaatagttatccaatgacaatggtataggtattaatccattcactctcaattgtatacttaacctattcgcaaaagtagtttttcctgaggatgatgggccagcgataagtataatctttacatcttttctatccaaaacgtcatcagctatattagctattttcttttcatgaagcccctctgaaaccataattatatttcttaattcattgttaagcactttttcatttagagtcccgacatcttctattcctaaaatgtttagccatctttgagtctctataaaaatttttgttaagctcttctcttctctaaattcagctagttcgcttagattattctcttctggtctctgcaaaatgaatcctgattcatacttaaatacatcaaatttatttatgatgcctgttgaatatcccataggaccataaaaataatcataccttccttcaagctcataaagatgaacatgctttatatcacaatactttaaaagcttaactttgtcgtccatcttatatccttcaaaaatcttaatagcttcttcttttgaagttctcatactcttaattggcacatttctatctattatttcttgcatcttaacctttatcttatcaatttcacctttacttaatggattttccttatgaacttctccatatactgccttacttatagcatggtctattgttatctttgattctggaaataaatccaatgctacctttataaatataaactgtaaagttcttgtgaatattttcattcctagttctgtatcaaaacctattaattctacttccccatcatcctctattacctcagttagttcacaataccttccatttagtttgcatatagctatatctttaaccctgtctttgtaagtatccataattaactcataaaaagtcagtccttttttagctttaattttcttatctttaaattcaatccctctacactccatactattcaaacctttctttatataatttgattatcccgttagattttaatttcacaatttgaaaattaagctttccgtctctgcaaagtctcttattctaattgtattcaaatatttgggtaccataataatcatttcaaatatattatatacactatttccaaaaaagataaacttttttattaagtccataaaataaaatactaatcctaaactcaccattaaatattcttatatttagcataactgcttttttctatggtgaaatgatcttaattgcagaaaagttccgtattgtagcacagctactctttttataagtgcatagctgctttttctttaggtgtgtatattaattttatttttgcaaatattattttcgaggtgattttttaatgtttgtagtatcaatcagaactgctattttatatttattggttgtattaaccatgaggttaatgggaaaaaggcaaataggagaacttcagccttatgaatttgtaataactattatgatttcagatttagcttcattgccaatgcaagatacaaggctaccattattattaggtattataccaattataacattgctatttttaaaaacgcttttaacccaaataggattaaaattccaatatacccgaaaactcgtagatggagaaccttgtatattagtacataaaggaaaaattaattactcaacgctaaaaaaacaacaattaaatatagatgagttactagaagagttgcgacttgccaattattttaatcttgatgaaattcaatatgcaattttagaaaatgatggtcaaatatctatactaccaacaaattacaattcttctaatacatcaaattcagtaaataatattcaaaatactgaagcaaaattgccgaaagtattaatttccgatggtgaaataaataaaaattcactaacttccatggataaagacgaagaatggatatctaatatgttgaaaaagcataatattcaatcaataaaacatgtccttattgctttatatgatacgaaaggtaattttaaatatcaactttttgataaatatgaaaaggaggatacgaaatgagaaatgctataatatcaatacttttgtttctcctaactatgtcatgcgtatattttttaaataagtctgtcattagcttatgcgataaaattgaaatgcaaactgaagatatcgaaattaatatcgcaagtgacaaaatggaggatgcctattatcaatctcttgaattattaaatactattcaagataataatattttaacatctctttatcttagtcatcaagaatttgataatttgctaaatgaggctttaaagttatctacatatcttgttcataaagattcaactgaagcccatacatctctgcatttagtaaagcataatactgatcatctaaagaagctacaaactccaagtttcgagaatattttctaataaaactttgacattagatattttattatatcttacacaaattttgcatatataaacattcattttacttgcagaattatgcatcacaataatttatgcataaaacttagtattatttgcataaattattgtttttctgcataaactttattttttaatgcatatttttaatattttaatgaatattttttcattttatacttgattattcttttataaaactgtataattataaacatcagttaggcattataaattagattaattttattgattatattcgagaaaatagcattgcatgtatgtttatgcattttatatgattatttaggagggcttttaaaatgataaaatataacaaagtagttttagcttattcaggaggactagatacatcaattattatcccatggcttaaagaaaattacgggtgtgaagtaatagctgtatgcggaaatgtaggacaaaaggacgagcttgatggattagaagaaaaagcaataaaaacaggagcatcaaaattatatattgaagatttaactcaagagttcgttgatgattatatcctccctactattcaagctggtgctatatatgaaggtaaatatcttcttgggacctcatttgctagaccaataatcggaaaaaggttagttgaaattgctaaagcagaaggagcagatgcaatttgtcacggatgcacaggtaaaggaaatgaccaagtaagatttgaaatggcagttaaagcatttgctccagaaatgccaataattgccccatggagaatttgggatattaaatcaagagaagatgaaatagattatgcagaggctaaaaatgttccattaaaaatcaaccgtgaaacaaattacagcaaagataaaaacatttggcatttaagccatgaaggtttagatttagaatttcctgaaaatgaaccacaatatgataaaattttagaactttgcaaaactttagaggccgctccaaatgaggcaacttatataacattatcgtttaaaaacggaattgccgttgctttaaatggtaaaaaaatgaacagcgttgaattactagatgaattaaacaaaattggtggagaaaatgctattggtataactgacatggtagaaaacagacttgttggtatgaaatcaagaggtgtttatgaaactccaggtggaactattctttataaagcacataaaaatctagaagaactttgcttagacaaggaaacagctcactataaagagcaaattgctttaaagtttgctgatttagtatataacggtcaatggtttactcctcttagggaagcattaactgaatttattaataaaactcaagaaacagttacaggagaaataaaattaaaattatacaaaggaaatattgtcaatgccggcatgactagcccatactcactatatagtgaagaatatgcaactttcggagaagatggagtatacgatcaaaaggactctgctggattcattaatctatacggtcttccaacagttgtaaaagctaaaatgcaagaaaaaattaagaaagaggaaatgtaatgaagctttggggcggacgattcaaaaaaggcactgacaaattagttaatgattttaattcttctataaatgttgatagcagaatgtataaagaagatattgaaggcagtctagctcatgcttccatgcttggaaatcaaaatataatttctaaggaagctagtgacaggattacttctggtcttctagaaatattaaaaagaatggataatggagttatagaaattgatgaaacttctgaagacattcatagttttgttgaaggtactttgacatattacattggtgaatatggaaaaatgcttcatactggaagaagcagaaatgaccaagtaactttagatttaagattatatttaaagaaagctataaagtcattacaacaagatatcatagctttagaagaagttcttttggaaaaagctaatgaaaacataggtacaataatgcctgggtatactcatatgcaaaaggctcagccgattacattcgctcatcaccttttagcttatgctgaaatgtttaaaagagatctaggaagactttctgattgctataaacgtgttgatgagatgccacttggatctggagcactagcaacatccacataccctattgatagagaatctgttgctcgcgatcttggtttttcaaaggttacactaaatagtttagattctgtgtctgatagagattatgctattgaaacactttcttgtctttcaatgataatgatgcatttatcaagattttcagaggaaataattctttggtgtactaatgaatttagctttatcgaacttgatgatggttatagcactggaagcagtattatgcctcaaaagaagaatcctgatgttgcagaactagttagaggtaagactggtagagtttatggagaccttatgactttacttactgttatgaaaggaattcctctcgcttataataaagatatgcaggaagataaagaagctctatttgatggattagatacagttgttctttcacttaaaactttctgtggaatgattaaaacaatgaaagttaagaaagaaaatatgagaaaaggtgctggtcttggatttactaacgctactgatgtagctgactacttagtaaaaaaaggtatgccatttagaaatgctcatgaagtagtcggagaaatagtccttcaatgtattaaagataacaagatgattgaagaattaactatggaagaatttaagaacttctctcctacatttgaagaagatatttaccacgctatagatttacttacttgcgtagaagagcgtaaagttataggcggtccttctacagaatcagtgaaaattcaaattgaagcattaaaaaattttatagcagaaaataaagaagtttaattaagatcagtaattataaagaaaaaaatcaatattttttccttgtaataatagcagccgtaacattctcagataacggctgctaagtcttagactaaatactccttaagtgtatattaatatcccttgaggtataggtttaactaagattcagatggaaatccccatctgaatcaagttctacttcataaaaactttcaattgtctatgaaatttctaacacgaaattttatagacaattgaaatactatagttaagaattaacatacaaaaatcaataatattattttgcaataatcaaataaacaagggggctatttaaaattggttaaaatcggaataattggtgccacaggatatgtaggcgctgaacttttaagattattattatctcacccaaatgttgaagttgcagctttaagttcagtttcttttgaggggcaagagattagcaatatatataaaaattttttaagcaaaacaaatctaatttgtgagtctgcacatgatgttgttgaaaagtgtgatgtaattttcaccgccctacctcatggattaagtgaagatattgctaaaaaagctctagacaacaagaagatctgcattgatatgggtgctgattttagattatctagcgaagaagaatacgaaaagtggtacggaaaaaaattcacacaacctgaaatacatacagatagtgtttatggacttccagaattaaatagagataagatcaaagaatgttctttagttgctaatcctggttgttatccaacaactatagaattagggctaatgccgttacttaaaaattcattaataaaattagataatattatttgtgattctaaatctggaaccacaggcgctggaagaggattaactttaaatactcactttccagaagaaaatgaaacttttgctccatataaagtaggtgctcatagacatacacctgaaatcgaggaaacattatctgctatggcagaagataatgtaaatgtaacatttactcctcacctacttccaattaatagaggtatagtttcaacaatttactgcgctccaaaagataaggtaaatcttgaagaaatccataaattatatacagagttttataaagatgaacctttcgtaaatgtactaccacttggtgatacagcatcaataaaaaatgtacgattaacaaatgactgtcatatatctctacacttaaatcatagaaaagatcaaattattgttgttagtactatagataacatgattaaaggtgctgccggacaagcaattcaaaacatgaatataattttaggttttgatgaggcagaaggtttaaatttaattgcaccagctttttaattcatatcatttttaaataataaaaactttaacagatttcattattaattatgcattgtgcatcgagcactgtgcattgactaagggggttataaatttggatataaaatatatagatggcggagttacagctcctaacggtttcttagcttctggggtacactgtggattaaagccaggaagcttaaaaaaggatttagccttgatttattcggaagttcctgctgccgctgcaggaatgtatactaaaaataaagttaaaggtgctcctatttatgttacaaaagagcatttatcaaacaaaaaagcacaagcaataataataaatagcggtaatgcaaatacttgtaatggtgatgatggtttaattaaggcaaagaaaatgacttcattgcaagctaataaactaaacttaaaaacagaagatgttttagttgcatctactggagtaattggggttcctttaaatatagatgctattaaagacggtattccaatgcttactgaaaagttatcaaaggaaggtgctaatgatgcatctttagctataatgacaacagatacttttcaaaagcaactagctgtagaattttatataggtgataagaaaattactatggggtcgatggcaaaaggttcaggtatgattgaaccaaacatgggaacaatgctttctttcattacaactgatctttctattgctccagaattactacatgaagctctacaatcgagtgttgggataacttataacagagtcagcgttgatggagatacaagtactaatgatatgatattaattttagctaatggcttagctgaaaatcctactataactgaaaaagatgaaagttatagtactttcttaaatgcccttactgagttaaatacaattatggctaaaaatatagctaaagacggtgaaggtgctacaaagttattagaatgtcaaataataggtgcaaagaatgaaaaagatgcagttgttttaggtaagagtgtaataaactctagtttagtaaagactgcaatgtttggtagcgatgcgaactggggaagaattctttgtgcacttggatatgcaaatattcatttcgatcccgaaaaagttgatgttgcctttgaaagtaaggctggctcaatagaagtttgtgaatctggcagttctttacccttcgatgaagatattgcaaaaaaggttcttagcgaaaatgaaatagttattaaagttaacttatccttaggtaattatagtgcttatgtttggggctgtgacctaagttacgaatatgtaaagataaatggtgattacagaagttaatcttaaattataaataaatatattttaaacttattccgatgtacagttcttaatatgttaattatgaactgtacattctaaattgactgggggtattaacttgttgaatcatactgaaagagcagaagtcttagttcatgcactaccttatatacagcgttaccgtggaaaaataatagtggtaaaatacggtggaaatgcaatgataagtgatgaacttagagaaacagtaataaatgatattatattaatgaaatgtgttggaatcgaaccaattgtagtacatggtggcggtcctgatatttcagatttattaaatagattaaatcacaaaagtgaatttattaacggcttaagatatactgatgatattaccattgaagtagttcaaatggttttaggtggaaaagtaaataaaaatttagtttctttaattgagaaatttggaggaaaggccattggcttatgtggaatggatggctctcttttaaaagctaaaaaaatagaatctgataacgacttaggatatgtaggtgaaataactaaggttaatacagaaatattaaaaactaccataagttcaggatatatacctgttgttggtagcgtagctttaggagaagatgataataaggcatacaatataaatgctgatacttgcgcagcaaaaattgcatcagcattaaaagctgaaagattaatactgcttactgacgttccaggagttatgaaagatccgaaagatatatctactctaattagcacattaagattacatcaaattcctaaattatgccttgaagggataataaaaggtggaatgattcctaaaattgactgttgcgttgaagcaattagaatgggtgttgaaaaagcaactatccttgatggacgtgtacctcattccattcttttagagttattctctaatgaggggatcggaacaatgatttattaatcaaaatattttagaaacttcaaataaatttctctaataatagttaatgatctaaagcttatactagatattattaactattgaataatttaaagggggcaattttatgtcatatgattttaacgaagcaaaagaacacgttgttaatagctatggtcgcttagatcttatactcactcacggcgaaggtgtttatctttatgaccaagatgaaaataaatatttagattttacaagtggaattggtgtcagcagcttaggatatggacatgaaaaatgggttaaagctactagtaatcaattaaaaacacttgctcatacatcgaacatatttcatactgaaccaagtttaaaacttgctaaagaattaactgaaaaagccaacatgcgtaaagtcttttttgctaattctggcgctgaagctaatgaaggatcaattaaactagctagaaaatacagttacgacaaatatggtgctggaagaagtaaaattcttactctaattcaatcatttcacggtagaacaataacaaccctaaaagcaactggccaagagaaatttcataagtacttttacccttttacagaaggttttgattatgtaaaagcaaatgatatagaagactttaaagctaaacttacagatgatgtttgcgccataatgcttgaagcaatacaaggtgaaggtggcgttatcccacttgatacaaaattcgttcaagaagtagtaaaagcatgtaacgagaaagatgttcttgtaatattcgacgaagttcaatgtggtataggtagaacaggtaagatgtttgggtataataatttcaatgtagaggctgatatagtctctgtagcaaaaggtcttggtgcaggacttcctataggcggaatactttgttcctctaaagttgcagatgtattcaaacctggtgaccatggctcaactttcggagcaaatccagttgtatgttctggtgctttagttgttcttgaagagatttgtaatgaacaatactttgagaaaatatataaaagaggattatttgtaagagagctaatagatgaagctaaaaatcctcaaattgtagatgtacgcggtatgggattaatgatcggaataaaggtgaaatgtgatcctgctctagtacaaaaagaagctataaaaaagggattgttagtgcttacagcaggtaaagatgttgttaggcttctcccaccccttactataactgagaaagaattaaaagctggtatagacattattcttgaaattttatctagccttaattaaatcttaatttggcatgaatatgatctttatcacatcttttgaattttccccttaactgctcatttttcactttcttattgtttggaggcatatatttatgaaaaaagatttattaaaaatggatgatctttctaaagaagaaattctggatattttaaatttagcagatcagttaaaatacgaacaaaaacatggcatagaacatcatcaccttaaaggtaaaagtttaggtatgatttttgaaaaatcatctactaggaccagggtttcctttgaaactggcatgtatcaattaggtggaaattcactttttttgactgatagagacatgcaaattggtcgtggtgagccaattgaagacactgctagagtcctttctagatttatacaaggcataatgattagaactttctcacaagatgaagttgaaaaattagctaaatatgcatcaattccggttataaatggattaacagatgaagaacatccttgtcaagtactagctgatttaatgacgataagggaaaataaaaatatattagaaggtctaaaagttgcttttattggcgatggtaacaacatggccaattctctaatgattggctgcctaaaagtcggcatgaattttgcagttgcatctcctgagaattatacagcatctaaggagtacctgaatagagctaaagagatcgcagaaaaagaaggcgttacttttacaattactacatctccacttgaagctgctaaagatgctgatgttataattactgatgtttgggctagtatgggcagagaaggtgaggctaatgagagggttaaagcctttgaaggattccaagttaataaagaattaatgactattgctgataaaaatgctatggtgcttcattgtcttcctgctcatagaggagaagaaatttcagctgaaattttagaagaacatgctgattcaatttttgatgaatctgaaaatagattacatgcccaaaaagctgtccttgttaaattaatgaaatagtaaaattctagttaactgaaaaatgatatacttgtttacttcgattgctaaaaaaaattgtaaagaatttctatcatttcaaggtaaaaaattattaaagttacatacactcaactagtaacaaattttcgccttgaaataatgagactctaataaaattttttctgatgcactctgcgcaaacaagtatatcatttttttatatttatatataacttaaatatttattttataaattattattaattttgcaggcgtgatgataaaatataattatatgcataattgatttttaatttaactaatgataatttactcaacatatatttttagaggagataatatggatatggatttaaaagaaaaagtaaaaaaacttccttcctcacctggtgtatatcttatgaaggattcactaaataacgttatttacgttggtaagtcaaagaacttaaaaagtagagttggatcatattttataaattctaaatctcattctcctaaaattcttaagttagttcaaaatctcagggattttgagtataaaattactgatactgaatttgaagcttttttgcttgaatgcaaattaataaagaaaattaagcctgcttataatagactaatgaaaaatcctaagtcatattcttacataaaaataattcttaacgacaaatatccaaatattgaaatatctcatgaatcaaatgaaacggatggaaacatttattttggtccatattcaagaaaaaacattgttgaaaaaggactttatggtattaaagaatactgcaaaatacaatgcagtattaatcagcgaaagacttcatcctgttttaactactctctaggattatgtattggaatgtgtttagatagcactccacgagaagagtatcttaatatattaaataaaataataaatcttcttaatggtaatgataaaataattctccatgaaatggaacatataatgaatagcgcttctgaaaaatttgattttgaaactgccgctaaatatagggattacataagctctgtaaattatttgctagagaaaattaaaattatcaaatttactaaaaaaaatagaaatattgctttgattgaatatttagataatgacatagttaaattttttcttattagaggaaataagatactctttagtgaaaaatatactttaaaaaactttgatttagaaacattaaaaagtattcttaaagataatattttattttactttaacaataaagatgttccaatcgaaattggaaaagaagaaatcgatgaatcccaaataatttacacatatttaaaaagtaactctaataactgcaaacatattatgattccagaagaatggttaagcgttccaaataatgatatgaacatatataatatccttaataagctgttacctagtataaaaaatgatacctactaataaaattgtgcctacttgttcgcaattgtacaagtaagtataattattatactaagttcatttaactaagtatataatttataaaaggagattttaactatggaattaatgaaagcaatcgcaatgcgtaaatctactagaagctataaatctgagcaaatcagtgatgaatctttaaatactattattaatgctggctgtgcagcaccagtagggatgggtgcatataactcagttcatctaactgttattcaaaattccgacttattagataaaattacagcagttactgcaaaagtatttggaaatccaaatatgaaaccattttatggcgctcctacattagtaattgtttccggaaaaccaaatgaaaaggctccagctatcgaagtagctaacgctgcatgtatagttgaaaacatgtctcttgctgctactgatttaggcatcggtagtgtctatttattaggttttctatttgctctctctagtgataatgatcttctaaaagaattaaacttgccagaaggttttgtaccagcagctgcattagcattaggttatccaactgaacctctaacaaaagaaaaagacttaaaacaaactattcaaataaacacaataaaataataattcaaacataccataaacttcaatccaatagtgaattattaaaaatttcatataaatttgttcgattaaatagtgaggtgtgaaaatgaaagtattacttattaatggtagtccaaaagctaaaggatgtacctataccgctttatgtgaagtagccggtgaattagaaaaagaaaatattgaaacagaaatctttcaaataggaaataaacctattagtggctgtattggttgtggtggctgctataaaagtggtgaaggtaaatgcgtatttagtaatgatatagtaaatatcgctttagagaaagcaaaagaagctgatggatttatattcggttcacctgttcattacgctgctccgtcaggttcaattacatcttttttagaccgattcttttatgctggaaattgctttgcacataaacctggtgctgcagttgtaagttgccgtagaggtggggctgcttcagcttttgatcaattaaataaatattttactatttcaaatatgccagttgtttcttctcagtattggaatatggttcatggcaatactcctgaagaagttaaacaagatttagaaggaatgcagacaatgagaatgcttggcaaaaatatggcatggcttttaaaatccatagaggctggtaaaaaagcaggtatttcattacctgaaagtgaacctagagttgcaactaattttattagataattctattttagaaaaaggatttaataaaagatgtattttcttaacttttattaaatccctcttacacttatcaattaattaaatatatattacaattaaacttctatactctagttttaacttatcgcttggcttattaaagttttaagtataaatttactaatgcaacatataacttctttaactatactatatttctagtttctaccttaatccctatcttataattgtttcccattagtagaaattacatttttaaaccacttgagaaagcaagtttcaatattattgtatactataaaactaatattatataaatccgtattattaaaaaacttagaataaaaatatccttcaaatacttaatcccaaaattaagcatttaaaggatatcattattttagttatataatatatatgttccataaaatttaattcattaatatttatttaaggctactagatactatctcaaataattttgtaaagaattgattatcttatttagaacttatatatatttttttattctgatctatttcttactgcatttcttacattggtttttttgattgttatttcgctttggttcgttgtcatttgcaacttcttccgaaaattctgtcatcaactttgaacggttcattttattactaactcttacgtaaccatttttatttttttcagtgttcctaaaatatttcattatcatataaattgatgaaaatagagctatcattatcagtcctactataagtcctggtgcctgatccgaaataagaggcatactaaaaataactacaatcatacttattaatccaatccaagatgtatacggaaatccaggcatttggcattttccatctggagggcatccatttcttttacggaatcttatgtgtgtcgccataattactgcataagtaaaaagtagagaaaatccacttgccgttactagaaacagatatattctaggaaataacaacccaaatcctaatcctaaaagcattgaaattccagaaaacactatagctttataaggaatatcacctttatcctttaaaaacttaggtgcatcaccttcatctgcaagtgatcttagcattcttgcaatcccaaacatggaagcaagagatgcagaaagtatagctgtaataagtactaaattaattacatttccagcccatgtaattcccagtctatcaagagccgcaaccattggacttatattttcacttaaatctgctgtaggaattaatggaagtaatgctataagggaaattatatagagtgctacaagacttacaactgtataattaattgcttttggtattgtttttattggattatcggcttctgaagctgctaaccctattatttcaaaaccagcataagcaaatactactataagcattcctcctgcaatacctcctataccacttgacataaaaggctctctcataagctctcctgcccctaccgctgttcttcccggaagtatgccagtaacaagtagaaaagatataattataaatgaaactattgcaaaaagctttatagctgaaagaccactagtgagcttacttaatttatcagctcctaaaagattaagcaaagttaccccaactataattatagtccctcctatggctattgatatattaggaatccattcattcaataaaattgatacagcagtagcctcactagacattgaaagtaccataccaatccagtaaacccagccaacaacaaatcctgttccaggtccaaaagcttctgatgcaaaagtcctaaaggatccagaatgtggattcgcaacagtcatttcagataaagcataaagtataaagtatactaaaattcctcccaatatataggatatcaaaacagatggtcctgccgcattaatagctaccgctgagccaagaaaaaatgatcctcctattatgcttcccaaagccatcattgtgagctgccaagcagataatcctttgttttttttcttcataaatattctcctccgtactaaaacacctaagaaaagcaaataaaaatatttgcatgtttcttaacgatgtactaaataacttctagaatattattcctcaaaattcatataacatgtactttatctaaatataaaattttatatctactattttatttaaaatacgttttaaatatgtaaattaaatccattaagaataaaagataaaagttaatgctggtaactagcactaacttttatcttatctaaaattgaatgtaaatcaattatttaattttaattattttcttctatttttcctactataaatatatatgataatgctcctattaaagctaaaattcctatcaaagctattgctggagtaaaattacctcctgatacaataatgcctattacaattggaataactattgatgataaagctccagtgcagttaaatacaccaccagctaatccaactaaatttttaggtgccaataatgatacaaatatccaagtaatagttgctaatccattaccgaaaaatgctatagccatgaacattactattaatggagtgctatcaacaaaatttgctccaattatagttgttgttaataataatccaataattattggggttttccttgctactcccatagagactcccttttttataagcttatctgatacaaaacctgaaactaaaactccacaaaatgcagccaaatatggtactgatgacacaaaacctgattttataaaacttagatgtctatattccacaaggtatgttggaaaccaagttaagaaaaaccaaaatgttgatgatatagtgaattgaccaatatatattcctataagcttacggttagaaaacatcatctttaaatcgctaaatttaaactgagatttttccttagctgtcgaattatttgcatcctcatcttctattatagctccaccttctctgatataatttagttcagctgtatttatacgtttacttttgcttggatctctgtatagtgcataccaaacaattgcccatgcaattcctacaagtcctgtaagtacaaataagaatttccaaccaaacttatcttctaatataaatagtaatgggctcacaaatgctaatccaacaaattgagctgaagagtatattgcaatagcggatgctctttcatttgttggaaaccaactagatgccaccttattacttgctggcataactggtgcttcaaaacatcctattgataaacgtaaacctaaaagtgatccaaatccacctacaatactttgtaataatgtagctaatgaccatataaataaactacatgcatatacagcacgcggcttaaatctatcaactaagtatccgctaggtatttgcaatgcagcatatacccatccaaacgctgaaaatattaatcccatttgaacagttgataatttcaagtctttagacatatgagatgctgctacagatatatttgaacgatccatgtagtttattactatatttataaatattagagctaatactaaatatcttactctagttggcttctcttcaatcaaattagtcttataattattatttatattcatattgtttattccttcctatctttaaataaattattctctatttagacgaattgaagaaaatagcagtttcaaaatattatgattatttttaatcataatacatagtagcttgcgcttacctgtgccttatgataattttctgaaacagtatagcggaaaataaggttgtaagattggcttgctattttctaatttcgccttcttaaagcatatcttagtatactcttacctcaatgatctcagctttcctgcatccatttgttgattcaatggtaactctaattttacttgctaaaatcttacctatatctttaaatatttcttttcgcttacgattatttttcttagatacaataacctcccatttgttatccttccatatggaaaccctataatctttaactaattcgggcattacagaaaagtcagtgtaatgatgatgaagatttataagatcttcgtttacatcatcgttaaatgtaatatgaatttcattaatttcgatatcattttcccattcaagttgtatccactcatctgtatctttaatattttctgatatccacatatgaggacctccgtaaggtcttgagtaaccatctgtaattttactaggagaatatgcatttgtttcaccatgaattctaaagcaaaattcttttctagccatttctttcatagaccactcaacaattggatttataccaatataatcatcaagatttgtattttctatagcctttttagtaaatgaaagtacacctgtcaattgttcagaagataaatgtattgtaactttatcattagactttacaaccaaaaatagatttcttgccacttctgattctaatgcaaagtcactcttaacccattgattttttcctttttccacttgtacttttttcttcttcaaaagatttgtaggaatatagttttctgctctgcctgtatcccaaagttctacttccaaggtagtctgttctaaactagaaattagtatttctatatcttcaactctgttttctattggaaataaaattcctatatctgtggtcaatctataatcatcgttagaatttacgacttcaatttttcttaatgatgtagatgccataatagatgctgatctagccttatctttcatgtcctcattttttattcctataatagatccatcttgctttaataaaatctgctgtaatttcttaatatgcttcatatataaatccctaggaataattttatattctacacacattgctgctgctaatccaacagcttctcctatagtagcacaagttgccataactctagttgctccaaaagctatatgtgatgcgctaatattccttccagcaaacatcaagttcaatacgtttacagaatatgtggaacgaaacggtatatgaaatattccatcagcttgtatatttctagagccacagctttcctcatatattcctttctcaggatgaagatctattgaccaaccaccaaaagctattctatcatcaaattcagtctgttcaataatatcattttgatttaaaacgtaatctcctataaatctcctatattctcttttacctggaattgacccaacccactctaatgttagattgtctgcatcataatttcctgaattttttatataatcccatattccatatactagtgtccataactcatctcttattatttcattgtcttttactatatcaacttctccgcctagttctatccaccaatagcagcaacctgagtcattggattttataactctattctttggaatgctggttttacttatatcttttgcaaaattaggtggaataaatttaactggatgtccagcatctttagtataaaataatatagtacttcctaataaaattttatcttctttttctggcgccaataattcattatatttatatctggattctcttcctaaattatatttagcaccagctaatgctccaataaatccatctccggaacaatctagatatacctcactttcaaatttagtcttagtttctgctccaattgtccaccctgtcacagattttattttattttctttttctccttcaatcaaatcgatttctgacacttctgtatttaaaaataaagaaatatttttttcatcttttaccttttctaatagtagcatgtcccaaaagtagggatttccatctggattgcgatactgattttctaaaaacaattcccccataattccagtttctctggcatatctgtttactccatgttttgttgctccacatacccatacgcgaatttcactactagaatttccgcctaaaattccgcgattttgcactaaagaaacacttttaccatttctagcagcagaaatagctgcacacacacctgctaaaccaccacctattacggttatatccttttttacatttttgtaattcataattcgctccctttatagatatattaatcctaatgtctatatctatttagtgttttaatatttacaatgcattgtatcattttttgataatcagctttaaattgagcctatcactatcatatcccacactgattatatctttataatatattaggacattaattttttgaattcactaacgtatcatctacatatactttatttcatatattagatataacaattattatctatacaaaatataaatatcttaaaaaagaaatatccagcattcacatattctgcaatcaaaatctctatagataaacaacttaggaatttgatttatatttggcaataaataccatacaagaaagtagaaacatttttatgcagcaggcattgaaaatgagctgttaaaagcttttaattgtaggttgttcaactaatgcttgctcccaatttcattgtgacaagcattagttgtgcaacctgcaatttagaactttcagcgaaattttcatagtcctgtgaaataacaatgtttctactttcgttggattattgcataagtataagttatatattgtttatctatatataaatacagatataattactttaattactttttaaatgtttacatttcacttctattttcttataattcttctatggcacaatcttcttagctcttaaaggaggcttattgatgtttgatttaaataattttaatgtaaatattaatcaacatattttttgggataaaaaagaacattttttattggatgaagacatagattcaaattgggtactttacgctattgaagatggtgaatgcagttacgaagttgaatctcataaaggaaaatgtaaatttggtgatattgtaatttgtccacctggaataatttttaaaagagaggtcattaccactcttacatttcacttcataaacttttcaataaattctggagatgatatttcatcttttccagttggtaaaatatctgtatcagatttaaaaagacttaataatatgtactactatttaaagctatatagccacaataacaatattgagttaaaccaatggaaaagctcattgataagcgatattatgaaattatattatatagaaactcagtatagcagctccccaagaaactttgttcaagatgaaattataaactattcactaaagtacttaaataaatacgcttatgaatccattaaaatcaaagatttttcagcttcgctaggacttagttccgttcagtttactagacgatttcacaagtgtataggaacgactcctattgaatatataacttctttaagattaagaagagctcaagtattattgctcagaactgaagatacattagattgtattgcttcaaaatgcggatatgataacggattttatcttagtagggtttttgccaagaacttaggcatatcaccttctgattacagaaaaaaatatcggtaataaattcatataaaataaaaatctaatatatttatatgtgggttgcacaatataaatatattagattcttaaaaacctgctgtgaatcagccagcacaaaataaactatttagagcctttactttctcaaatataaagcaaataacaacaaactatagagcctagttatctacttttctatataattaatcacattttttactattaaattaatagttccatcgccgtttctttgtatctcaaacttgctaggatcgtggtaggtctcttcattgatgtacaaatcaatttgcttatcaatattaagtctaactctttttaatttcttctcaacccacgttttatcaacagcaacttcttcttgcaatccttgttgttttatataagttgaaaactcttctttcgcttgagggtgatcattaaataattcagctgaaaactcatctatattaatagaatcttcttcttttaatttagtttttattgcagtcctaatctcttctgctcttcctgcatcatttgtaacattttctctagtccagttttccgctgcttttacaaaagttttggtcatatctctttcatttgtaacaatgcttgcacctaagaatgtgtttataaaataatttgccccatactcatcttccttactacctttttgcttatctaaaatcattaagttatatttatcctcttctataattggtttaataaatgcagctttttgaattctttgcccacttcctggaagtcctgctgcttgaggtactatccctatacctattttctggtctataaattgaacctcatgagtaaaatttttaacgtaatccatcttaagtattcctaccattggaccttgatccgtagttaaagacactattattaaatctcctgacgggatattcacatttcctttcattattatgaataactgcctagctaattctttagataaattaactaagttattgtctactccagttagataatcctgagctacttctttaactatatttctttctggattaaactttccatatttaagttcgtcatccttaaagcatttttctagatgcttatgtaagaaaaaatatatatcttcgtctaattccaaactatattcgtttaaaattggttcttcaccattactatctaatatatgaataactgcttcatttatattaatctcgtttatgtattccatactttcaccaccaaataaatttatacattagatattataaactttaagtaaattaaaaaaaagccttaaagcatacaaaaaaaatggaaaagagtctgatataaaacttaatttcttatatcatcaatctcttttccacatttttaaatattcttattttattaatcagataatttttctaatctaattattgatcttcaaaattacttacataattttttaaattcatctgctacaaattgcacctgtgttcctacaacaacttgtacgcttgtttttcctggtcttattattccagatacacctgctgatttaataactttttcatctacagcagcttgatctttaatttctaaacgtaatctagttacacaattatctatagatactacgttttcttttcctccaacgccctttaatattacagctgccacttgagtataatcattattcgcaagttttacatttaattcttcagcgtcatcatcttccctaccaggtgtctttaaattaaattttgttattactatacggaataccacataatagattacagcaaataccaaaccaattggaattaacataattggattttcagccataggcgcttgaaaacttaagaaccagtctacaaatccagcactaaaattaaatccagctcttactggtaataatgtacaaacgaatgctgaaattcctgttaattctgcatgaactacatataatcctggagctaagaacataaatgcaaattctaatggttctgtaacaccagtaaagaatgaagataatgctgctgctaataataaaccataaaccgcctttttctttttatctttagctgtatgatacatagctaaagcaccagctggtaaaccaaacatcattactgggaagaatccagtcatatacatacctgtttgaccgtgtactccgccaccagttgttccccagaacttaccaatatcattaatgccagctacatcgaaccagaatacagagttaagtgcatggtgaagaccaaatggtattaacaatctattaaagaatgcataaattccagcaccaacagcacctgtagatataattccttcaccaaaagcaactaatccgccatatataataggccatgcaaaaaataatactatagctgcgatgattgaatatagcgcagttacaattgcaacacatctttttccgctaaagaaacctaatgcatctggcaatttaactcccttaaatctattatagcaagttgcaccaattaagcctgatgttataccaataaattgagttttaatatgaccaaaagccggtgctacttcttttacatcaatatgtttaaacattgacacagcttctggagcgagtaaagtagtaatcataagccatgaaactagaccagcaagccctgctgttccatcattatcatctgacattccaacagctacaccaattgcaaataaaattgccatattatcaattagtgctccaccgccttttaataaaaacgctgcaataatgttatttgctccccaaccatcgtggtcaatccagtaaccaatacccattaaaatacttgcaacgggtaaacaagctactggaagcattaaagattttcctaatttttgtaaatacttcatcataataatataattccccttccataataattaataaaatttattttaaggattgttatatccttaaatgcattataattcttatggacatgtatccttttcagcaaataaaaaagctgaaaaggataaattatattatccctttcagctaatgccctgatttaatcggttacacgccaaagatcgtattcttatacactcatattattctatttttattctatagtcaatacccttttttatttttttattattgacactaattatatgaaataatataattagtacataaatgtgttactgtttaatcaggcataagtttgcgtaattcggaaacttatgcttttttattaccaataaataacagaatgaaaggaagtgactgttcctgtttaatcgggaatattaagtatgtttaatttttttaagaagaattcaaaagactcaaacaaagaagcaaaattagttgcacctataactggtaaaacaatagatttatcaaaagtaccagataaagtttttgcagaaaaaatggctggagacgggcttgcaatagatactactggaaatatagtagttgcacctgctgacggaaccttaacattagtatttaatacaaaacatgcatttgcaattactcttgataacggggctgagttattggttcatataggtatcgatactgtttccttaaatggtgaaggttttgagcaattagctgaagcggggactaaagttaaagctggaactccaattataaaaatagatagagattttattttagggaaaggttattctttaataactccagttcttgttacaaacatggatatagtcaaagacttaaattcacatgtcaataaagatgttgttgctggagaagatgaagtaattacttttagttcataaaaaaaatggctaacatatttttattaatatgttagccattttaattaaaattttattgtagcttttctaaacctctctatatgcattgctagatatgctatttcatcatctgaaactttcttttctagctttaaaactaatatttttgctacacccttagatactttatatgataatttatattttgattttatttcttttataaaatcattttcaatagatatatcatctaaaattcttttaattgcaaatctcaaatgtgtgagaaatctggcatagtctaacgatgttttgtctatttttatttcagtcttttcttctacgtattcaattattgagtttatcaaatgtgtattctttatagtattggatagcttacctgaatttctagcagaatggatatgtaatgctatgaatccaatctcgccttctggaatttttagctttttttcattttgtaaaactcccgcaactttttctgctaacgaatattcttgtggatataatgctctaatttccataagaaatggattttctatttcttctttgtccgaaagccttttcactgcaaaatttaagtgatctactaatgcaacgtgtattctctcatccaaattttcctttaattcatttgcaacatatgatatcatcttttcgcatagcacaaaaaattcttcatcaacattttcgattacttgtttaaagtttcttaagttatcctcatcttcaataacaaatatcttttcaacctcagtacccttttcaatggtatctccagactttctaccgaatccaattccctttgcaaaaagtattctttcctttccattcatgtttacggaaactatattgttgttataagattttattatagttgctggatcaataattttactcatatgaccaccctttttattatttatagaactttctaatctttagcaaatcacttatcatctgaattaatacattatttagaaaatataaatgaccttattaatcttataaaacgactctatcattaaccttattatttaaatacttcacttatctttagccgttagtatctattatgattattttaaaccatataaatctaatatattaataatagcttactatattatttattgtaaagcacagatttaagaaatcttaagatataaatagaaagcagattcctaagaatctgctacatttcataactcacaaatataataaatggactaatataaatatattaattaaaattccatttattactcaatatttaatatagagtattaagaatattctactaagaaatattataaataactatcctaaaatcctttattaaaatttctattttacattttcttttcttaattcttgccttccagcaacatatacaaatggaagatatattaatatacttacaattaaacaaataagagctgtaactccacccatgattgagtttgtagatataattgcccccaaaattggcggtgttgtccatgttgccattatagctacctttggcacaaaaccaatgactgttaatatatatgctattgttaatgaaactataggagataatataaacggaataaaatagattggatttaaaactattggtgcaccatatattactggttcatttatattaaatattcctggtgctatgcctaaatttgcaatagctctttgttgtgcacctgcttttctacctaatacatatattgcaatcaataaagctattgaagttcctgctcctcccatatttacatacgaatctaaaaattgactatttaatatattttctggttgtaatccatttgttattgcttctgtattagctaaaagtaatggaagtaataatgcatttattactggtgctagtatatttgaaccatgtaaaccaaaaaaccataatacatgtaccaataatactattacaaatactcctaaaaagcttcctgcaattaattgtaatggtttctgtagagtaaagaataatgcctgatgtatatctggtacactcataactataaataattccttaattcccgctgctaatgctaaaattattattgttggtaacaatgctgcaaatgatcttgaaactgctggtggcactccactaggcatttttattactaatttaggattgccgattaactttacgaaaatctctgtagatactaatgatactatcaatgaaataaataaaccttgtgcccctaaaaaagttaatggaaatgctcctccatctggtgtcgttgcatatagaatcatagatgctgccaccgatactattccagctcctaagccatccttatcatacgatcttgctaaatgatatgatattgtaaatacaactaatattgacataattgcataagaaccattccatatagatccgccccagcttttccatcctgttggtaatagccaatccataaaattttgataccatttaaatcctatattattgaacaatactgcaaatgcaccagccattataatcggtgttattgtagcaaatccgtcacgtatagctactaaatgtctttgcgaaccaatcttaaatgcaattggaacaaagtgctcctccatccattcaaaaaatttattcataattatttcctcctcatatctaagatttatttgaaataaagtccaaactcatccatggccctatatagtctagtaaaaaatctcttactctgctatgcatcctattacattagtctttccattgttcttcatatcttttagtacaatttaaagctcacctgcatatctagtgcataaatttgaatataatgatatctatctaaacattcctttctctctttgccttattaatataataagcaccaattgtaggtgaaatttcatcatctactatatcctcaataactatattttctcttaggtacttttcaaaagattttcttaatatctttgcctttcttataactccacctaccaaggcaatagagcagctttcaaattttaattttctatacacatttataacagtcttagccaaatctactccttcattaaccaatatttcttcagctatcttatttccttcctcgcccaatatcgaaactatttctgccaaagatgctatctcatccttagtagatgaatatacaaaagttactactttgcctattgatttagcacctaaccttttcataattctcgtagttaattctgatttaggcaaggaattttcttcttcaaatatcattctttttatagcatcaattgctattttatatccactcccttcatctcctaataagttaccccatcccccacaccttacacttgaattatttttaactccaaatgctatcgatccagtccctgctattgtcaatattccatcattcccccttaacatagcttttagggctatttcagcatcgttcataagtacacagtcagtcttaagttcattttttattgtatcttttataatttttgcattatctccgacttccgatcctgcaatgccaagatataaatctacaagttcgtcttctttaagaacatctattatttctcttattgaatctactatattatttagtgctttttctctattatttagcaaatttgcgaatccttttacagaagtaactataatatttccttgaaagtcataagctactgcttctgtttttgttcctccaccatcgacacctataatgtatttcatgtcatcactaccttttccttaactttaagtaaataaataattagactaacatatattgttattaaacttttcatgtatttctataatttcaactgccatagactttaatgtcatactagtcataaagtgatcctgagcatgaatcataagtaaagaaacttctgttttttctcctcgtgcttccttttgtattaaatatgtttgaacattatgtgcttttaataattctgcttctgcttgttcaattaattttcttgctccatctatattcccacttttagcgcattgaatagcttccattgaataacttctaacttctccgctatgcactataagattcattattgtttcttccacaatgtttctctccttttcaattatttattttttataagatctagagctctttctaagactttttctccattcattgttccataatcaactgtattaattacttctacggatatattcttatccgataaattagctttaaattttgataataaaaatctaacttgaggccccagtaacaaaacatctatcttacctatatattctttaacatctgcctctcctacagcttttatattacattcaatccctttttcttcagctgccttttccatttttgaaactaataaacttgtggacattccagctgaacaaactaataatatattcttcatttttaacctctccttggatatttttatttactagcactcatctattacactattatataaagcaagtttcataccaatattatatttatacacaaataaatataaatcatctcataatcacacaattcatgaatctaagtgtgcaactaaaaaaaatagtgtgtaatttgacttacacactgctttagctattacacagtaattatattttccttaacaattctcactatataagctacctcattatctcctatatttatattatatacacgctccaagtcttttaaaatttccttaattaatgaaaattcactattatacatatgacgataattttctaaacctttgaattttaattcttgaccaccatgttttaatttatctataagaaaagtgatatgaattaaaattcctatctgtgcatcatgctgaattctcacctttaaattttcttctatttttcttattacatttctaatatgcaaaaatagcttcattgagtttaattcatttaattcactacttaatgcttttctaacttttaaaaagtcatattcaatgtccactagattttctaaataatttattccctcattcaagaaaacatcttgtgctggtataaatggaacatctttaataactatgtttatagttcctacaactgctaatactacaaacttctcttttagcctatttacttttttaataaactcttccctatcagaaatattaagtggtataatttttactttttctatattcttcaaattattacttattcttatttttattctttctgctgctccttcacctgtaaagcatgtagttattataactagttctttattgtatttatagtcttccttagaaacttgcatagagggctttccaatatctctacataaattatatattgaatccaagcttctcccattaaaagctttgcttcctgcctctataacggttaatgttgtaaccatatctatggttttaatttttatttctaattcattgctaattatatctccaaaattaaccaatgaccccatatcaacaagtaacaacatccccttttcattatatatttctttaacttttttcttagctttctctagcatatcctccgccttcatagttagtggcatatctagagcttgcacatattcttctcctattaaagaattagctacctcagccatgctgctagctgtacttgttccatgcatcattactagaactcgtacctttttctctaattgttcactattttcatcattgcatgcagccaaaaacatagttatatagcctatttcatctaatgggatatctatatgaaattctttttccgcaatttttataatatccatggctacagcaaattcttctctattttctacccttataatattaagcttaggatgatatatcttttttcctgaattaatcctttcgatgcttccctgtaaatgaagtgctaacccaaaataaactttctgatcaaaatctctatttaacttttcagatgctatcctcaacattttttctgcaactgtagctactttaatgtttacaattttggcgatctcatcttttttaacatttgttgtgatattactaatatatcttctaaaatatttttccaaatcaatatttagaatatcatttatttctgtctcattaattcctcgtgcttttaagttttccatcttattttctattatcgaataaaaacttttattttccgagccttctatttgattttcatgaaattcaatattttttagtatactatcttcacttgaaaatcttaaaatatcagccatatcttgagataaattatctatttcttttctacattctctaattctcattattcctttttgaattctaggttgcagatcacttttatctaccaaaatataattatttttcttaatcttataatttaaaaatgctttagcacaagctaattgtatatcactttttaattgccctatattattaggacaatcatatagtaaaaatgaaataatcgcatttttactgatatatatgctctttccgattcttacggattcttctgttatgaactcgtttaaaagaagatatctttcctctaattttctttctcttaatgtcggtaatactatcaccattggaattcttctagtaaatgttttcagaagatatgactgtggattctccgtagtagctgctataatctgcacttcagattttacctttttctcagtatctccaagctgcctaaaatatcccttatctataaaagtaaataacatttcttgcccctgcggtgataacctgtgtacttcatccaaaaagaatattcctccatcagctttttttagcaaaccttctctatcagtatctgcccctgtaaatgcacctttttttactccaaatatttgtgccacaaccaactgaggattatctgaataatcggcacaattaaatctaataaaaggagcttcagcagctattattttagagtctttagcaaaattgtacattacttctgcaaatagcgattttcctacaccagtttcacccaaaataagagtatgtaagcctctaggaggatataatattgctgctttcgcttgctgtacaggtaatttaagtgactgatttgaacctatgagcatttcaaggctatctctatttttcacgattatgcctgatttatttttaattgaattcatttcattcttgtaacttttgatactactatatataactggtcgtccttcttttttatttatccttttttccttatataattggtttaaatacctacttatatttgttcggtctattcctatataaaatcccagttcatctgctgttattcctcttcctttgctcttttcaagctcaattagactctttattacttcttcctttctaggtaaccctttcatctaatattatcccccactcataagtagtccacattaaaaacatagaatttatccttataacttttaacctattatataaatgcaaatatatattgtcttatgtttttcactttctaagatacatttgaaattttcctttgaattcttctacataaatctttgtgaaaatataactggatactaccagttttgaattcattatataataatatttttatttcttgcaaccaaatttttcatattattataactgtttatacaattctgcctctactataaatatgtcatataaatcaattttactagcacaacttttaaaattgctatattatattattatataaaaataaatatctactctttttaagtattatttattaactttaactaaggaggctattctatgcaagagttagaaactaggatcgttgatattgatgttggaaatataaggaaaattttattatcaaatggtgctgaaaaagttaaaatggaagatcaagtaaatgatatatatgattttgaagatggacgtcttttagataagaaaggatatgctagaataagaactataaatgatatgattaataataaaatcgtatattttatgactaccaaaaaaatgctatcccagggcagatttaaagtcatggaagaaaatgaagttataattgataacaaaactatgggagagggtatatttaaatctcttggattaattctgaaggaatctaataaaaaatatagagaaagctataaattacttgattgcttaattgaaattgatgttaatgacaagagtttttgtcccttcccatatttagaaattgaaactacatcggaagaaaaattggaaacagtagtgaagttacttggatatacattagaagatacaacctctcaaacaatatacgatatattatctgaaagaggattgcttaataatgcccctaaaggaatataattaaatttttattccattaactgtaaacttactatagaattataaatttatataatgtaaaatatacatagagataggtatacttttaaaatgaaatttgtttagtttacttttaaaatgaaatttgtttagtttacttttaaactaaactttttttcttataaaaggaggatgtcatggaaaaatatgatgacataaaatatttaagtctgcttgctaagcaatatcctactattgcagcggcatcaactgaaataattaatttagaagctattttaaatttacctaaaggtacagaacattttttagctgaccttcatggtgagtatgagccttttgttcatgtattaaaaaatggttcgggggctataaagagaaaaattcaagaggtatttgaaaattctttaatggactgtgaaaaaagaagtttagccacacttgtatactatcctgaacaaaaattagagattgttctaagagaagaaaaagatataaatgattggtataaaattaacctgtatagattgattcaattatgcagacatgtatcttctaaatatacaagatctaaagtaagaaaagcgctacctccagattttagctacattatagaagaattattgcatgaagaatgtgataatactgataaacaaggctattatgatggaataataaatactattatagaaattgaacgagctcaagagtttataatagctctatctaaattgatacaacgattagtaatagatagattacacataatcggagatatatttgatagaggcccaagaccagatataatcctcgatacccttatagattatcattctgttgatatacaatggggaaatcatgatatattgtggatgggtgcggcctcaggtaatactacatgtatagcaaatgttttaagaatagcagctagatattctaatctagacgttattgaagacatttacggtataaatttattaccgcttgcaacttttgcacttaagcactataaaaatgataattgcacagctttcgttcctaaaaacaccgacgaaacattatatggggcttctgaaattgagcttatttctaaaatgcataaagccataacaattattcaatttaaacttgaatatgaaattataaaaagaagacctgaatttaagatggatcatagattgcttttagataagataaattatagcgatggcaccataactttaaacaatataacttatgagctttgcgacaaaagtttccctacaatcaatattaacaatccttttgaacttacaagtgatgaaaagaaattggtttctaagcttcaaagttcatttataaatagtgataagttgcaaaagcatgttttatttttatttaacaaaggaagaatatacttaacttataattttaatcttttatttcacggctgtattcctttaaataaagataaaacttttaaaagtatgattattcatggggaagagtataaaggaaaaaaacttctagataaatttgattctttagctagggagggttattttagtactagaggcagtgctgaaaaattatatggtactgatataatgtggtatttatggacgggagcctgttcttctctttttggaaaagaagatatgacaacttttgaaagatattttatcaaagataaaagtacacataaagagaagaaaaatccctactacaattttagggattctgaagaaatgtgtaatatgatttttaaagaatttggattagacccagccgaatcacgaataataaatggacatgttccagttaaaaataaatttggagaaaatccaataaagtgtaatggaaaattgatagttatagatggcggctttgctaaagcttacagaagtcaaactggccttgcagggtacacattaacttataattcctatggacttcaactaatatctcatcaacctttcaaatcaattgaagatgcatttagtaaagaaacggatatattatcttcaacacaaatagtggaaaaattagacagaaaaaaagttggtgatacagacataggaaaggatcttaaaaaccaaattaaagatttaaaattattgctcaaagcctatagaaaaggactaataaacgaggtaagatagcagccattatcttacctaaaatctaaatatgtagaagaaatttatttcctactagtctctaactaaaattagatcaataagttatattcaaaatcttcattaaagaccacttgattataacctattgatctgattattttttattgcacttttacttcactttatttaatgctaattattcagcgcgccttatttcttcaaattgagctattaattcttgtactgctttagtaagattaccaactattgcatggcaacgattttcattatttaggtataattgttttcgtcaatagcctaatcctatctaaatatatttccgcttataatgagcttttgtatctcatttgtgccttcatatatttgagttatcttagcatccctcatcattctttcaacattatattctctcatataaccatttccgcctaacatttgaacagcctcagttgttacgtgcattgctgcatctgtacaagcaagttttgctttagctgcagaaactgagtaagaatttccttcttgtttatccatggcagccttatataccatatatttagcctgctctatttcaagttctagctccgccattttaaatcctaaatattggtttttccatagcggctttccaaattgctctctttctttcatatactgtctagctacttcaaatgctccttctgctattcctagaccttgagccgcaactccaattcttcctccatcaagagtcttcattgctattccaaagcctttgccctcagctcctactaagttttcaactggaaccttacaattttcaaatacaagttctgaaacttgtgctgatcttataccgcatttattttcaattttaccaattgaaaatccttcaaatcctttttcaactataaatgctgataacccttttgctcctttgctcttatcagttaatgcaaacactaagaatgtttctgataaaggtccatttgtaatgaaacattttgcaccatttaatatataatactcaccattcttatcagctgttgttatacatccacctgcatctgatcctgcatttggttcagttaatccaaatgatccaaatttttttcctgacaaaatgtctggaagatatcttttcttttgttcttcagatgctgcattaattattcctcctgaacaaagagaagtacttactgaatatgaaattcctaatgaaccactcacttttgatatttcttcaactgctaaaacataagataaataatctccaccagttccaccatattcctttggatatggaagccctatcaatcctaattcccccattttcttataagtgtctattggaaattctccactttcgtcatatgcaactactttaggtttaatttcgttttctgcaaattctcttaccattttcactattttttcttgttgctctgttaaattaaaatccatcttttaaatcccccttgtaatgtatatctttttaattgaaatataatttgaatttttaataggtaccctatcttaacgcttagagcccttaattttatataaaatatatttactcccttaatcccatcaatttatcatgaaatattcttccattcattagtctaggtactccatccattttaggtttgaaatccattaaatccaatacatccttttttagatctatcccaggcgctatttctgtaaggtataatccatctttccttaactcaaatactgctctctcagttatatacataacttgttgatccatccttcttgcataatctccactaaatgtaatttgctctacatccttaatgaattttttagcttttccttcttgtttaatttctaatttgccatctcctgttgctacttttaagcctcctgcagtgaatgttccacaaaataacactttcttagcattttgagttatatttatgaacccaccacatccagcaattctaggcccaaacttacttacattcaaatttccatgttcatcaacctgagctagtcccaaaaatgctatatcggcgcctccaccatcataaaaatcaaattgatatggttgatctataatagcttctggatttatactcgctccaaaagctgtgcatccttgtggtatacctcctattggaccggcttctacagttaatgtcatatattcaccaatcccttcttcattcgcaactaaagaaataacttctggtatccctatacctaaatttactaccgtatctttctttaattccatagctgctcttcttgcaattatttttctctcatttaatggagctttttctacactatttaaaggaattctcatttcacctgttactgctggattaaatgggcattcgaaggattgttcatgctcttcgggagttgagattacaacagcatctacatatatacctggaatttttataagacgtgggtctaaagatcctgcttcgactactttttctacttgaactattacttttccgccattattcttacaagcttgggctattgacgtattctcaagtgtagctatttctttttccaatgatacattaccgtattcatctgcaaaagatcctcttaagaagcagacattaactggaattgatttatataataatttttcttcaccttctatatttattagctttactagatcttcttttgttttttcatttaattttccaccactaattcttggatccacaaatgtattcaatccaacgtgagttattgtcccaattctttttcccgcaatatctctaaataattgagaaattgtcccttgtggtagattataagcttctattttattttcattaattaattttccaattttcggcgctaaattataatgacctgcaaccactctcttaagtaagccttcgtgagcataatgatctgaacctttccctttactatcgccttgtcctgctgcatgaaataaagttatattttgcggatgatttgtttcaatgaaacgtttttctaaagcacaactaagagtttcaggtgcacaactaccaacaaatccgccagttactaacacatctccatctttcaccatttgtactgcttcgcgacttgttaaaacttttacttttctcacctatattcagtcctttcaaggttaattaaccatcctagtgtcttaatcttttaacatcctttaaatagagcctttcttttttctataaatgcactcattccttccgtttgatcatcagttgaaaaacataatccaaataggtctgcttcaaatgcataggctgattcagtatccatatttaatccattatttattgctgatttagctaagcttactgcaaataatcctttcttcattatcttctgagctaattcaattgctttttgaattaattcttcctgttcataaactttattaacaagaccaattctataagcctcttttgcatctatcatatctgtagtaaatataagttctttagctattccttttccaactaatcttggaagtctttgagttcctgcaaagcctggaattattcctaatcccacttctggttgtccaaatttagcattggtagaagctaatcttatatcacacgccattgataattcgcagcctcctcctaatgcataaccgtttacagcggctataacaacttgtggcatattttcaatattagaaaatatcttttgagctagcttagccatctctcttccctctattgcacttttacttttcatttctgttatatctgctccagctacaaaagctttttctccagatcctgttatgataacagtgtatatatcttttctttctgatatatcagttatcacttgtcctagttccttaagtgtttgtgtatttaatgcattaagtgatttaggcctatcaatacaaattattgatattccactttcttcttttactttaatattttccatttaatattcccccttcaagatatattgtatttatactaatatcttttataattaatattttttgttttggatataatttatatggtggaattaaatttttaaactttaatcctagttaaactttaaacttactagagtcttaactataaatttaatacctcaacatatatttatcactcatcgctttatagttaaaggttttcatcaaaacatactttaactacgtttgtttattatttcaaatgcatacatcattaattattttttgcaccaatgattcctaaagtatattgctacaacctagcttctatattttcttcaataaaatcatcattcttatattttctaaatgactgctctatttcctccaatgatttgccgtatgtctccggtgcacatttatagataaatataccgcctataattgacgatcctataaacactatgaatgctcctgataagccaaagcttgctaataatatagggaatacaaaacctactataaaatttgctacccatagagcaaatgctgatattcccattccaaagcctcttaatcttaatgggaaaatttctgatattagtagccaagttaatggtccaagaaatgcttggaagaaagctatataaacaatagtacacattattacaacaaaaggaagcatagatgaaccctgtaatacatttgtaacaacagataatccagtcatcgctatagtggttccagttattccaagtaaatataatttcctacgaggatatttatcgccaacacattttacaaaaaatatagctgctataacagacatcaacccgtttcctatattagcaattaacgccacctttgtaccaaatccagcttgttccaatattgatgttccataatacatcattatattaattccagcaatttgttgtgtaatacctattccaactccaattaaaacaatacgacgaatccaaggaatagataaatcagcaaatgatgccttgtctaaatgcttttccgcttcaatattcttatttatttcttctaattctgcttctgcttctgctttatcacgaatttgttttagaacttctaatgcttttgctgtttttccattagatgctaaccatcttggtgtttcaggaagtactatcattccaaaccacaatacaattgctggaatagtagcaagtactatcatataacgccatacaccagaattatctgcaaaaaggtttcctaatacagcatttataacataagctactaattgtccagttacaatcatcatttcatttttagatactatgcttcctcttaaatgcataggtgccaattctgctaaaaatgttggcacaataactgatgcccctcctacagctaaccctaaaacaaatctagaaacaatcataatatttgcattaggtgcaattgaacaagttatagttgcaaaaaagaatataatagctaacattcttattatcttttttctaccatatttatcagatagacgtcctccaattactgcaccaaatgctgcacctaatgttaatatacttgtaacaagcccttcattcataggcgtcaaatctaattgatctggtcgtttcataaaacttaatgctccattaaacacacctgtatcatatccaaatagtaaacctccaaatgttgatataatttgtattttccttaaattactttttttcttaatgttataagaaccttgttccattctaattcctccttatctactttaaataattagaatcattcagaattacacaaatacttttataatttattttttcatattaatactatttttcttaatatatctataaatgctttattctgatttcaatatattagtaacttacacctatcattagtatggtaactaggtattattccatactctttttcaagaaatactagttaccaaacttaatagattttgttcatttgaaatcttttatgaattttaattttaaaattttgttttttctttaatgtattttctagcttttattgcatattcaaatgggtttgcaattgctggatcctgttctgcttcaactaatatccagccttcataattgttttcatccaatatcttaaatattggctcaaaatctatacatccatctcctggaacagtgaatgaaccctctcttactcccattaaaaaactcattttttctttcttaactttttctaaaacgtctgctcttatatctttcaaatgcacatgcttaattctattaacatatttatttaatattgtaattggattctctcctgaataaaccaaatgacctgtatcaaataacaaatatactaaattttcatcagtcatactcatcaatttatcaatttcatcagtggtttgtactccagtccccatatgatgatgataaacaattttcattcctttatcttctgctaaccttccaagcttattaagaccatcagctaatagtttccactcttcttcattaaaataatattttccatcaaatattggggtatccatttccccttgaatactattcccttgctctgatactactataacttttgcacccatttcatgtaagaagtccctatgagctataaattctttttcagtttcttcataaggtttagtagttaaaaatgaactaaaccaagcacttgctatttgaagatttcttatgtctaatgctttttttaaaacatttacatccttgggatatttatttcctacttcggtgcctttgaatcctgcaagagccatttcacttacggcttgttcaaatgtattttcttttcctaaatcaggcatatcatcatttgtccatcctattgggcaaattcctaattttactttttcagtattaagcataacaatctcctccaaaattctaatatattatttctgatatcctaactggtctattctcttttaatgatttagttgcagcctctcctattaacacagcttttaatccgtcatctgcacttactgaaatatctctattgttaacaatcgcgtctatgaattctgtaatttcatctgcatacgcctgcatatatctttctaagaagaaaaataatggcttttcagctgtaactccatccttagttgatatcacagcctttgaaatactatcatttcccacagacacttgaccaagggatccaaatacttcagctctttgatcatatccataagacgactgccttgaattatctataactgccattgctccattggccatttttagagttataatagctgtatcaatatcacctgcttctcctattgcattatcaactagaacattaccagctgcataaacttcaaccacatcactagctaaaagatatcttgccatatcaaaatcatgaattgtcatatctaaaaatattcctcctgatacctttacataatcaattgaaggtggttcaggatctcttgaagttattttaagaacatgtggttctccaatcttcccttccacaaccgcatttcttatggctttaaaattatgatcatatcttctattgaaacccacttgatatttaacacttgatttattaagttcatctataacttctttaattcttgccaagtcatgatcaattggcttttcgcaaaatacatgcttacctgctcttattgcttctatagagatttttgaatgagtatctgtagatgaacatataagaatagcatctatttctggatcttctagtatctttttataatctttatacacaccttgaatcccaatttctcttgcccaatttattgtagcttcatttaaaaatacatctgctatagcttttacctctgcatttttaacatactttgaaatactttctccatgaacttttccaattcttcctgcaccaataattccaacctttaacataaattatctctcctttaatattttcttgcatttttaagttgattttgaccatattcaaaagcttcattaacagattttttttctgatacttcagctaatcctacatgccaccatgattcatatccatcagtcatggtttttggtaaaactttaatatcaattaaagtagaaattttttgtttttttgcatcactcaatgcaacttttaattcctctaaagtcttagctgtatatgttttcactccgtatccacttgctgccttagcaaaatctataggcattaaccctccattaagttcttctgtgtcgttatttctgtatctaaactctgtagcaagattccctattccattagacatttgtagattattaatacatccaaatccacaattatcaaatagtaatacatttatctttttaccttcttgcaatgaagtaataagttctgaatgtaacattaagtaacttccatcaccaactagtgaatagacttctttgctaggttccgcaattttacaccctagacttgcagctatttcatatcccatgcaggagtacccatattccatatgatatgaatttctagaatcagtttcccacattctttgaaggtcccctggcaagcttcctgatgcacccactacaattgcattatcatcaatgcattctctaatcaatcctagagctgatgtctgagtaataactccgctagttaattctttaaattcttccaggcttctttcatttcttgattttataagtggagtgaaatcttttctatattttatattaattaacctatccatctcctctctccatgcttgttttgcatttttaatctcatcttcatatgatgaaacataattttctttttctaataaattactaagtttctcaatacaaactttagcatcaccaaccatcttattggaatccaatttacttgcatgaaattttgataaatttattgttataaaatctacttctggatttttaaataaagatttagatgatgtcgtaaaatctgaaaatcttgttcctattcctattactaaatctgcatcttttgcaattgtatttgcagccaaatttcccgttactcctattccacctaaattcatatggtgacttcctcttatagcactttttcctgcttgcgtttctcctattggaatattaaacttttctgcaaatttttcaagtacttctccagcttctgaatatctaacaccaccgccacaaattattattggtttctttctcttagttattaattcaacacattctttaaactcttcatccacagctatcggtcttgttattttatgagtacgttttttaaagaaatattctgggaagtcaaaactttcaccttgaacatcttgtggtaatgctatgcacacagctccagtatctgatggatctgtaagaactcgcattgcattaatcattgcagacattaattgctctggtctggaaactctatcccaatacttacatactggcttaaatacatcattagttgtaattcccatattataagattgttcaatttgttgaagtacaggatctggctgtctgctagcaaatgaatctcctggaaacataagtaatggaatattattaactgttgcagtagctgctgctgtaaccatattagctgctcctggtcctattgatgttgaacatgctattatctttcttctattattttgtttagcaaaagctgatgcaacatgtgccattccttgttcgtttcttccttgataaacttttaagtttcctggatcttcatcaagtgcttgtccaagtcctaaaactattccatgcccaaatatagtaaagattccatcaacaaatcgttcctctttcccatcaaataaaatgtattgattatttaaaaatcttactagtgcttgagctgttgtcattttaatagaattcatctctttacctccctttactcctcaggccatattttagcattcttattccaaagccatttatgttcatctacatctattctatctttccaaggattattttctagatgcctaatcatccaacaatagtacattgcatatcctggagcagatgtttgcggatgtacatctcccccaattattgttgcaaagctattatctagaatcttgtatgctttatctccatttaagcacaatccaaatccttgtggtttattgaacttataaaagtaaacttctggttgaggatggtaatgtggaggataacttgaccattttcctggatatgttataacttctccaataaccatattggaatacggtgcatttttataatcaaatattgttcttaccactcttctagctgtaccattccaggtcccttctccaaagatttcactcttacattcacttggtgaatataactttggttcaaaatatcccaaattttcagtgctttgaattaatatctcactatcttcactggcttcaacagtaattccaacattcttaggtacatgtaagcaccatggatcctcatcaaatactgattttctttcaatagacttagaattttcaagccaatttattttcacttgtcctgtcagaagtaaaacagctatttccttatcactttttagatattctcttctttgatttttttctaatttttctaccgttacatccattaacatttctttatttttaccattaatttgacataatatattctcgccattttccaatctatccaaattataaaccatattaactcctcctcttaagctctagctaccatatcaccatattcttctttttcttcttttataaaatttcttattgcttccactgtaggcatatcttgcgagcaactatgactagccactaacattgctgctgatgcacttccaaattctaatgaatctataatgctccatccttctaataaaccatataggaatgctgatgcataagcatctccaccaccaaatgatttaagtagcttaaccggaaatggctttatattgtatgactttccatcactagtgtaagcagtagatccttctttaccatgcttaattactactattttgtttccgtaatctaaccatcttttcgctgtttcttcatctgaatttttctctctagtaattaatttttccattaaatcaaattcttctcgtgagcccattataatatcgctttgttttccagcaatcgaatagtatatagctatttcatcactatttttccaattataggctctataatccacatcaaatattacaactgtattattccttttagctaattccagcgctttcaatgctgcttctcttgatggacttttggcaagagctgtccctgatatcactattgccttagtattttttatatattcctcgtcgatttcatcaacattcaattctaaatccgcaattccctgtctatacattaatatactactctctgttgggcttgctatttcagtaaaagttaatcctaaattttctccattctttgaatactttatttgagatgtatctatcccttcattatcgaaataattaacaacaaattctccaaactgatcctttgatactttgccaatgaatccaatctttttacctaatcttgcaagtccaactgcaatattagctggtgatcctcctaaatattttttaaaagtgctactttcagataaaggcttgttaatatctataggattaaaatcaattgcgactcttcctataggtactatatccatttttcttgctttatcaaatttaatatattccatttatagttcctccttatgctttatttgaactgccaaatatttctatatgctttttaacattttcgtaggcagccttaatctctgtttcatgtaatttaaaataatcataatcttctaatttcttgtttaattcttttacgctttccttaactgaattaaatgtagctgttgcaatatttattttttttattcccattgtcgcacactttttaaaatcctcagctgatattccagatcctccatgtaaaaccaacggtattggtatgttattttgtaaatttttaagtacgtcaaacctcaaattaggctctccactatatactccatgagcgttgcctattgctacagccaaagcatctatttctgtattttcaaaaaactttttagcactttctaacttagtgacttgaatctctatttctttacttccatcttcactgccaccaacatgtccaatttcagcttcaactgatgcattatataatttcgccatgcttgatattttattagttatttttatattttcttcaatctctaaatgtgatccatcgatcattactgatgtaaatcctaaatctaaagccttctttacattctcaattgtagctccatgatcaaaatgtactgctactggcacttttgaattttcagcagcttttaccatcattgaaccaataagttctaaaggtgaatattttaatcttacttcagctatttgaagtataattggagattttaattcttctgctgcttttatagctcccataaccatttccatattagcaacgctaaaacttccaactgcataattttcttttaaagcactttttaaaagtcccctcatatctactaatggcatttcatttacctccagagctctttatatatagaaacaatatcttcatgtgtaatatttttaattgtattgcttggactaccgctttcaattgcatcatcagccattttatctaaattatcgaaaaacttgttccggtctattccatactcttctaatgaaggtatttgaagctccttacacaaaccgtttacagcatcaacaaatttttttgaagcaatttcatctgatgtttcctcattaacaatttttatatttctagcaagttcagcaaatctagagtaagcaccgtctagtacaaatgtaagacattccttcaacaacattgcattagatattccatgtgccacatgaaataatgcacctatcggtctgctcattccatgcactattgttacagatgaattgttaaaagcaattcctccttctaatgctgcaatagacatttgagtacgtgcttcttcatttttaggatctttaaatgctataggtaaatacttaaatattctttttacagcagaaattgcaaatacatcggaaagtggttgagatttttttgatgtatatgcttcaattgcatgtgttaacgcatctattcctgttgctgctgtagtttttgctggagctgtcattgtaaatataggatctattatcgctaacgtcggaagtaatgaacttccctttataagcatctttacatcattttctgtatctgatattatcgtaaattgagttgcttctgatccagttcctgctgtagttggtattgcaaccactttaggtaattgatttgttatctgctttcccataaagtctgatatctttccgtcattactagtcatcattgcaatggctttcgccgaatctattgggcttcctcctccaatagctataagaaaatcacaattttcttctttaaatatttctacccccttttctaccattaaatcagttggctcaccatttatatcactatatattttgtaataaattttctcttcctctaatatgttagttaacatttttacgtttcctaaactgaccataacgttatcagtaacgattaacgctttcttacccaataattttagatattctttactattgatgagggctttccctcctgttaatattttcttcggcatcatgaactcatttgacattttagtcacctcactaacttttgattaactattgattactttttgattaagttattgttactttatgatttaattataaatatgtttttatcacttgtcaataattacatattgattttgtaacttttttctaaatataaaattaaattctgtaattgctttcacttttaaattctttggtttataatattaaattaataatagtaattctattttgacttataggagtgaattttaatgcgttctaagagaattgatttaatagaaaaatacatatataagcataagactatctctattgataaactatgcgaagaatttaagatgtcaaaaaatacaattcgtagagatatagacactttagttgataaagggataataaaaaaggtttatggtggagtaacaataaacaataataataaagaacttttgtccttcgaagaaagaactataaaaaataattttgccaaatcatctatcgccgaaaaagcagcacaatttgttgaagatggtgattctatttttatagattcaggtacaacaacttttaatatgattgaatatttaaaagacaagaaaaacattactatttttacaaacaacttaaatgttatagtccaagcaattccatatgaaaatattgaaataatttgtctttctggaaaactaactagaaaaacatcttcctttactggattaactgctcctgatattttatcagcttataacttaaataaatgtttcatggcttgtactggaatttcactcgaaaacggtgtcactaatacctctccagacgagtataaaataaaaaaagcagcagtatctaaaagttctaaatgttttttattagctgatacctcaaaatttgatgttgtatctttgatgacattttgtgatataaaagatcttgattatgttataacaaatgattctcctcccgaaaagtatacagactattttcataattataatattgaacttatagtaactaacgaaaaatagagatagcagtttttactctgctatctcttttataaattttcttattatacatttacaaaacacttaccacttatttcacatatatcctcaattgatataaatgctgtttaaatgccctcttttcattaaagcactatatatctttcccatctttccacaaaagcatttatagtaatactccatttcaaaataattatcacttatataatttgtaatggtaatctgcgaaaatctttctatttaaattttagaaattatttcaatcaaatcatttactttataatcggcttctgactgatctatgtagtaatcttttggctctaaagctacaactgttagccctgatgcttttgctgctctaattcctaatgctgaatcttctactactagaacttctgtttccaatacttctaatgcttctatagctctaatgtagatctctggatctggtttactttgcgtgcactcttcaccactaattacaaaatcaatacaacttgcaattccgcattcttctatcatccttaaaatttcttttctttctgaagatgatgcaatagctatttttatatttctatcttttaattccctaatcacttctttaactgaaggattcaatatttcttgaaaacaaacttcatgttccttacaatactttgaatattcttcttttaaaatattacgtttttcatcatcattaggaaccaacatttcccatatcatcccgtttgttgatccaatgaaatcttcaatttttcttgtatcaggttctatctttaattcatcaaagaatttcatccttcttttaaaataaaaactttcagtattcactaaaactccatccatatcaaaaattactgcttgtttcaatttctttcctcccaaatcaatcgctcaatacaatatcaaaaattaatctaatttctaaatctgatatctttattgtatattccttttcaatttcactaaaggcataccttataatttctatctttcttttttctctttgtacaaattccttaatgtcttcctgcatgtcaacatcttcttttcttaaaattctctctaccatacatgatgcatgaagataaagtaagaaccttttattgttagacatcttaatacctagtttttcttccattttatcaactgcatcttgtacaaaattaagtactttatttacatctaaaattgtcagcttctcaattattttctttatagaaaaattaaataccaaatcttttttcaactgctcttcatctatattaaaattacacctcagtatattaatgaatgaatcaatatcttccccaccaatcagatgatccagtcctatatatggaattccttcaacttttggatctacagttcctacgatggctagtacatcatacatttgaaacggcaattccttttgtttattttgatacagcttatgataatcatatgacataattacaaaagaagggtcctcatgctttaggctcttttgtaatatatcttggatttgaatcgcacttcccatacctgtataacagcaggttaaaatagcttttttctttttttcaactggataaactaattgtttattaatttgtacattctttaaaatctgttcattaatttcgataatatttttatcttgtaaaagcatacttccaatttctaataccaatggtgttgagacaaaatcaattaataataatggacctttaatcttcttttccaaacgatttctaagatcaaaaagtgatcccatatcaactagcaaaataagcccattttcggtactgttattatcaataaaatctaatattttctcctctatatgatcaattgtagtatcaataggcatatcaatagcttggaaaaagtttttccttaacatcctattagctacattcgccatactacttgctgtagagtagccgtgagctaaaacaatacttttaatttcatttttcaggctctgtatattcatgctttttagatagaatgaaataaaaattaaatcttcgtcaagaacctgaaagtctaagcgttcactcaaatgtgtaagcatacgcctggaaagccataaaatattcttcatataactttcaatgaagtttataatttttgggcggatactattccaatcagggtgattaattaaaatttcttgttcttccttaaaataaagcaaatatgctattgaaagaattttatttccatcctgttcaaagccataattttcttccatatatttaaaagtagattttatattaaacgttaatacagaaaaaaaagattgattgttagtaacttctgtattaaatgttaattcatcaagtaataaattcacatttttgaccatctctttagtataatgatcaaacataatttctccggactcaacctgtttaaatccttcaacaaattcaaaatatgtttttttaatgtttttctgttcatcactattaatattcaatagttctgggtgcagataatcataaatcctatcctgatatctacttgatatttgatgatataaactctcctttaattgattttcatttccaatcggtaaatctccaatgcgaactttaataatctcttgatctttcctcttagcatagctgcttccacaactgtattttacaatatttttaattttccctacatttccttcataattactaaaaagcaaaaaggaaattacctgctttgtaaccttaatagtgcgtttcaagatttcactttcttttaaaaagaaactatctattaggtgaattttttcttgttgaggtctttctgcaaaacttggaatattaacaataacgggaagtcttctaatgaaagtaggtaagaaagtagattggatagattctgtagttgcaaaaattaaccgtacctttgcttccttttttatgctattatcaccaataggagaatactcatttgaatccataaatgtaaaaagcttttcttgaccttcttctgttagtctatgcacttcatcaagaaataaaaccccaccatcagcactttcaagaagtccctttttatctttatctgctcctgtaaatgccccttttgtataaccaaataataaacttgataacaattctggattatgataatattgagcacaatttaaagaaataaatgaagacttgggatttattaatttttcttccaagcaataatcataaatacattttgccagatatgtttttcccgaaccacttgaacctaaaagcattataggaagaccattttcaggataaagcactgctgtctttatttgttcaatctgttcttttaagcttccttttgccccaattacactactccatatatctgtttttttaacgtttgaattttctttccataattcatctaaagtattatattcatcctgtgctggggtaaaatataatttcgagaaagtttctttatataaaaagattactggatattctttaatttttataatcctgccttgttttacttctttgttaagataactacttactgtacttctactaagctctactttttcagcaattgaattggctgaaaattcttttatattatctttagaaaattccttggtagcctcttttaaataattagatatatctattgccattctgaatgcccccttagttaataaaagttaaccttattattttataacatacatttagaataaggcatatgaaaaaataataattccaaaatattatgcatacttttaataaaaatgtactactccctatagtagtaggcctcttaagatgattccctacacaggatagctaaaaatggaataaaatatatttattatttttaaatttgcctaaagcaaagaaatcgaaaaatattcgatttccttacctgagtcatttttttgtatttaggattataagtagaacctgataacatacgtttaacgtaaactttattttaatattctaatttccacatatatcttcttttagttagtggatgctgacgtgcataagaaagttcttcagcatatacacggaatactgctgtaattaacattggattaaaataatcaataactgtttttgggataactgaagataatccataatctaaagcatcaataactgttgttttcgcttcaaaacgctttaagaatgttaatgcacgagcatcgattggacgagtgcttccctcattcattaacaaaataaatggtacatctttatctactatttcaaatggtccatggaaaaactctcctgaatggaaacttcctgaattaatccattgcatttccatcattaaacaaattgatgttgaataagcaacttcagctgttgcaccactactcattaagtaaatcattgaatcatttttataagcttcagcaaatctctttgcatctgctatcgctgattttgccgctgaatctgctaaatcatatatcttgctgaaagcaacctgtgcatcttcataatctttatatccttcatattgctctaatatttccactgcaagttcaagcgcataacccatcttttctaattttgcaccatagctttcagcaaatctatgacagataacataatcagcatcttttgtaagagccgaattctctgcacgagttaatgagattacatgtgcaccatattctttagccttagcattagcttgtactgtttcaggagtactaccgccaagtgaagcggatataacaattgcagttttatctaatgaagctattgtaccataattgaattcgttagcagtatagtgactaacacgtagatttttcgaattattttctaaaaaatattttgctggatataattctgcttttgaagctccacatcctacaaatataacacttctaatttcttcttgtttttcttttatttcttttataatttgttttggattcataataaatccctcctatatttttattttatatatatttacatccttttaaggaatgttttcaatttatttaaaaatacctaaaatactcaataatattccacctagaatacaaatcgcaagcatccatcctgttgatactttctttcttaataaccaatacataaagaatgttacgccaagtggtatactctgtggtattatcccatttaatacatcttgtaaaacaaatttttcaccaaactgcactggagttgtaattccaatcatactggccatcatagatccaataaccataagtccaacaatagaacaaatgtacattactttatccatgagcccttcattatagagctttgttaaatatttatttcccattgaataaccaattttcccaccataatacgtaacaagaaatgatggaataaatgaaataattattgctaatattggtcctaaaatactaccttgttgcgctaaattaatacctaatccaaaagccaatatacgtacagttccttgaaagaaagagtctcctactccagataatggtcccattaatgaagttttcatagcattaatcgattcaggattaaaattttctttgtcttcatagtattgttcttccattgaagcacttaatcctaaaacaaaagcatttgtttgaggtgtacaattataaaaattcatatggcgtctataagcttctttttttaattcatcatccttaggatctttatatatgttgtctaaaataggagcaattccatataaaaagcccatattcatttgtctttcatagttccatgaagcttgaattgcccaagaacgccatagaaatttcatatacttccatttatttggatcattttgtttttgtatattttgcatttttatacctcccatcaatctaaaatatctaattcatcaactatcttctcatttttaaatttaaattcagccaaaacaaatgctacaatacaagccgaaatagcaacaccagtcacacttaaattagaatatgctgtaataaaaaatcctcctaataaaaatggaagcatttttgttgacagcatagtgctaagcaataaagcaaatccataagctgttagaattttacttgataaatttagaccgtttgtaatccatgacggaataacttctacaatattttttactaaatctgttccaaaataaattgctaaaaatattggtacaaaatacattagtgaatacaaaaatgttccccaaacaatatgaatattacaggcttttttatattccccattttcaattaacgagtcagctttatgagttaagtttgcaagaatagttctcattaaaactccaagcatttgtccaagcaccgcaattggaatcgcaatagttagtgctgcctctgaatccgcatttgataaaatagcaaacgatgtagcaataatggatgccatattcatatctggtggtgctgccgctcctatgtttactaatcctaaagaaattaattcaagagcagctccaaccatcaatcctttttgaatatcgcctaaaacgagccctacaagcgtactaactattaacggcctttctaaattcattctgcctaaaagtctagagtctaaaatacaaataacaccaatgaaacctaataatattgacttaattaacattcttgatcctcctttttatattttagaagttaaatcttctctctttgaagtaggaacttgttgcatatataggttaatccccattgctttcagctttttggtatcttctaattcttctggatttaggaaaatagcattactatattgctttgaattttctttatttgcaattcccccataattaatttctttaatactagagcagcttttacagaactctaatgcttctttagtacctctaaaaacaatcataatattatcttttaattgttcaactttagacattctcgctaatatgtcgtttaccgaaaatatatttaaagttactccaactggttttgataagtttagcgaaacttttttcatttcatcatttgcagtttcatcatctacaacaataattcttgaaatccctaaactttttgtccatgaaaaaactacttgtccatgtaataaacggtgatcgattcttaccaatttaatcataaatcttcctcctttatatttttacattcattaagcaatttattgcagtcaactattccctgctgactttctttaataatctgctgcaatagactttcagaaatttcatttgcttgagtagcaactgaaataattataggtaaattcattcctgaaataacatgtattttaggatattcttttattaaagacatcatttctgtattaacgcttccgccaagaatatctgtgaaaataaatatatctgcctcaatgtatttttctcttactattttttctactatttccctaacgtttacttcttcgtttctataagatgaaaaagcttcaaccatagatacatctccaattatcatacccaaagtatccttcattccctttgccagatcaccatgactagctaaaataatttgtatcattaagattcacctccattctatgtaattattattagcaataaccgtgccaaaaaacagtttgtattcaaaaacatacccattgggtcatttctatatacattagtaaataaaaccaacagttaaaaaaagattaattgaagtgtttgagcaaagtgttgaaaaaaataagcttgatgaaaagtgtaattcacttttcatcaagcttattattttctatttaatttttgaaattctattttaactccattaattataattgtaataaaagtaattatatcttatttaatacttacagtcctaaattcaatcctatcacttctatggtgtgctgttgaaaattcaaaaggctggccattgtctaaaaaccccacctgctccacttccaatattggaaagttattttctatttctagatattcctgttccaactcatttggtaaaatagctcgaataatcctatgagcactttttattttaagtttaagatttttttcaatgtaaccataaactgaactcgttaaaatatcgttttttatgccaggtataaggcctattggcatatatgtatactcaattacatatggactatcatccgcgtatctagttcttattacataataaacaaagtcatcagtagtaatctttagcttagttgcaatttcttccgttgggtgaattacttcaaatcttataattttagatgttacttttttatccttatgggcttctgaaaatccttcaaattgttttgctaaacttaattccagtaccccctcttcatcaagagcttttacaaatgttccagaacctcttctctttattactaacccttgaattaccagttcatcaacagctttttttattgttattctactaaccccataatattcacacatttctttttctaaaggcaactgttcattaggattatatttaccattcaatattctatttcttatgtcttcagcaatttcctcatattttgccattatattcacctttctccttatagtataacttatatacatttttatcatatcatttatatattaattatatcatttctatacattattaaacacttaaattaagtttaattatacaaattataaggcaattatatatgttcaataaaataatatttacatatataaattattagtatctttattcaattaaaatctactgtttataatgactttactagttgtgttaagcacatctagtaaaaaaatccctgaacatcataactctaacacacaattcatattaaaatatgatataaattgtacaaaaaaagaaatcattcttgatttccttcaaaataataaaaactatattaaaaaactcaccgttattttaatatagtttaaaatcttaatttcacctattttacaattacttaattgcatttgccatttcttcatctattattactgttacatctttatgcatgtgtaacatagttgctggattatgagttgtaatatttcctttaaataatccttttattgcttctgctttatcttgacctcttactaacaatactatttttctagctttcattatttgaccaagacccatagataacgcctttgtaggtacttcatctatagatttgaaaaatctagaatttgcctctattgtagttttagttaaacctgttacatgagtttctgctattaaaaaatcatctggttcattgaatgcaatatggccattagcacctattccaaggatttgtatatcaatgccacctaattcatccacttttttatcataattcttagcttcttcatcaagattttctgctaagccatttggaacaaatgtatttgctttatttatattaacatgattaaataacttttcattcataaaatatctgtagctttgaggatcttctcctccaagtccaacatattcatctaagtttactgtttttatattagaaaaatctatttctttatttctgttcatttctataagctttttatataaaccttcaggagtacttcctgtagctagtcctaggacagcatttgttttctcagaaattacctccttaaatattttagctgcaacttcactcatttcttcataatctttaactactagtaacttcattattattacgctcctttgatgttaattttttaaacaaaccctgtatctatatttatctcctctagctattgttatggtatattcaacaatctcattttgctcatatgctattctttcaaactttaatcctgcctgcccttgaggtatttctaaataaacactttctaatttatttatcaaaacactttctattacttcttcagcagatgtaatgttaatattaaaagtatttcttaatatctcatataatggatttttttctatcatatccttagtaagctgcttaaatctttcatacggcaaataagtcatttcatatatcatgggaatgttatccgcaatccttattctcgagattttatatacaagctcgttcttttctatatttaattttttagacactttgctgttggcttccattatttcaaaatttaataatttagaagtcggattttttccacgttttttcatttcctcagtaaaagatgatacctttattaaatcttgttctacaactcttggcgaaatgaaatttccttttccttgaactttataaatataattatttttttccaactcatctaatgcttctcttactgtagttctgctaacagcatattttttgcatatttctctttcggagtccaatttttcattttcctccatgctgctttctattttttcaatgagaatattcattagttggacatacaaaggaatattagaatttttatttatcgtactcataagtgcacctcttttagttctagtagttttcccaacaattatactattcttgtacacaaaagaaaatataaatcaaataatttaaaatttcctataaacgcttcttttaagtactttcaattctgtaattccttaaataattaatatttttcaagtggtaattaccactaagagaattataatttattcttttaattctgtcaacatacacttgaaaaattctttatacatgctatatactgaatatataaactgataatgtccacttactataatatatgaaatttgacttaaaaggagaagaaatatgttaataagaaattgtaatataatttacctagacaagatagaacaaggctcaattctagttgaagatgggaaaattaaagagataaatccttccaatatagatacagatagcattttagatgcgaatggtctatatgtttcacctggttttattgatgttcatatacacggcgcagggggctcagatacaatggacggtaccagtgaatcaatcaataccatttctaaaactataattaaacacggaacaacttcttttactcctacaactatgactgttgctgtggacgatataagaaaatctttagatgcaattaaaaaggtaaaagaaaaaggttcagacggtgctcatatccttggagtgcacttagaaggtccgtttgtgagtccgaaagcaattggtgctcaaaatcctaattatattttggcgccatctatttcaacctacaatgatatagttaaggattatgaggatattattatatctataacattagccccagaagttgaaggtgctaaagaacttattaagtatttatcctcaattggaatagtatgctcattaggtcatagcagcgctacgtatgaagaggctatggaagctattgaatgtggtgcttgccatgcaactcatctttttaatgctatgactcctttaactcacagaaatccaggagtagtaggagctgtatttgacagtgatataacaactgaaactatttcagatggaattcatatttcatacccagctttaagaattgcttacaaacaaaaaggtactgataatgttttattaatctctgatgctatgatggcttgctgcatgcctaatggtaattactccttaggaggtcaagatgttattgttaatgatggtgaggcacgcttaaaaaatggtgctttagctggttctgttcttacccttgataaagcagtaaaaaatgtatacaaaaactctaatctaccactttatgaagtaataaaaatggcatcttataatggtgctaaacattgtaaagttgaggatcgaaaaggccaaattaaggaaggctatgatgcagatttgatattctttgatgatgatataaatataaaaaaggtattagttttgggtaaggaagtatactcagaataactattatagtttttatctgtatttccatttttaaaaacccatggcataaaactatataagcagatatataaccaatccactgaacatctaggataatctattatcataatcaaagagaagactgagttatttcaaaattaataataaagtgatcaattgccaatttttaaatggtgcatctaagaatcactttccttttaaataactcagtcattataaataattcaatactgtaatttatagaattttttctctctgaagataattacataatgcacctaatttattagcatcatttccaaatacacatgtttttagaaatggttttattgtcccttccaaatcactattcataagtgcatccaatctcttgtttatttcgtcaacatattctggtctttcgcttatagccccacctaaaataataacttctggatcataagtatattgaatattgtatattcctactgccataatgaaatagtacttattcacttcattaattgctatttcatcacctttattacataggtgaaaaacttgaacaccatcaagacttccttcttctagtccttttaaatttgcaacctttcttgctaatgctgtagtagatcctgcttgactccagcttgtaaatttaggttctccatctaattcacaagttattgagcagtaaccaaattctcctccatgcttatgaattccgccatgaatctttttatctttaactatagctccgcctattcctgatccacatacaacaaaggctaaatccttgttgtcctttccagcaccaagccagcactctccaagagctgcacaatttgcatcattttcaagctcgacatttaaacctgtagtttcttttaaaatttctttaaagttaggtccgtgtatatatggaatagcacttatacctccaattactccagtttcactatccactgcccctggagcacttattgcaattcctttaacatcatatttatctttcatttcgttagttgtttttgctaattctgaaaaaaactcttctctattactcgaaacattgaatttgccactttctacaaaactaccatctttattaattacagaccacttaacagcacttccaccgatatcaaaaaccataaattttctcatctaaatcacctctattttaaaatttatttatacaatctttctatttttctctttgcaaatagttatataatgctccaagcttattcgcatcgtttccaaattggcaccttttaataactggtcttattgttccttctaagtcgctattcatcattatatccagtcttttatttatttcttctaaatactctgttctttcacttattgctccgcctaagattataacttctggatcaaagatatactgaatattatatatccctactgccattgtgaagtaatatttatttacttcctgaagcgcaatcatatcacctttactacacatttcaaagacttcaattccattaatgctatcttcatctaaaccttttaactgagcaacatttcttgctaatgctatagtagaccctgaatgactccaatttgttgctttaattttatttaaatcgaaatttattgagcaataaccaaattctccaccatgcttatgcactccaacatgaacttttttatctttaactacggctccacctattcctgttccacaaactacaaatgctaaatcattattatccttacctgctccaagccaacactctccaagggctgcgcaattagcatcattttcaagttctacattcaaatttgtggccttacctattatttctttaaaattgggtccgtgtatgtaaggtatagcagttattccgccaattaatccagtatcactgtctacagcccctggcgcacttattgcaacccctttaacatcatactttaatttcattttacctgttatatttgttatttcaccaaaaaactcttctgcagtttcagggcaagtaaacttatcactttctttaaaatcacctgcttcatctattacagaccacttagtagaagttccacctacatcaaaaaccataaaatttctcatttatgatcctccttatataattcaaatagccgtctcaaattttaacttttgagacagcctattatttattaattactgattttcaactagaatccgttgttttctacaacttctttaatccatcttcctgatttcttaatagttttcttttgagttgctaaatctacggcaataaacccatatctgtttttatatgcattactccatgaccagcaatcaataggagtccatgtatggtatccaaaacagttagatccttcgcttatacctttatgaagatactctaaatgttctttatagaaatctattctgtagtcatcttctattataccgtcagcatttatatatttttcttcgccttcaacacccataccattttcagaaatataccaaggaatattgttataattatctctaatatttatcgcaatgtcatacatacattgaggatatatctcccatcctctatatggattcattcttcttcctggcatttcgtaattatcaaaatatttgtctggcatccagccttttgattcatctatttctgattctttcgctttaactcttctaggttggtagtagtttacccctaagaaatcaactgtattgtttttaattatttctaactcttcttctgttgactcccacattacattatctttctctaatatttcaagaagtatttccggaaaatgtcctttaattgcaggatctaagaatgaagtattaaagaaactatcccctatttgagctgctcttacatcttcttcactatttgatcttggatatgcaggtgttaaattaagaactattcctatttttccaccatctttatcacatcccatagctctaaatgcttctataacttttgctgatgctaaatttaaattatataatacttgtacagcttttttaccatcaactaattttggatagtgaaattgatataaatattctccttcaactacaactataggttcattaaatgtagtccagtatttaactctatcaccaaataactcaaagcatttttttgcaaaaaccacaaataaatctactacgtgtttagattcccatccaccatattgatcatataactcaactggcaaatcaaaatgatgtaaattcataactggaagaagtccattttcaatacattcatcaattacttcattatagaatctaacaccatcttcatcaacttccccagtttcaaagtcttttataagccttgtccattgaattgatgttctaaaactatttaatcctgtttctttaactaatgctaagtcttctttatggctattatagaaatttgatgctacattagggccaacttcatcaaaaaatgcttctggctctatgtcaaaccaatgatcaaatacgctatcatgttttttattaaatcttccttcactttgaggacctgatgttgctgacccccaccaaaaattttctgggaatttaaattgtatactcatattatgcctcctagatttccttattttaattatgtgtttttataaattgttgtatatatttaaattaaaatgaatatatcttttaatttcaaacttttgttataacattgctgctccaataaggcctgcattatcgccaatttgtgcgattcttatgtctaccatagatggatctgcaaccttagttttagtgcattcaataatctttggtaataggtaagtattatatattattactgcaccaccaataactacagtttctggatctaccacagatattatgtttgctattccaattgaaatattattaatccacttttctattacttgaacagctttttcatcgttattttcatataaatcaaacacttcttttgtgcttaatgcttttccatagacttctgatgctactctagctatatttacaccgctgcattgcccttcaaagccacccttatttgtacctgcgtgactatatttatcttcattaattatcatattgtaaatttctgctgcttgactgtgtgctccattgataatcttcttatcaagaattaaggccccaccaactccagttgaaacggttatataaaatactgattcacagtcctttgcactaccaaccaagctttctgcaagacctgctacatttgcatcgttattaacttgaactgggacacctaacttttcttttaagtactcttttatattaaagttttcccatcctttcaagttaactggatttaataatttacctactttcaaatctaaaggaccaggtgctcctactccaactttttctatttcataattactccattgttcttttatttgaccaattaatttatctaagttatatgcagctcctttttgtacttcgtttttaactttgaatatttctactatatttccttctttagatattactgcagcccttaagtttgtcccaccaatatcaattccgattaaatacattatttaataacctcctgtcgttaaagtaatccataaaaccttttacatataaattttaatatctcttattcaaatttattccttacataaaaaagcttatatatcttctatattataaatatatatctttacaatataaatgtctatatttttattaataaaaatataactttgttttcaaataattaattcattatataaaaatagataataaacatatacaatatatttattatctaataatcttttatatttattgcgagtgttctcgaattctagttcgagactctgcgcatttcttattagcttcttctataatcgacttagtatcagatgctattacatacttttgaacaaaatcgctatttaatccaacatcatttttaatattggaatactcattgtgaatttccaattccttattatctttattcttaatgacactttcttgagtttgtattggtaaattgaatgtttctaattcctttaacatttctatgtttctctcactaccttttaatgaagacattatatttacagctttcgcatatctatcatcattaaacataaattttaaaaattctttagatatatccggatgcttagtatttttacttattgcaaatttataatctcctactatattaattatattactttctggaattgggaatattccaaactcttctttatacgcccccatatcttctaattggtatttaaaatcagaattccagacaatcatcgcagaccttttattaatcagatcatttttacactgctgccaatcataattatataaatcattttcacaatatttatttttaaatatttctcttatgaattgtagagatttatatactccattttcgtaatcaaatatattctctgattttgttattgtattctcttcaaggtttgaatcaaataaatatggaatgctatcagaccacatgctcattacccattgttgtttataattcaaagcaattggagtaactcctatttccttaattttttggcaagcttcaaaaaattcttttttagtcttaggaatctcttttatattcgcatccttaaatatttctttgttataaattactccttcccaaagcatagatgtagaaagtgtatataacttattatcttttcctgttgtgtaattgtatatattttcatcgttaaatcctaaatcatctattggcaaaaaatatttgttgtattcttctgtatctatagcaccaggcaccaaggtgatatctgccaactctcccgcaactgctcttctttctaatatttcttcgacatcccctattaattctaagtttattttaacctttggatgcattttttcaaattcttttattaatgaatttagctcattgctcttatctattctattacttacaaaagtgacggatccatcaagttcattattgctcttatcatcaccagagtatcctactatatatttattcagaaaaataaatccatatatgcccaccaaaattgttaacataaatgaagttataattttaacaagcttataatattttttcacaaggctccctcatctctaacacaattaaagctcaaaacattttgatttttttaatttttttctttgtcatttctatacttattaggagtaattccagttatctttttaaatgctctcccaaaagttattgaatcattatatcccaccttctctcctacttcataaatttttagatttgtggttaacaataattcctttgcttttttaattctataattggataaaaaatcataaaagccttctccagtttctttcttaaacagttctgataaataattttggcttagaagcacctcatttgctacgtcctttaatgttatatttttattgaaattacctatgatatattgtttagctaagtttatcgctattacatttggattaatatccttatcatctaatgtttttaatagtttgtctgattcatttatgaaatactttttagaactactatcataatacattctttccttaagcttttttacaagcttataatactctcttaatttccaaacctgatcagtatactttagtatataaacatttctattattatttataaaaatctctgtttcattttctattctttcatttacttcatctacacttctataattcttgctatcaaagtaaaaaattatgtaaacactattttccagattaaaaacagcatattctaattttttatactcagttattattaaatttataaattcttttaatatatttgcattacactcttttctatcaataacaatcattttataaatatattcttcacttaactgcatattctctaataacaactcatctgttttgaaattgatatccttattagtaaataaaatatgtttaaaaaactctttttttagtacctcaattgatttatttaatattttattgtttctatctatatcttttcttttagcttcaacctctttcattatattcctcaaatcatcttgcttaatcggtttcaacaaatagttgagagctcctgctttcatggtatctctaacataatcaaattcatcatatccacttaaaactataaatataggaggcttctttaactcttcttgagctttctctattaattctattccagtcataactggcatttttatatctgttattactaaatcaacactttcctcattttccttcaaataatttagtgccaacaggccattttgaaattcatcaataacttcatgttcatcgaataatctttttattattttacttaatcctatccttataatcttatcgtcatcaactactactattttcatttttcctccatattgaatattcatttaagttgctatatatttaaattatacattagtttgtctggattagaaatatagtttttaatggagctaaattcattattttattaaacatcaaagccttcatcattaaaatttcttatatatcactgcacaaactattttaatatttgaaattaacctttttatcattttcttagtttaataatttaatttatagttaggtgaatttatgaattttaataataatatttcaataaaaaaattaacgctactcatttttataatcatgtatattatatttcttataataacaagtctaaatttatattcttattcaaaatacgaatttaataagactgaaaaaattatagaaaattttaatatcagtcaaagtcagcaagtagttgaaaaattaaataatatttatgatgtatcaaaataccctttactcattcctaaagtagaagaattacattctattctatctgctaataaatcttatgatataagcgaatataattatttgaaatatctttgtgatatgatattaattcaaaacaactctattaatggtgcttatatatatgatttaaatggaagaggtgcttcaagcacgcgtaatagttcaaattacaaacttaaaaatccagtatcagaaaaatggtttatagattcattaagctccaatgagtttacatcaattttcccaaatataaatgcgagcgatatatttcagtttacttcacaagactctaagcaattaatagcattaactagaaaaataatagatattaaaacgagaaaagtaactggagtattattgataactatatcaattgatgaaatacgcgatttattaataaaagatcatcttccatttaataatcaaatagtctcaatatatgatgttactggaaaattaattttgactacaagtgaagaatataatccatttattccttcatatgatcaactgcataacgcaactacttcacctaatatacaatatataaagaataatattgattatgtagtctcatataacattataccttcaacaaactggataatcgtaaactcaattccaaaatcagatgcataccatatagatagcctatatattttttcattcattattaatatagctttcttcctaattttatttatagtgctatatatattttttataaaaagagtatttaatcctctaaagtttttaatcaaaaatatggagagtaatattgaaagtaatttggactataaagttacttataccaaaaatgatgagattggaatattagtaaagtcttataatgaaatgaaaagcagaataagtaacttaattaacattaactataaaagtcaaattgagcataaagaattggaacttagacaacttcaaaatcaaattaatcctcattttatatataatacattagaatcaattcgcatgatggcagaaataaatgacgatatagaaacctcaaccatgtctgaatattttggctctattataagatatagtatgaatagaaaaataaatacagttttattaaaagaagagataagcattatcgagaattacatatatcttcaaaaaattagatttgatcaattgtttaccatagaaaatctgattaatcaaaaggttcttaattgcgaaataataaaaatgataatccaaccactaattgaaaattctatttatcatggattaagcgaatgcagtggtaatggaaaaataataattcaaggcgaacaggtaaatgataatttaatattaactatttctgataatggaatcggaattgatgataaaaaattaaagaagttaaatgactatattaatgataaaaataatgattttagtggtacagctttaaggaatataaataaaagattaaagctgaattacggtaatgactatggattagaaatttatagtgctctcggaaaaggaacatctatgatattaactatcccttatattaaaaagtaaaactaagtccttggcaagaaccatggacttagttttatcttttccatttataaatcttttcagaaaaagtactggttatcattggatttatcataaaatttattttctctatatagaccattgcttctaataactaatcactaatttcttagttatctcttattattaatccgctattattctaagctccataccaaaagtaatacaaaaataccccaagtacataagcccctaataacataagaattgcacctacaatacgaataaatcctatgtatttattgaaatatgactgatttcttctatacttatcccaattacctggtacaagaaaatcaatgtaactcgattttttcataaatataattgttccaccaaatacaatgcaaaataatccaaaaattaactgcataatacctccctaacttcaaaatagataacgctattctagaacttaatttttagccttttacagctccgtctgttaaaccactataaatttgcttttggaaaataaggaatataattagcgctggtaatattgtaataagcactcctgcgcaaatatagttatattgacttccgtaaggtccagtaaaagtaaacagtgcagttgatattgttttaagatcttttgattgtaagtataaattggacatataatattcattataaataccaacacattttaaaattgtaactgtaacaattgctggcttcaatagaggaagtaaaattctaaagaatactccaaagtaagtacatccatctaaaattgcagattcatctaatgatactggaagattttcaaaaaactgtagaaatatataaatagaaattacatctgtgcccgccattacaagcatatatcctggtaaagtatttattaaattaagactgtacataattttatataccgttacttgagtcgcaatacctggaagtaatgctgcaaataaaaatagatttctgattaatgcatttccacggaatacaaatctatttaatacatatgcaatcattgttcccataataatagaaaaaattaaaacaacaattaaaactaaaaatgtatttctaaaaccaactaacatatttgctttcttaaatgcaataacgaaattattaaaataagtccaatttctaggcaaagtcatcggactagttgattggtattcttcatcagttttaaatgctgtaaatacacacactaaaacaggtattatagcaacaaatgcaccaaatactaaaacacaatatttcaatattcctaaaactatcgtttgaagctttttactttccatctctaacttgtcctccttgagtattttcaacttttgctttaagcattttctttttattttttttagctcttaatgcttccttttcatcagcatccgtaaataagtaattaaagaatactttttgagcaatagcgcacaaaataataatcactaaaagaacaactgccatagctgatgctaaacctaccttttgattctcataagcaattctattcattattacaaaataagtaccagtacccatattaccttttgtaattacatatggaggctcaaaggcacttaatgatccagttatagaaagaatcatatttaatataactatgttcttaatgcctggtagcataatatataaaaatctttggagtttgtttgcaccatctatatctgctgcttcatataatgtttggtcaactgacattatagcaccaataaataaaaccatattttgtcccatatatctccaaactgatgtagctgccaatgatccattattaatgtttgtatcttgtatccaataaggtagttgatctaaatggaatccaacagcctgcaaaagtgaatctaaaacaaacccacgcgcataaaagaatttaaaaataaaaccaacagcaattccgctaatcaaataaggaaagaacattgcacctttaatgaaagcccctccctttgttttgaagcttaaaatacttgcaaagaaaagagcaatacccaattgaacgaatgatgcagccatataataaaaacttaacttcaaggctttaaaacaatcatcacgttgaaatacatctacataattctgtagcccgacccattcttgtggaccagtatacttcatattataaaaactaaattctatcattttataaaatggtaaataagtaaaaactataagtaataataatggtaaaaatgaaaaactacaaattactaatcgcttttgtacttttccgcttttgaaccatctaacaaaattaaattgttcttttgacgttatatcattactactccccgtataattcatatcttcctccaattatgtctgaattaaattacataatttaattcagacagtattaaaacttattattcttattatttatttacatctacttttaatttttgctgtgcaacagaccattttgcattccaatcatccataatttgatcaactgttttatttccatgtaatgcagcctctactatttcacactttttattattatctttattaagtccaacttctgattcattatttatatcattaaataatgattcttctccactttttgctggattgtcaattactagttgtacatctttaaaatcatttaatacatctggaagtttttcagatttaagagcaggaatactaccttcatccttgtacataggagatttttctactaaccattttatataaagcattgatgcaatttggttctcattagaagactttttgttaacaccgaaagaataattaccaccagctgttgcatattgtttaccattaactgttattgggaatggcatataaccaacatcatctttcttatctccggcatcctttatttgattaacagcccaagatccaagtaccatgcatccaatttcacctctatttaacattcctttcgagctttcccaatcagttcctgtagggtcattttcaattaatttctttgaaacagcttgatataatgtattataaattgcataagggcctgtcccatctgaattttttgcaaatggatttttcatatgaactattttattattcataaaatccgcatctcctgttgctgtcccaccaatataagcatcccaagctcctacagtccatgctgctgcaaagttagtatacattggaactgcttttgtattatctttaattttttgtaaatcggctaaaaattcatctggagtctttggcattgttgtaattccagcatccttccaaacctttttattgtatacaataccgttagctgttcctccatttgctataccatattgctttccaccatattgagatgtcactccaaaattataaattccatctaatgtacttgtatcccctaattcaataaagtaattcggcaactcagatttatcaacagatgtaggaataaaacaaatatctccccaatctcctgttgataactttagttgcatagtttgttcataatcagtaacaccttgataacttacctttatatttgggtataactccataaattgttttgcatagccagcatatactgtatccacaatatcagttctatttgttaaaatggtaatgttagctttaagatctttataatccttatctaaattaatttcattaattttaggaaccgacacttggcttgtagtactactacctccacctgactggttgccgcaagctatcatagataaagataacattgtagctataatcgttccaaaaatttttctactctttaacattattgttcctcctaaattaagttttattttatcatcgtgtgcaaactaaacgtttactcagatggtaatcacttatttttctattaaaataatcatttaatgaaaaaatatattactatattagtctttaagtaaatattagttaataatttcataaaattactttacaactaaacttaattaacctttattaatatgttttcctttatgtaagtcaattatattagctagtattgcttatgtaaatgtttataaagataaacattaattatagtttatatataataaattttgcatatatttcttgattatttaatataacctcgataacataatttattttttaggtaaaaaaagatagcatagaacctatactaccttacttactttattattttaatacaattgtacgcattcttttcatcagttattagtttatttctttatctcatttattacaaacaattgtgacataaaatcttcacgttttctcgaccaatattcactagctttttctgtataatcttttgataatactattcctaaattcataagttcatcaccgtaataatttccttctctaccttctattgaatacagtctattcgcgtctagtccctgtaattttatacgattatatttttcatttggcctgcataaagcttgatagtagcccacaatggcttgtgacttatcatcagacactaccatccatgaagtttcattgctttcaaaaggatttagcattctataaaaatcacctttttgaatcaacgatttatttttcttaaagaatttaacttgttctttgactatttccttttcctcatcactcatagtattaacattaagctcatacccaaaagttccaaaatatgccacattggctcttgtgttaagcggagtaagtcttcctacctgatgatttggtactgctgatacatgacttcctattgagcttaatggataaatcattgaagtaccatattgtatctttaatctttctacagcatcggtatcatcgcttgcccaagtctgtggtgcatagtatagcattccaggatcaaatctagccccgccgcctgcgcatgattcaattaaaagctctgggtatttagttattatcttttcagccaacttatatactccaagaatatatctatggaatacttcaccttgtctatcttcttccaacgctaatgaatacggttctgttatatatctgttcatatcccacttaatatatgaaattttagaatttcctattatgttatccatcaaactaaatacatgttcaacaacttcgtctctagaaaaatctaatataaattggtttcttccatgagacatttttctgttaggtgtttgaatagcccattctggatgttccttaaataatttagtatccttacacaccatttctggctcaaaccacaatccaaatttaagtcctatttcttctactttttcagataaaccagctattccatttggaagtttctctttgttttcaaaccaatctccaagagaacttgtatcatcgtttctttttccgaaccaaccatcatcaagtacaaacaactctattcccaggtcctttgcagcccttactatagaaagtatctcttcttcatcaaagtcaaaatacgttgcttcccagttattcacaagaataggacgttctttatctctccattttcctcttgcaagtcttgttctatatagtttatggtaagtttgactcattgcatttaaaccatcattagtgtagaccattacacattctggcgtttgaaattcttctcttgaatcaagtttccatttaaattcataaggattaatccccatcataactcttgaaactccatacgaatcaacttcaacttgtcctaggaaatttccactgtatactaagctaaaaccatatacttctcctacatattcagttgcatgtggacgctttaatatcataaacggattatgaacatgactgcttgcacctcttaaactatgtatagattgcacaccttctgttaactttctctttttaagatgacactctctagcccaagcacctgatgtatgaatcatttcaaaatctgaatctgctaaatcaacgctacagctcatagcattatctatataaaatgcatcttccccttcattagttatttttgcatttctgcatattgcatcaagaccttcgtatattgtataacttagtattagtttactatttaatatctcatcaaataatgtaatttctaatgtttgagcttctgaagctgcttcaatataagtcgatggtaatccatttaacttattctttccttcaaatattttatatccaacatatttatagttactaattctacttccatttttacttataatcgtatgagccggatatctgtagtctgtaattccgtagcttggatattcctgctttatatgttctaatgacgaagtatgatttccctcaaacatattgcatgaaggtttaagttctctttccattatatgtttaaacgactctctatgccttaatcgtttaccataataaacattttccatctgttctatgccatcgattactctaataatataacttatattattattataaagatgaaactctctagtattttcattaaatttaattcccatcttatctttctccttcttaaaatatttacaaaataatactttagtgtttagtacactgtagatagtgctaaaattcacttaaacaatcatttgaagttggtttacttttttaaatattctgaagaatatatatagtaatattcttcagaatatttgttttaattttaaactaaatattttttatataaatagtttaatagcaattatttattaatttataattaccacctaaactacaggataacttttcaaaactttaagctttccttttatttcataatttccaagtgctgcaggtattaaatagctatctcccatttttatcttttctaaatacccatttccttctattattccttctccatccacacaagttaagatgtaaaatttatcttcatcactgctatcttgcaatgtttcttctatagttaatttttctattccaaaatattcatttttgcatagtaaactctttttataaccatcaaatgctatttcttctcctttaagattttcacattgaagttcaaagtttgtcacgtctaatgctttttctacatgtatttctcttggtctaccgtaatcatatactctataggttacatcactattttgttgtatttcagctattataacaccttcacatatagcatgaataagtccactatttattaaaaagcaatcacctttttttacatctatcttatttaaatatttttcaacttctcctgattttattgccgcttcaaattcttcctttgtacatcctttagtaccaactatcaaactagcatctggtttagcatctacaacataccatgcttctgtcttaccataatcaccttcatatttagctgcatattcatctccaggatgaacttgtactgaaagtttttctcttgaattaattaatttcactagtaaaggtaacttttctaggcttaccttagcaccaacgatactagttccgtattcttttatcagttcatcaaatctactccccttgaattcaccatttgctacgattcctgttccattttgatgacaagctatatcccagctttctccgatatttccctctggaaggttatctctaaaagtttctaggtctcttcctccccatattttttcgtagtataaattttcaaatcttattggatacatacttcttcctactccctcactcgatatataaaaaacatatcatatattattaaaaacctcattttaaatatatattctttttatagacttgtctatacttttataattaaaaatatactttatctatctaagataaaatttattaactagtatccaatttccactaaggcatttatataaatcactctcaatatcccaattttttatatttccttagatgaaaaagatgctgcaataatgtataatattactgcaacacctttaatttatttatataactgttatagctttaaattcaaagttgtcatacctgtgtctagaaaacgagtactcgaacgctcttccattttctaagtatacaaccttttccacttctgctattggatctccatccattaacaataaatattctttatcaaattcatctgctttacttaccctaacagtcgaatgagcactttgaatctttaatcctagctttctctgtaaaaaattatatatagacccattaacatcttctttttttattccctctgcaattgataacggcatataagttttttctattacaataggtgcctcatctacataccttactctatgtatgaagtagacaaaatcaccgttatctatcttaaatgtacttgcaattttctcatcggcattgataatcttaaaatctaaaactttgcttgtgacctcatgccctaaattagtattagttaatcctgaaaactgttttttccgaatgatctcttgaatctctccttcggttatgtcctttataaaacttcccgatccccttctctttacaaccaatccttctgaaactaacaaatctagagctttcttcactgtcattctactagcattaaatctttcgcatagttctttttcaaacggtaattgttcattaggcttgtactcgccactcaatatatgttctttaatctgggatgctattttctgatactttatcataactattcctttcatatctaattcttattattatgcagacttataatttaatttttttagtatttaaatatcttacatgctctttacttaaatggaattatgtagtgttcctgctagttttctattgcatttgttattataatttattattccttatacaactttctttatcagcaattattgaccatttcactaaagatccccaccatattccatatattttttatataacctgcacaaatatactctccccttaatatataatatatgtctttcatgcactcctgtctatacttttatttagtacttgtttatctcaccaataaataaagaataggctgattaataccaacctattcttcgtcattactattttactactaaaataaataaaaattatttagaattatactatagctcctataaaatagacttttattaaataatctgtcttataggaggtattttaattgagattataagctttattaattattttgttgagctgctaattcatcagcataagccatagcatctgctttcttaaagaatgggaagtaaattaccgtagaaactattaagaatacaaattgtgctaaagcgtaactaggtccaccaagaataaatcctgaaattacagttggaactgtccatggtactaatattgcccccattggtgttagtaaccctgatgcaatcgcaaagtaaagtaatactgcatttatcactgggccaagtataaatggtacacccatgattggattcattactactggaataccaaataatattggctcattaatattaaataaatttggagtaagcgctaacttacctaattgcttaaattgagctgattttgcaaggaatagtagtagtagtgtaagtcccaatgtttgaccactacctgttaaattaacaaaactatcatagaattgttgagtcactatgtgagcaccatgagcaaggtctaaagtccccgctttttgtaattctgcattgaatgcagtattagcagttaataatggacctaccattcctcctactgtaatacctccatgaattccaaagaaccataagaatggaacagcaaatgcaataagcatggctccaggtaatgaatctgatgctgcttgtaatggtgtttgaaccactttataaataatctctacaaaagaagtttggaatccaaatttgcataatgcataaacaacagcagctccgctaaatataacagtagccgggattaatgctgagaatgcattaacaacaccttgcggaacaccctctggcatttttattgtaatgtttctcttaatcattgcgcaataaacaaatgaaacaatcaaactaactacaattgcagtaatcatacctgctccaccggtccaagatgtaggaatagccccccccacttgaactggagttgcgtctggtgttgactgataagtaacaaagttattagtaactataacaaatacacttagagcaattactgatggtgaaaacggctctactccctcattcttgcagtatgagtaagtcattcctataactccaaccaatgccatgattcccattgttgatccttgtactttgtataatggatcattccaacctgcaccaaaagttgaagtcataaaatctgtaaatgcttttaatggaaaagctgcaattaataaaaatacagatccaataatattcaatggtaatgtaaacatcataccatcttttaatgcttggacacctttaagattaacgaatttcataattactggaactattttttcgttaagtgtttgattaaatgacataattattcctcctttgaattaaaaatataatataaataattacaaatataaatttgctattattgccttattgaatttttattactttaatgtttttaaacttaatattatctaattactatagcgtctagattcagtatatatgcttaaagtactatttcttaattaaacttaatgctaaatctaatactttagctccattcatcattccataatcaaccataggtatcacttctactggaactccctttggttcacaaagactttttgcttttcctaaagtatatccaacttgtggtcctaaaagtgcaacatccatgctatctagatgtctatccatttgtgattctgggaatgctataatttctgcatctatccccttagccttagctgcttccttcatcttattaactaaaacacttgttgacatccctgatgcgcagaataatttaattgtaatcataattgttcctccttaaaatctttctataaataaaataatgtattaaatacttaagtacgtttacatcaacgcactagtaatatgttgataagcgaataatatatttatttatcaagtaaagtatttacaacttttcttaattctataatttgttctattaaagttttctcagatatagctgtcattaaatgatcttgtgcatgaacaaacaaaactgataattctattttttcacctgcggcttctttctgaagcatttctgtttgtgcatcgtgtgccttagctaaagcatcattagccatccccatctctttttcagcttcttcatacttaccttcgtttgctattcctagcgccatataagcatgatttttacaatctcctgcattaattataatattcattattgccatttctagttgatccatttttactcctccaatttgcgtgttattttttatgcaattatatagagcaataaatatgccaaacactcttaatgatataagtttttataattttcatcgccaaatcttatatatatttataaaacaaaatgaatgtatataaccaaacataagtatatacatttaatttaaaaagcttatattttttattcccaaaacgcacaatatttatcagcatatacagtgtttaaactaagcatacagtgtttacacaaatatttatagtgtttaaaaaataatatccggtgtttcatttttctaaacactaaatcttttattataaacaatattcgatactaaaccctttatccattatcatatatgcatctattactgccgacttatttttcactagccaataatcttctgatatactctcgtaaatcaatttacagaatcgaaaattaacatataaaaagagaaagtcaaatgattccttcatctaaactttctcttaaaaacatattctaaactcgttactttaaatttttatatttcattatacccaagcaccacttgcatctactgtataaccatcaataactgtatcactagccatagatccatcactatataaatagtaccatttatcatctactttctgccaacctgtttgcatttggccagatgaagccaataagtaccacttaccatttactagctgccaacctgtttgcattgcaccagttttagctagcaaataccaattcccctttacttgttgccagcccgtttgcgctgtaccagtttcattagctaaataccaagtaccatttatttgttgccaacccgttttaggttgtccattgctatcgaccaattttacagtcccatcaacacttgtacttaaaattgctgtagttgcatctgttgtaactgaattttcagttgttgtgcctgttatagttgaaacagtatttgatgaagctcctgaattactactcgaagaagagcttgaactactgctgttacttgatgttatctctgcaattaaagaagtaatattttcaaatgttttcctattataagtaactactactttaatataataatttttatcactatcagttaattcataactttttccattacctactaaaatgccattagcaatattactccccttattggataatctataccatgcataagttacattcttagatggagtaaactctactgaaccttcttttaataatttagcagttagagttcccccaactctttcagttcctctaattgcaactgttgatggcattgctacttcgcctaatccacctgtatttgcatttcctgctgtttgacctccaccagtgtttgcatcttctccagtatttacaccatcatttggattttccgatgctttagtatttatagccttgatattatcaaaatacattactgaatctacagtatccgatccaactgtattacaccataatcccatttttgatatatgggtcggatcaaatattccattattttttcctttaaaatcactaaaaggtatagttaatagtttagcttcagttgttgccgcaaattccggcatccaaacttcaaaatcttcaccgtttgatgtaagctgaataacaagcttttgtccttttccatctggtttaacccaaatttgcagcgcatcacaaccagaccaatctacatctagtgattttgtaatccctgcatattgccctgctgtaatcttatagttaaacgctagtccatcttcgccttcatatttattattgacatctaaagtaggtttaacattacaatctgttccataacaagtagcccaagcctgttgcaataatgaattatcacctgaatatgattcaaaatcatccaccacttttggatctttttctgcttcctttatattgaaaatcgcttttaaagtatccaatttagtattgtctgaatataattcaatagaaccaattgtttgtcctatttcatcaagaacagcttgtgtaatatctactgaatatgcaccatcttcaccttttatagcattaagaatttcaacatcatcacctgctttattcttcaaaacaaatttaatttgcccattatacccttttacacttgctgttattttcgttggttcaagaatacggctgctcgaggttgggcttgttataaatccataggaataggctgaatccacactagtgctagcactagaataatttccaacgccatcagcaaatacagattcatcttcattgtaataatttataaaattattaatcatttcatgaccttttgtatcacttaccatatatggagcaaagaagttttttgtatcatagtttgaccaagtcatataataggccatatctgaatctgatattatattagcaacatgactaaaccattccttatctgcattacctgatataggcatagaacttatacctacttcagacactgctgaaagttttcctcttgtagtcgctaattttgaaactaaatctactgttcctttaaaactattcatccatggatcagttttataatctgcagtaggactagtatcatacatatcaaatcctaagacatcaacaaattcatctcctgggtagcgtgataaataatcattgtcatctgtaaaagtggcaccaggtgaatatacatataagaaattatgaacattcttagcatcccttaaatattgaactgtataacgatataaattcttataaccctcttcgtcacaaaaagcttttccccaccagaaccaactgccattattttcatgcaaaggcctaaataataccggcactcctgctgcatctagcttatgcgcaaattcagatactctatctaaatatcctgtataaacttcattcaaatctcctcctggcattattctcggaacaatatttcccgttgtaacatttgaagaatattctgaatagtcatatttaccatcagcatcttttccattttccttaaccaattcaaagttaggcatatgagcagatactgtaattattcctccttgttttgccgtatctatagctaaatttgctccttttgtaattacatcaattccattttgcttgtcttgatctgtgtaatgcacttcatcagctgtaaaagatgcatctataccgcaaactgctgctattgatcctgttacatctttagtatcagaattgctttggctatcttttaaaaatgccttattatgcgtatcattttgatgtccatataaaacatattttgatttacctactcccattaagtatgaatataagtctgctgtttttggggttgcttgtgaatcaaccaatttaacacttgacggtctgtcttctaaatcaccaggctcaactttaacttgtgctacagttgttgcagttttttctacatacccatctagttcctcttctttatcaaacttaatattgtctatatatacatcacctttatagtcaatgcttgaacctacaattccaagagttattaaattcgcttctatgttttgagatgtaaatttaagttttactttagctttctttaatccacttccaatattctccgaattatttaaatcgatttcactagtagcacttaaactatctccagcagataattttgtttgaaattttccagtagtcattttacttggatcataaataaaatcatatgttaatacattatatccattaaatgaagttgctttacctaaatctttactaattttaaattcactccatgtggcactagagtcttttgagtaatcaagggatagctttaaagcaccactacctattgtcgaagcatcataatttacaacgttatcagttgatccattataagcccattctccaccataagaccatccattagtatctgtatcaaaattccattctaaatcagaaacttttggtgcttcagctgaaacaactttaagattatccatataaagattgccttgataattgcattgatatgcagatatttgagcaactacagccttaataccgcttacatcagaatttaatgttattgaaacctttgccgaagaatatccattacctagatcagtaaaactatctgtagttatctcttgaaaagatgcaccttgccatgcccatgagctatctttaagtgcaccagtacatttaattgtacccgaaaaatttttttgactagttggaattaataaatcaaattgtatagcagatcccttagggattgtttcactggattcatcataaaaatcaaatccatgcatattactattccaatcaatacctccatcaaatttaggtataaatttcatcacatgattaccatcaatagtatcaattgatacatcactacttgtaatttttccacttacagcatcaggcttttttccatcttcaaaattattataataaacggctgcagttgttgcgctgtcattagaatttgcttcaagaaatttttcctcaagagaaactgctgaaccagtagttgtattattacttccaagttcttctgcgccagcattagataatgttgtaccattgcctgaggccgcttgaatagaattagaaactgctacatttccagttccagtttcagccataactgctattggtgctggtaaaagagtagttgatgttgaaattgccatagccgctgctaagatttttttaattttctttgttttcattaatttccctcccaatattaatttatcgtttaattaacaaagactcaattttctataataaagtttcattttctcaatatatttaatagtattacatctatcttttaattaaatgttgtcaattaagcgttataatttagaataaatgattaattttcgtgactaaaattacacacgtttactttatcgtttagttaaatcctttacattatataatactttattaagcttttcaatatactctaaaacatttttctaaatttaggcatatgaacgagaataacaaatcaaatcgagtcaagcttctcacgatggaaaatatacttggcagatggacttgttatttttttgaatgtgccttaacctaatttacacaaaaaataatagaccattatgcttgtctatttcacgtcagaccgcttcagtaaattcagctaatatgctcgctatgagctgaatttactttcttgtctgacacgaaatatactttgcatctttggtctattattttttttcatgtaccctttgtaaaatactctttaagtattcagttaactcttttgctgctttcttatgagataagattcctggatgttgtcttgagcctactgtttcctctgttgtatttggaagctggaatacagaaacttttatatcccctgtatctttagtatatgtatccactgcccgataaatagctggaagcattggtatacctagcattccgtatacccatactatattagaattcttattaaattttctaagcttaacaagaaaattatatacagcattttcaaaaacctttaagtcttcttcattaaacgtaccatcttcatttaatctctgtttatgagcctctccagttacctcatctctccattcaggtgaagtaaaagcttctccatcgttggttccaagattaactaccacaacatctggctgccaagaatcaaagtcattatccttaaaaactcctaaagcttcatttttctcaccagtaagaatgccacaaactttttcataatactgcggaatattataatgcggattattatcccagcttgtaagcactccccacccactttctgaaataattctatgttctgcatttaaagcatttgctgtcattgtactataattatctactgcactaaaccacatagaaacccaatcatcttcttgcttggctcctattataccttctcctgatgtgatactatctccaataaattcaattttatatggtttttcttctattggtagaaattctccatcaaattttactgcatgtatttgcatataactcaccggatctccattcatggcctgaacgtctcttataatacgaacattctttacttcatgttcattcatacctctaaatacacatagccagtaccttcctgcagtcaacatttgcctgcttacaggagcagaattaataactatgcttatccaaggttcatacatatcgtagtccacttctacttcaatccaaagttcagagccttttgcatttaactcaataccactgcctgtccaaaacactgttaatggaaaaagacaccctgttgttctaccatgaacttttaaattttcaacatcaggtaatgtatatacttttaatttttcattttctttcatcattttcctcctatatactctcaaaatcgtatttacctttttgataattatctcagttccactattattatataattttattacatttgtaatttcttcaatttatagaattcaccttttttctccataagttcatcataagtgccaaactcttctaaaccgccatttcctataactgcaatcttatctgcatttctaattgtagacaatctgtgcgcaaccactaaggttgtcctacctttcactaggttttcaattgattcctgtatctttttttctgaaatgctatccaaggcagatgttgcttcatcaagaaccaatattttaggatttcttgcaaaagcccttgctatagatattctttgacgctgaccgccagaaagattcattccatgttcagttattttagtatctaatccctctggaagcgactctattaactcttctaagttggcagctttaattattttattcaattcttcatctgaaatattatttgttccataaataatattttcacgaatagaatcagaaaacaaaattgcattttgtggcacaaccgcaatatgggaacgataactctgaagattaagtgtcatgatatcctgattatcaataagtacttgccctcctgtagcttgaaaaaatccaattacaagatttaaaatagttgactttccagcccctgaagcacctacaaaagctgttgtttcacctggatttatagtaaaatttaagttcgttaaaattggagcatcactatccttgtattgaaactccacatttttaaatgtaatttcccctttaacatccttgattttctttttcctacgattattttctatgtcatctgaaagaagtatatctccaattgaagatacagattccaatccttttgcaatggtaggcagcaatgtgataacacctgcaatttgtgcaactattgatccaaaataagtttgataaagtacaacttcacctatcgaaatataacctttcattgctatatatccagtaaatccaaggcaaattatctgaaagacttgaaacgctacccaactaatagatgaaaaatatgcctgaataagatctaatttcaaccccttcttagccacattaatcaactgtttatctattttctttgtttcttgtttttctaaagcatgagcccttgtaactggaattaattctaccatttccataacatgaactgaagtttcttccatctcttttctataatcagtattgtatcttttaattttcccgctaaatgcagcaataataatgactgctacgggtatagtcgcgatgaaaaatataaatactgttagacttttaaaaattacaactcccaaagctacaacaatatttaatacaatgcccaatatagtaataaaaacttgagatgataaattttcaatctgctcaacatcacgcataatttttgattgcaacctgcctgactgcatttcattatgatatgcgatagaaagctgctgtaatttttttactaaagtgctccttaattctctttctacacttcttatagtttttgcatatagcactgtgtgtatataatttgttggtatattttgtaataccatgatgaggattataataatattaactataattatactagcagcattacctcctttatcagttgcagcatttataatatttgcagatacaactggcataacccatacaggagagcttttaattaaaaagaagataatagaaacaaagagtttcaaataatatcctttgtatatcccaacaagagtcttcaatgtatgattttcgttttgtttaaatatttctaaaagtgcttcttcctctggttgtaatttatcatttgatttatctttcaattctatcactcttccaccaccatatcataatacttctttataactttttctgctggttttccatatacatcataccctttatgattttcagccctatttaatgaatactgattccaagcccaatcccacatagcaaaaccagatacccattcacgtttaagtgaagcttcaaacatagctttgtaccactctgcctgttcatttaaatctatatccccttcaatactccaatcgtttggaactgctgaagaacctcttgtagacatacagccagcctccgcaaagaaaaatggtttattaaattgcttcactaccttttcaatgcggttcaattctttttcccaatcagaaataggataataaccactcgaagaaataacatccacacagtcccaccattttacattatgctcttgatatttatccgtattataagatacaattccatggtaaacacctctgatatctgaaattagtttacgccattcattttctctacgctctgacataaccatctcacaacctgcaataaacatttcacaacctgttttttcagctatactagcataatgaagttgaaaatctgtatacgaagtaaaccacttgctccatttcggctcacagtgaacgtcttcatcaaaaaaattaatatgtgctctccaagttccgtttttgcaattagctgttggcttaatcgccactctaagcccaatgttctttgcataatttacgatatcttctaactctttatccgaaatagtcgaattagatgtataacaaatctcttctgattgtggagtatcctgtaacccatttggcacaagtactataaaattaactccaactctttcttttaaattatctaaactcttgtaagtttccttctttaagtagcttccattcctagcaaaaggtgcaaatgtaaatcccttaataaacttcataagcttcattcccttctattatttattttcatgtgccttattcacatatactataccaatttcattttctatctgatataatacaattgtttaaaaatagaataaatctattttacggaggctactatgaattatttatttgaagaaattaatgttttaacctcaccttatgaagcctttttatctggaaccaaacatggtaacttcccaataaaggctcattggcattactacatggaaatcattttcattattaaagggacttcactaataaattgtaataacaaagaatacattcttgaacctggtgatttaattttatttcatcctcaagcagtacattcaattttctcagcatctaatgaaccattaaaatatggagtacttaaatttgatataagtaatcttcgtataaccagtaactatacaccaaaacttagttcaatctttaaatgtgcaacagatgatccttgtgctcctatccttcttccatcaaaagcatttaaaaactcactggagagtctattcaacaattgcatcgaagaaatagcaaccaaagattatggttatgacattcgctttcagtctttagtttcatcattattaatagaaattcttagaatttggagaaaaaatggatttgatacaaataatatacctttgaccccctacgacacagactccttacatacaatattgcaatatattgatgagcattcacatgaatcaataaaggtagaatatcttgctgaaaaatgccatatgagttactcatactttgctaaaaaatttcatgaattatatgggcaatcctgcaaggattatattgaatttataaggctaagtaaagttaaagatttattgctatttactaattttgatcttaattatattagtcaggaaacgggatttgcagattgcagccacctaatacggacattcaaaaaaaagacaggtataactccaaaacagtttagaattcaacacattataaataaaaaagaatgatctactaggtgatagtagaccattctaaattctcgctatattaagcatttagcaatacttttgaaatttcatcaaatctttcatctgatataccaagttttttcttaaacctttcatcatccattctttcgactataattttgtctggagataattcattaataatacgctttatcttatcaacagattcttctgtatcattatatcccttaataattgttacttctaagataaattttcctttatattgtttattaaataaaatcatattagaaatatactcctcaaatgtatatccctcaattggtctttggactttttgaaaatctttttccgttattgtttttatctcaccaataatttcttcacacctattggctatttctatgtattcatctctacccagtaaatatccattagaaagaagtcttacaggtaaacctttatctttaattaggttaattatataaccaattttatcattaactagtgcttccccttttgagttaataaaaattaattcggctttagtattttctatcatattttttagttctcttaatgaactatccatttcatcaaatgacttctgagtatctatcttgttttgtgaccttccaatagggcaaaatatacaatcaaagttacaatatttttcaggaagtatgttcacttccagcacccttttaccatcctcaatataaatatctttataactaaaaacactcatttttttatcctccttgttataattactctattaccagttccttattattaatatctagaattgaaatttcacttgtcccacctaaattgtcctgcgctgtttttgctaagtattttaatgtattctcaaattctatcaatctactttcatcagttaattcaatacacaaaaatgcattatttgtattttcagtaagcattgttctcactgcttcacgccaattccagcatctgcaaattgcacctttatcatctttgtagactatttcaccttcatatggaggtgagttttcatctgttccaagtggaataaattcctcatttccaacagctgtagtcaatctcacatccccaacaaatttgtctatatcctcaccaccgcaaggtaatgcatatcttagcgaaatagaattataaatatcaaccaatggattaatagttcctatatgatttccattattaacccgctttagtaatgcttcaattgaagcccttgcaccttttttagttttaaacttttgaaatgcttccctccatatttttattaccgagttattactaaattctgcattctgtaaatattttaaagcttccttttctgcctctaaaatcattcctgcatattgatctttatctcttatagaattatctatgccatgacaaataacaatcccaattttggcattgggaaaaagactccaaaaagaatcttcgactacaaactttttcattacaatccctcctatattccttattctgtactaaatgattactgatcctttagtcccctagatttaaataaggcacattcaaaaaataacaagtccatttgctagtctattttctatcatccttcgtcgcccaattgacctaataggcccgctatgaggtcaattcacctccttgcctgatgaaaaataatcatagcaactttggacttgttatttattttcatgcgcctaatttaaaataaaaaaagcccatggaaatattcttcaatatctcccaggcttttatccttccgtgtacacagtcaactgtgcgttttctcttggacctgccagttacaaactgcggaaccctagaaaacttaaatatgtaattcaattatatctcataattttaaaattataagcggattttagcataatattaagattaagtcaactatataacttccttcaccagtacaaaaatttatctgttattttctttcatgtcccttatattgatttcctaaccatatcttcagataatcaataaatcgttttgttgcaggtgggatactagataggttaggtaccacaataccaatagtacggctatactcaggctctaaatctttgatacagatattatgggaatttccctgaagaaataattctggtaacattccaattccaagttcatttgcaaccatagctataattgcattatcaccttttaccgtatacttgatattaggatttataccagtcttatggaatacattcagtacatcatcgtcgaatcctttatgtgctagaatgaaatcttccttttgaaattgtgatattggaaatctttcaaattctgcaaaactatgatttactggtaaaattgctagcattctatcttttttcaatggaatgaaatcaaatttataatgtgaagagtcagttaaaaagccgcaatcaatttttccctgctcaagccattgctcaatctctatatagctgccttcaaacagttgaatttcaatttgtggaaaatcacattgaaattttttcataatacttggaagccattgaacagatacactcgtaaaggtacctattctaatggttcctgtttctaatccatttatagagtttactgtctggcaaagtttttcatatccatttaataattcttgcagaggtttcaacaacaaagtaccattagttgttaattctacacctgatttacttctaatcagtaactgaaatccatactctctctccaaatcatgtatcatatgactaattccagactgagtatagcctaaatcaattgctgctcttgttatatttccatactctactgttttaagaaaagctttatatttgctaatattcatatatatttcctcattttatatccattaaattctctcatgtataacattataaatcttcaatttactaatgtatatattttcattataatttgtttaaaataatcatttggaggggaattatgattttaataggagctagtgtaaatgctataagtattattattggaggtttagttggtttctttataaaaaaggtttatcagaacgtataaatgaaattcttatgaacggacttggtctaattgtattgtatgtgggtgttagcggtaccttaaaaggacaacagcttttagttgtggttttttctattatctctagcgtagttattgtggaagtgattaattgtaataggaaattgaaactatttggaaattttattcaaaataaatgtaaagtatttggcagtaaacaaactatgacagagggctttataaattgtacattatttgtttgtgtaggtgcaatggctattgttggttctcttcaaagcggtatggttggcagtaacgaagttctttacgcaaaggctattattgattttattgctgcgcttattatgagttctattttaggtattggagtttgttttgcaggaatttctgtttttctatacgaagcctgtctaactctatcagcaaaagtaattagtggctaccttactacacctataattaacgaaataacttgtgttggttctatacttatgattggacttgcactaaatatgatgaaaattactaatattaaacttaccaaatatatactagcaccttttttgtcaattttattttgtatactactaaataaattttaatttaggcccttaaagctttcattttatgccaaacaaggaaacaatttagactcatagttgactattagcctaaattgtttccttgctgttaaaaaatatacacctaaaaaaaatgctgtatataagaacatcctatgttaaatttagatttgttatttttttaatgtccctataccttaatttcaaatattcttgcactaaattgtttgctaaactttacacttaaggtacctgcatattgattccaattatattcacaattttcttcctttggatatgcacattttactgaaaccttctttcctttaataccctgtatgggtattaaacatgtattatcttcactatttcttctccaaactgcaacgtaaattttattatccaccttaagtcctaaacttacccatgtatctgaaaactttgataagcccaaaggccaaaatggaagtgcattttttatatcttctctaatagtcttgtaatattctaaaccttccttaacaagtttttttctttcatcatttagatacactaagtgtccactttgatgtatgcgcaaaagcatagcatttaccatattaaatattacctcttctttatctccttctgtaagtggataagaccaaatagcagattgttctggggttaaccctgatggagaattagccgcaattgtagcatatcttctataatcatcctgatcacttgttgattgaatgctatgtcggctaagcattgcataatcaattctaagccctccacttgaacaattttctataattaagtctggatatttttcaaatatactatcaagccatgcaagataagctctttcatgacctaaaagtccttctccaacgctatcagcatttatttcagttccaattcctggctcaatattataatccattttaatgtaacctacaccatattcagaaacaagtctatctattacttcattagcatgttctataacttctggattcctaaaatctaattgatagcggcttctatcatatatctttttaccatgtcttttaaagaaccaattgtcatttactctttctgcctttggacatttaattcccataacctctagctctagccaaactcctggaatcatatttttatttcttatataatcaattacttccttcagtccatttggaaatctttctttacttggaaaccattctccaacattatcccaccaaaaacctgctgaataccatcctgcatcaatacaaaaatattcacatcctgcttctgctgctgcatcaattaatggtaattctttttctgttgttggatcagcccacaaacagttcatataatcattaaaaatgattcccagtttctcattgtctttattttttctccttattgtccttctatattttgttagttctcccattgctccatcaaagccttcaccatttactccaactgcaaccggaactgatataaaactatctcctgatttcaaatttttgaaccaatgggattctgtctctgttggcccactgagttgtaaatataaatgacctgtttgatcacttatttcccaatgccatgatccgttatgttcaatctgccaaaataagttagtactagtttctgtattttctatgtaccccattggcagatattcttttgtcgaccaattgccagtattagttgcagcaattacttttgaagaacgctgctctatatccggctgtgattgtgcaattccaagtttatctaaagtataagtttcccactgcatttctctctgccaggaattatgaggtatttttaaagacattttattatctctcttaaagatcccctctttttcaattcctgttaaattgaaggaagatatatattctaaagtttgagtttcttcgcctctatttataacctcactccagcttcttaatactgaaatattattataaaattgaaaatgacttattacataaattcctgtttcaaaatcaaaagtagtaatttcaagttttcttcctaaatcattgcgataatctttatgattatcatatttcatccgatatccaggtgctgtaacaatatacttagttccatgtctttctagaggtctatctaaaccagataaattaatttctactaatcgaaatcccttcttttgttcttcatttaatatatctttttcatcaaatggaagaactgaaaaatgtaataacttcacctcattctcattatttatttcaagtaccatgtttattttgttttcattaatgttaattaaccccattattcttctccttttagctatttataaaagtattctctaactccgtatttttagcgcatattcttcaccctagctatatattatataaactgcatatacttatattcttatgaataatttcttctgtgatctcctcttcaatctttctaatagtaacttttttcttatctgacatatcaaaataattatcactcaaaatacaatcaaatccttcaaaatcaatacaaactcctttagcataattttcagcagtaatttctaatgcaaatttatctttttcttcaattacgtctacctttatattcggatttaaaaatttaaaatgcttaggttttgtaaataataatgagtcttcgcttattatatttccctcgtcatcttctaatgaaaatataaatactctttctctttcaaatccctctatatatttttgaacctctaaggtaatgatatctttagaacttaatccgccaaccgctgcttcaactttaccttcaaagatgacctctgaagaattacttactattttatatttaataattccattgaatttattaaaggtttcatttgatacatttaggactatactaaactcatccttgtgagctgataataatactggagcaaaaaatctcctagccatataatgcattgctttccaacgtccataataatcacggcttgcccatgatggtcctggccagcagtcatttaactgccaataaatagctcccatgcatcttcccctaaatctcctccaatgttcaacaccatatttaattgcatctccttgaagaagttgtgatatatatataataccctccatatcttttggatataaataattatcagccatatatgttaatagcttagtatttccacccttacatttttgatgactttccattacataagaaaatggatttaaatcttctttttcacagcatgtgttaagagtttttatcgaaggaaatgcttcaaacccaaattctgaacaaaatctaaagtaaaaattcttataatcttcaaatggtttgttgccatgccaaacatcccaataatgagtatcccctttatcataactgctaggctcatcatatccacctccacttgatggtgatgaaggccaataatacacctctggaatatattctttgcatacttcaggcaatattctttcaaataatgtaatgtaatctgctttaattctttcattatttggtaagccccagtaaagtattgctgactctatttcattattaccacaaagcaaacctaagcttggatgattccttattcttttaattacatttataaattctgctgtaatgttagcttcaaaatccttagtcaatgcataagtagagcatgcaaacataaaatcctgccatacaattaatccatactcatcacataattcaaaaaaataatcatcagggtaaattccaccaccccaaactcttattgtattaaaattggcacttatacaatcttctatgagagtctttgtcttttcttttgaagttctagctaatatattatcttctggtatataatttgctcccattgaaaatattttttctccattaattacaaaagaaaattcctttccccatttatctttcttatttgataatgttaaagttcttaatcctatttttaattctttcaaatcgattacaatattctcatgttttactgctacttttacagaatatagattttgcttaccataaccattcggccaccatagcattggattttctatcttaatttcttttgttaaattctcattatctatactataagaacttaatataactttattttctggcgattctattattatatctagtgtaagattttttaattcttcctcatatacaacatctaattcagtggtaatatttaaagtaacttctccatctttatgactttgtcttatatatacatcttcaatcctagctgtatcatacataaataattccacatctctccatattcccatatcaggtaactgaggaccccagtcccatccaaacatgcaatgtgcctttcttatgtgaggatatccttccatagtagtatcgacaccccaaagttcatatttttgatttgcttcttgtatatatttaataggagatttaataattaattttatactatttgacccgagtttaataacttctttgatgttaaattcaaaacttctatgcatattattcataaatcctacgaatatatcatttacatataaatatgcaattgtatctacaccattaaatcttagtattattttctccctttcaaactcttcctttgttatatttacttctgtataaaattcacaatcttcataacataaatctctaacttcatactcattatctctataaaatggatctttcattaatttattctctaataaaacactatacacagaacttggaatctgcacttctaatcctttatgctctctgaaatctaatttccaatccgaatttaaatatcttttcaattcgtttcctcccatcataaatatactttatgcccttatgtttatttcaaaactttatttgttataaataaagggctgctacagcacagcccaactctttatgttaattattcataattttattttatagcctttaatacccatgatttagaggcaaaatcaccatttatgccaatagtatcaattccagaatacattaattcatcgccaccaatagctacatctattccttcaattgcatatttaaagtttggattcaatcctttaagcttaatctttttagaatgcatgtttggcacctctaaacctttaaaatagaaagcaactgcttccgttttgtcttctgttacataaacccacgaagtctcattaccttcaaatggacttaaaatcctataaaattctccatattgtataatatgacgtatttctttgtaatgagctacttgcgctttaacaatttctctttcttcatctgagaattttgttaaatcaagttcatatccaaaatttccagacatagctacatttcccctagtttctaagcttgttgttcttccaacttggtgattaggacatgctgaaatatgagaccccattgagcttgctggatacaccaaactagttccatattgaatctttaaacgttcaatagcatctgtatcgtcactagtccaagtttgtggcatataatatagcattgctggatcaaatcttccacctccagaagcgcagctttcaaataatacttctggaaatttatttgtaatagtttcaagaatatgataaaggcctaacacatatctatgagatatttctctttgcctattactttgaagtttagctgatcccaaatcagataatgctctattcatatcccattttacataagatataggtgcacttcctaatatatcagaaagcatacgtattatttcattacatacatcttcacggcttaaatcaagaactaattgagttctttgagctctggattgttttggctctctattttgtacatgaatacaccaatctggatgtgtacgatataaatcactatcaggagataccatttctggttcaaaccataatccaaaacgaattcctttatctgtaatcttatttacaagtgtatctaatccttctggcagctttcttttgtctactacccaatctcctaaagaacaattatctgaatctctcttaccgaaccatccatcatctaacacaaataattccattccaagttctttaccagccatagcgatttcttcaatcttttcagctgtaaaatcaaaataagtagcttcccagttattaataagtattggtctttcttcaaactgatatttaccatggcataatctttcacgatataatttatgataagttcttgacatatcacctagtccagcatcagaatataccataacaatttctggtgtttcaaacgtgtccccatttgataattcccaattaaaatcaaatggatttattcccatctgtacccttgtgcagttgaactgatcaacttctacctctgctaaaaaattaccactgtatactaaactaaaaccatatacttcaccgtaatcctcatctgcattctttgctaaaagagctaaaaatggattttgttgatgactactcatacctcttttactatctatcgattgtaaccctggtactaacgctctcttataaatatgtttttcacggcaccatgcacctgataattgtaacaaatcaaaatttgaatgttcaaaatcaacactaaaacttaatgctctttgtagatttattttttctccatcagtatttttatttataaactttgcatgtcttgttattgcattataattattataaatagtataagataaaataatagtaagccctactatatcatcactcaaagttatttcaagtgtttcagcttcatcttcactattaacataagttgcaggtaatgaatctttaggcttaccagctataatttcatgttttacatattttaattcactagtactagctccattttcaagagctatttcataacttggagttctaaaatctcctgtaccaaaagctgaaaattcctgtggtattacatctaaattcgtttcttcaacctttgaagaattaactaattcataatttttcactctttttccaaaatacctgtgtgctaaatatcctgcatttaatatctgcattacataacttgttttgtcattaaataagtgaaatattttatttttttcattgaaaataataggcatataatcgctcctttaaattttacttttctaattttacttctgcattaccgctttcatattatctgttattttgtaagcttcataatttgctaaacttcaattactacataatataaaaacagaaatatactatagtgctagcttttgattatatctttgcttacatataatatatcaatttcatttttcatctgatataatacaattatttaaaaatagaacaaatctattctttgtcgcctattttaatttgaccaagtcatgtaaccctaaataaaaaaagacaattatagccattagaaatgtgattgtaataccttatacacctataaatatccaattcaagaactgtacttatagttggaataactaagaaaattatctgaatttaagtgaattgctacaatagaaataagtaacatattgtgtgtagtgtttcattaattgcttactaaacataggttaatcttaagtatcatgatgccaaaattcctaaaatagttatttcttttgctatattctccctaattacatctatttcaattttatatcttttagttttatcacttaattctaatatttctgttgcagaataatctccccaaccatctttgaaataagtatctaaaaacaccttttctttatcattaacttttatactaattttacccgagttctcagaaacactctttttatataacaaaataatattctttgcctctagttcaaaaaacaatcttccttctttattagtttcctcgttatatttccatgcattttgaaatacttgaaatccttcatcataattttgaaatcctataatttccttaggcttaattaatgaattatttagaattaccccattaatatatctgtcttcaaatacacaagatatatctaaaacatcgtctacaatttttatttcttctccttttttataatcattttcataaatatcattaataaaattgattaatagttgagatattatatagtgaccacaatcattaggatgtacttcatctgttagtacatctgcaaatttcattttattttttataacctgacactttaatgcatctctaaaacttatcatcggcacgttatatctattacctattttcacttgttgttcttggacattaaatcctgtatccatggtcataaacacttctactattgctggtttgctttcactgatcaataatcttctaattaagctttcataagcagatttgcaagaataatcttcatcatcatttacagctgcatccacaaaaactatatctggattttggcttattacttgcttttctactctatgaacacctataagtgaacccgtagccccaactcccgcatttatatgttttacatttgcattactaaacttttctttaaaccatttatatgttaattcaacataacatttttcagggaaagttgaattgcacccttgggttatagatccacctaaaaaagctactgttatatcttcgccattttcagctttttcgattaactttaatattctacctacatctcctttgttaattacagaactctttaacatttcttctgttatttcaaactccatttatgcttctcctcctttaaggcatctttcaaattattatccctattaaaaattctaatttcttatttgaataattattataatgtaagtataatgattttaataaatataaacttgcactatttcagcaaataataacactattttgatattatacgtaatcaataaaatatttcatgataaagaggtattatttttatgaataaaaatattttaaaagaaactaatcactctggagattctatgtttcctttatatacttctaatattagcattggagataaaacaaatatgcttaattgccactggcatgatgaattagaatttattttaatagactctggtaaagctgtatttcaaatagaaagttcttcatatgaagtaagtgaaggcgaaattattattattggtggtggtgaacttcattctgcttacagtttaaattctgatattttatgtacttgtaaatccttaatttttaatagtgaaatgctgagcagcaaaagcagtgatgcaattcaaataaaatttataaatcctcttataaataatcaattgaatttaccacatcatttagcttgtataaatgaaaatgaaaggtctataaaaacttttctattagaactaatatcaacattaacatcgcaagaaagtaattttgaattgatgtgcaaatcatatttatatatgatcttttcaaaagtaatgattatggcaacgtataaaaatacaaccgaactattaaacacaaacagcacaagcaaaattgacaatctcaaacacatacttaactatattcatcttaattacaataaacccattacgctaaaagaacttgcatctgaaattaatatgagtgaaggacacttttgtagaagctttaagtctataacctttaaatcccctattgattatcttaattattataggataacaagagctcaaaaccttcttataaatagtaacaaaaaaatattagaaatttgtatggatgtaggatttaataatcttagttactttataaatattttcaaaaaaactgtaggctgcacaccatctgcttttagaaaaaaatatatgaaataagttctatttttaattcatttctttatgcaattcttactttaagtattttataaaaattttttctttaatttaaaacactatagttagaaataacttcaaatatctgcaatgtaatttttccaataaatttcacagaaattatatactatttttacgaaatacaatatctttttcagataattatattgcaatagcttacactactgtcaaatatgctattatttttacagtaaatgttttcataaaaagataagtaatttattgcacttatgaatgattacaaacataggaaatcaatctataaagttactaattatgaataatttataactaattaataggagaggagtaccacaaatgaaaagaaaaaaaataaatctcaacagcattaagcaattaaaaatacaagaatttagtttacgcaaaatggataagaaacttaaaaattcatccatgcgtaaaaaattatattattcttttatattaatttcgttaattggaataatatctggattgataggactaatattcattcaaaagacaactaatgattataattatgccttggttaattatggtttttctcaaggtgatataggtaagcttggtattgaaatacaaaaatcaagttcattaataaaagatatattatttttaaatgattctaatgaaaaaaaaaattctcaaaaatctcttgtaagttctattgttaatatagatgatttattaaaggtcatttctacttccataacaactactgaagaaaaagcactcttagacaaaattcaaataaatttaataaaatataaaaaagttagagaaattgtattagcaaaaggcttagccaattctagagacgagggtttggaatttctaagaaaagatggtgttgttttaatagatcaaattagctccgatatttcatcacttttgcaaatgaaaatagatacatgtaatatcttatctgctaaattaactatgcttaaatttgttagtctcataattgttatacttagcattatattttctcttattcttagcgtattcttagcaaagcatattacgaaattaataagtgatcctatagataaaatgaaaattgtagctgaagaaatgtcaaatggtaatttagacgtttctataaatgtaaattcaaacgacgaaattggagtattagcttcatcattttctactatggttgcaactttaaagaattacattactgagatttctactattttaggtagtatttctcaaggtaattttaatattcatacctcagaaaattataaaggcaattttatagaaataaaaaattctctagattatatagtaaactcattaagtaaaattttttcacaaattaaagatgcaactttccaagttaatagtggagctggtcaaatatctagtacttcgcagatcatatctcagggtgcatctgaacaagctaattctattgaaaaattatctattttcatggaaaaaataaacaatcaagcacatagcacttttgttaatgcagatagcactagcttaattactattaatttagttaaaagtatagagaatagtaatactcagatgaacgaaatgttatcagccatgaatgacattgaaaattcatcaggactcatccaaaatataacaaaaataattactgatatagcaactgaaactaatttgcttgcattaaacgcagcaatcgaggcctcacgtgccggtgaagctggaaatggattcgcagttgtagcagatgaagtaagaaaattatctttccaaagtgcagatgctgcaaagcaaacaaaactcctcatagatagttctatgaatgctgtttataaaggaagatcattagctaataatgccgcaaaaaccttgcaagatcttgttattagcgtaaacagtgttactgatttgatatctaatattacatttacatctaaaggtcaagctaattctattaatgaaatacataatgatatattaaggatttcaaatgttgtccaatctaattccgcaatatctgaagaatgtgctgcttccagtgaagaattaatggcgcaagctgaaactttaaacatgatgatagataagtttaaactgaaagtttaaacgaaaagcaatagatagttttataaaaaaactatctattgctaatttagcacattattcatttatacaaaatagtttattaaaacactataaatcatcttttttatctttatttaaatttataacagtatcctttataataatttttccacttatcactcttcttgctggcttataatcaactttatatatttttttaattatagcttcaactgcagtttcagccattgtcttcatatctacttcaaatgtagtaattccaatatcagatataccagaaattaagtaattatcaaatcctactaccgaaatatcttctggaacacgataacctttatcttgcagctttttgattagaatgtaagctactgaatcacaattgcacgcaaatgctgttggcattttttctggtaactcaaaatttatttcttttttaccaatttctctatcagaaataaacatatcatgtgaatactcaatattattttcaagtaaagcttttataaaacctaagtagcgatcttgtatgctactagttgcacgaggatttcccacaaaaataatatccttatgccccatctcaattaaataattagttaatacatacattccataataattatccgaagttacagtgtcataattattgtatttaccatatgtatctagtaatactatcggaacagtatcaaggctacttagataagcaatataatctttgcttaattcccccattacaataattccatctactttactatcttgtatcattcttggaattacttcattaatttcatcatctttacttacaatctccataattccataatattttttcctagttagtgcatttaatacattttgatataattcccagtaaaaagaattatacatttcaacaaatctctcctgaattattacacctatattatatgtataaccatctcttaaagaacgtgctattgaattttgtcgatatcccatttcatttgctactttttttattttttctcttagttcttcgcttacgccctctttatctgataaagctttagaaacagttaccttacttacatttagagtctcggcaatatcagcaagtctaatagttttcgccatcccattaattctcctctcatcttatacaaacatatatatcacagctactaaacttatccgataactagtaataaaatactatagtcttataatatattaaaaattaacttaaatttcttttttctagttactttatagatactcttatactatgttttaataaaattatataataaaaagctgtattttgctatcaccatatactccaaaagagtttgaaaatttagctaaaaatacagctttataattctgctctacatatctaatcttaataaagttaagtcaattatcatttaaaatttataatatattatagtcttccttctttagcatctatagttccaagttcgttatgttctttaataaatttaacagtttcatcaatagtagtatatgccaggcctacataagtatccgcagcaccataataaatagcaatccttcccgtttcagcatctgttaatgctgcacatggaaatactacattcgatacaaatccacgttcctcataccattcttctggcgttaacattatacttcccgctctatataatacttttgacgggcaatccttatctaagattgctgcactcatggaataaactaagccattacatgttccagttacaccatgatagaacattaaccacccttcatctgtttcaatcggtgcaggtccgcatccaattttaattgactgccaccatcctgatccacctttttgcattacaattctatgttctccccaatattttaaatctggacttttacttaagaatacatctccaaatggagtatgtccattatcgcttggcctagatagcataatatattttccatcaatctttttagggaataaaactccgttacggttaaatggtaagaatggattttctaatcttacaaatgtcttaaaatcattcgttttagctagtccgattgccgcgccatcgaaatctccacaccaaataatataatatgtattttcaatttttagtaatctcgggtcatatgcataaagtggttgatagtcattaccatcttcgtctataaattttattttttctttttcaaattcccaatcaaccccattttgactatgacccaaatatatatgaggtcttccatttatagtttccccacgaaatactcctatgaatctatcttcataaggcataactgcactattaaagattcttgctacaccttctataggattccttccaataataggattctcagtatgtctccatattggtccattaaaattatttggttttttttgccaaggaatgttagatagatttttgcctaaaattttactcatattaattcacctttcttataaaatactattttttatattttaatcctaactttttagaaacatattcgttttatgtccagccattattaaatacatgtaatttatgaactttcactttataaaactctttattttaggttaacgttaaactatattaagtataacttaaaggttaatattagtcaataatttaagtttttttaagtaatcaatacttttttagctaaataaattcttagcattccattaactctaccaacaatttttataattcttctgaaaaataagcaaggagcttacacttaattcaactcgtctcaaccattccagttcgataagttaaatcaagagaaactcctaattaatctcttcacatataattaataaaattttgcatatacatattacaatttttctcttctctttgtagactttataaatatctcttttaaagtttctttgtcatcatcttttattgcatcttttattttatccaactctacttcaaaattttcaatgctttttaataaattctctttatttccaaggaaaagttcgctccaaagatcttcatttatattagcaattcttgttaagtctctataactatctccaatgaaacttcctgtttctcttccttcaacatcactatttaccagtgctacagctaatgagtgcggaagctgacttgtgtagccaatcatttcatcatgatattctggagttattcttttaactcttttaaatccaattttataaatcagatcttctatcatgtttaaattttcttctttatttctagaaaccggtgttaaaatataatttgcacctttaaaaacttggctacttgcaaaatctattccttttttctctcgtcctgccattggatgcccaaaaacaaaatctatatttttcggtaatatatttacaatatcttcgataaacatttttttaattccagtagcatccgttattactgcaccatctttaaaattgtttttattatctataataaattgcttaactaatctaggatataatgaaataattataaaatctgcactcttaattacttcttctccgtttttgaagccttctcttattaatccaagttttttagctttttctaaagattcttcattaatatctattccataaacatcattatacccagcttcttttaaagccatagtaaatgatcccccaattactccaagacctacaactactattttcatatctatagctcccttatatagaattagatttgcttatcttcaatttttgctacagctttaactttattcattagcacatcaaattgatctggagtaagtgattgttgtccatcacttaatgcattttcaggatcgttatgaacttctatcataagtccatcagccccagctataattgctgcttttgccattggttctaccaagtaagcataccctcctgcatgacttggatcaacaattataggtaaatgagataatttcttaattactggaactgcttgcaaatctaatgtatttcttgtaatagtttcgaatgttcttactcctctttcacaaagaattacattttcatttccacctgccataatatattctgctgacataagccattcttctatagttgcagataaacctctctttaatagtattggtttatttgttttacctatttgctttaatagatcaaaattttgcatatttctagcaccaatttgaatcatgtccacttcttcaacaaaagtatctaagtaatcagtagacataagttctgttactataggaagtcctgtttcctgttttgctgtttttaaaagttttaatccttcaagctctaaaccttgaaagctataaggtgaagttcttggtttaaacgccccacctcttaaaaagttggctcctgctgcttttactctttttgcgatttcaacaatttgttcttcgctttctacagaacagggtccagccattatcccaagtcttccaccgccaactattgatccctcaatattaactgctgtatcttcaggcttaaatatcctgtttgcttttttaaaaggttcttgaactttcataaccctatctacaccttttaatacttgtaattttttaggatctaatattgaagtatcaccaacagctcctactataaaatatgtgtctcctttagaaagatgggcttctaatccttttgattcaattaccgcctttaccttccttacatcttcttcacttgcttttgggttcataataattatcatcttaatttcctcctgtactactttttaattttttacttttcttttttctactatacttctgtactacaaatagatagctcaacttaaaaattagttgagaactttctcctcagctaatagagcaggccgagcttcctatatataatataaactatttagacatctttttcaattctagcgccttaatagctaatatatatccatcttctccaaatccacacatctgtcctatacatgcaggtgctgttacagatttctttctaaaatcttctctcgcatgcacattggacaaatgcacctctactgtatcaatatttactccttttattgcatcatgaattgcataactataatgagtataagctcctggatttattattatcccatcataattttcaaagtatgctttttgaagttcatcaattatttcaccttcacaattactctgaaataaggttatttcatgtcctctttttttgccttcttctttaatatattcacatatatcttcaaaagatttagtgccataaattcctttttctctaactccaaccatatttaaatttggtccatttattaccattatcttcattaatatccctcccttcagcatttatatttttctaaactataatgtatattacaataaattatttagttcgcgagtcttctcaacatgagttatgatagtaaattatattaattctataagattacaatataagattttcaacataacatatatatgtatatttcaattgagtttctacattttcttctagtttagtactttgcttactagaattttaaaaataagtttattattgcatcttatatacttaattcatttctaagttatttagaataacttcctttatttcattaactatatttccaatttctttatcatttctaattattctatctgcacataatctatataattcatagcgctcttcatacaacttaattattttttccctaccttctttaagtaaaggtctttttgatatatccacatctcctaaaagctcttccaatggtctatcaataaaaataaaaaaagattcttcctttaatacatctatgttatcttttcttttcactacaccaccacctgaagaaattataacctttccctctttagctaattctctacaagctaaagattcaaaatctctgaaataattttctccttgttcaaaaagttcagttatagttttagatgtcatattttcaatataattatccatatcaataaagttaatttttaattcttcgcttaccaatctgccaattgtactctttccgcatccaggcattccaatgaatactactttgtttttcatatgtgccacctacttaaattcattttcaaatattgaatataaaccttgagttagttcattgtctaattggcatccctgccatatttcttccgcctttatcgcttgccctactagcatttcaataccaccacatacttttttatttaaatttttccccatttttaagaattttgtctccttagggttataaattatatctattaatgaattaaagttatttattatatccttattaacaggagtatcatcaactttagggtacatgccaagcggagtcgtattaattaaaatatcaccttttatttctgatatttcttcataagttttaaattctattctttcatctttatctgcagaattccctttgatttttcttgaaactaagtaaatctttttaatgccatgatctaaaagataagtaataacagccttggccgctccaccatttcctagaaccatagcaacactatctcttataacaatcttattattatctaatatagttccaaacccataataatctgtattatacccatataacttattatcttttaaataaatagtatttactgctcctatttttttagcttcatccgatataaaatctaaatattccattacatcttgcttataagggatagttacattaactccttttattttaagaagctttattgattctataagtttacctaaattctctttttcaacttcaaaaagcttatatgccccttctatttttaaatctttaaaaagcgtattatgaattttaggtgaaagactatgagataacttttctcctattaatccgtaaaattccaaattaatgcccccttttaacagtatttcctgtatccaccaatgagtttaaaatacgcactgctttgttcgattaaattcaatgcctttttaacttgttcattttcaagattcccctcaaaatctacatataagaaatatttccacgctcccttttccataggtcttgattcgatcttcatcatatttatattattttctgcaaagtgtcttaataatttatatagagtacctgctttatgctcaagagaaaatacaacacttactttatcacaactgttatttaattctaactcttttgatataactatgaatcttgtagaattttctcttctattatttatattttcttttattatgcttaaattgtatatatcagctgctcttttacttgcaatagcaacctttgacatatcttgtaaatcactaacaagcttaacactatccgcagtactatggaaaggtatcttcttccaattgctatattcttttaaaaagtcagtactttgttcaaacccctgtggatgtgaatatacttctttaacattatatagttttgttcctttaatcccaattagattttgatctattttaatgcactcttctccaactatatagaatccatacttatataagagatcgtaaacctgtgaaatagcaccagttgaagaattttcaattggtaaaactccataatgaatttctctattttttactgctaaaaatacatcctcaaattcatcatacgccttagcatcatctttcttaccaaaatgcttaatcattgcttcttctgaaaatgatcctgcaacaccataaaagccaactttaatgtcacttttcgcatttttttcttcaaacttatctatagtcgtagctcttatatcttcctttacttctttatcttctaaatctttagaaatattcataatattaataaaaaattgtttcaatccttcggcataatctttattattaaggtatcctatattcttctcaataacttcatcttctctagctttattgaaaacaggtaaattattctgttttttatattctcctacctttattactatatccattctttcttcaaaaagtcttgttatctctttatctatttcatcaatcttatttctataatcatctatagccgccatttcatttctccttacttaggaacaattaaaaaatatttaatttcttaatgcaccttaactcattcaaattaacactttgccttcttaatacactatttgcgataaaaaaactatatattcattaacttagaattataaatttttattactaaagcactaaatcgagtattccaattgcggttacagcttctattactggaacagctctttgcacgatacaaggatcatgacgtccttcaataacaagttctgattcctttttttctgcaatatctatcgttctttgaatttttgatattgatggtgttggctttattccaaccttaaataatataggcattccattagttattccacctgtgattccaccattattattagtgtaagtttttactctatcaccgtcataataatattcatcattacaatccgatcccctaagtctactcatttcaaatccttttccgaattctatgcctttaactgctggaacagaaaacattaaatgagctaaagttgattcaactgaatcaaaaaacggattaccgattcccggatttattccaagaacagtacattcaatagttccacctacagaatcttgttctttttttgctttcagaattgtatctctcatttcttcttctttttcttggattaataaaggcaattcctttgtttttaattcccctaaaagttctctgcttaattctacatcataaaaactcttatcgtggatatctccaatactcttaacatgggctcctatattaattcctttactttctaatacctgcttacatacagctccagcaaatactaatggtgcagtaattcttcccgagaaagatccaccgcctctgtagtcattaaatccattatacctaatgaaacctggatagtccgcatgacctggtctcattaaatctttaagctttccataatccttagaacgcatatctgaatttctaattactgcgcaaagaggggtacctgtagtttttccttcaaagaatccacttaaaatttctggtgcatctgcttcttttctagctgtagataaattacttttccctggcgcacgtcttgccatttctttcataacctcttcaagattaatctcaacgcctgaaggaagcccatcaattgtaattccaatcccaactccgtgagattcaccaaatatagaaacctttaatttattcccccacattccactcatcgaacacacctcctaaattcttaaaatcatcccagaattgcgggtatgactttgaaacacattcataatctttaagtataataggttctttacacatagttgatgctatagccatagtcattgctattctatgatctttatgactccagacttccacgtttcctttaagcccctttacaccttcaattatcaacccttcttctttttcaataattttagcacctaatttattaagttctgaagttacagctgctaatctatcacattccttaattctaagtcttcctgcatttataatttctgttgttccttcacttaatgcagcaactaatgatactaccggaattatatctggacactgagaaccatcaattatagtagacttaagtccaagacttgcgcttccaattaaaccattatctttattatttaatttcaatcccattctttgtaatatgtcaattacttctttatccccttgaagagaatctagtttcaagtcattaagcacaatattgcttgaaagtgcatcagcacagaagaagaatgctgcttgtgagtagtcaccttcaactctataatctatactcttataaatttgatttccctttataataaattcttcataattattatttataatttctacaccaaagtctttaatagctcttaaagttaaatcaatatatccttttgattccatttctgttgtaattacaatcttagagtctccatctaaaagaggaagcgtaaataataatcctgttataaactgtgagctaatattcccctccatcttaaactctccagcttttaatgttccttcagtctttaaatcaagaataccatctttataagaatatttaattccttgttcattaaaaattttgtaataagtgtctaatggtctctttcctaaattacctcttccaacaaatctattaactccatcaaataaagctgctataggtactaaaaatctaagagttgatcctgactcgttgcaatctatagttctttgttccttaactgaattagcttcaatattttccggactgttaactccataaacctcaagataatcttcttttttggttattttagcccctaatgctctcattgcttcaattgtagcaataatatcatcagaataatctatatttgtaaccttactattaccatctccaagagctgcgcaaattactgctctatgtgccatacttttagagggcggtatcttaacttccccactcaattttccaggataaatttttaagttccccatgattttacctcgctttttattattcattgcttaagacatactcaaaaaacaacatatctgcttgttaatttattttttcatacgcataattaactaaaaaattcaacattagtcttttctaagtatgattctccaatgccttttaataatactacctttaaaacattatcaatatttttcttatccaaagctatagtatctaaaatttctgaactttcttctatttcaacttcataaggaagattatattgtatcaatatatcttttatctcttcacttacaccttgattagttaaccctttattttctgcaatcttacttatttcatacatccctatagctactgcttccccgtgtgtaaacttcttaaagttataatatgtttctatggcatgacctagtgtatgtccaaagtttaaaagcattctttccccagtatctttctcatcattttccacaacgcatttttttataaagcaacatttgtggataactttttctatattgttcataacctcttctttattttttaagcttttcaaaaagtaaaagaattccttatcttttatacatccgtatttaataacctctgccattccgtctctaaaaaatctttcactcaaagtttcaagtacatttggatctattaaaactaatttaggatgataaaaacttcccactaaatttttacctctttctaaatctacagcaacctttccacctacgctgctatcaacttgagcaagaagtgaagttggtatttgaacaaaatctacacctcttaagaaagttgatgcagcaaatcctccaagatctccaattactcctccgcctaaagttataatcaagtcacttcttgtaattttaaaatttaatagttcattatatatcaaaggaagggtactaaacgctttagtttcctcacctggttctagttccattagcttaacatcatatcctgagttaattaaacatgattttatcctatctccataatgagaacctacatttttatcagttagtataaatatctttttacctttagaaactttttggatttccagattcacttcatcaattaatccttttttaattatgattggataacttctttcaccaagttcaacaactaaatcttccatttatcaacactcctcttgtaattaaacagttagcatcatgactaagattacgttatgactcttttctattttttagatacttgtaatgagtaattgttaataccaactgttctctaatttaataaatttatatttctcttccaacagccgctgcaataacttttaactcttccatgagttttgcaaacttacttggctttattgattgtggaccatcacataatgcattttctggatcattatgaacttcaataataagtccatctgctccaactgcaaccgctgcttttgctagaggttcaaccatccagtactttcctgcagagtgacttggatcaattactataggtaagtgacttaattttttaacagcaggtactgcacttaagtctaaagtatttcttgtgtagttttcaaatgttcttattcctctttcgcacagaattacattttcattaccaccagccataatatattcagctgacattaaccattcctctatagttgctgataaacctctttttaataatatcggcttgttagttttgccaagttcctttagtaaatcaaagttttgcatatttctagcgccaacttgaattacatctacattttcaacaaacgtttctatatcataaggagacataagctctgtaattattggcaatcctgtatttgctcttgctttctttaaaagttctaacccttcatatttcattccctggaacgcatatggtgaagttcttggcttaaatgctccgcctcttaagaaatttgccccaatttccttaacttcttttgctatttcaatgatttgttcttcgctttcaacagaacatggacctgcaatcattgctattttctttccaccaattttaactccattaatatctactattgtatcttctggatgaaacattctatttgcttttttgaaaggttcttgaactttcataactctttcaactattccattagctgcaacaaccgaaggatctattgcacttgtatccccaactaatcccaagatactaacatctgatccaacaactaggctcactgaaactccctttgcttctagttgttttgtcaatctttctatttcttcctgctttgctttttgctttaatattactaccattgtatattgcccccttgcatgtatttgattattgcgaaaaaaaaatggaactcatgtataatgagttccataaaatatcaatactgatatatattacaaacttatataaaatataaaaaactcattaaaaaggtatttttcagttttttgcaaaataaatagccagcgctaaaataaaagccccagaatgtaaaataaaaaaagctataaaatttttgcataactgattttacaatatccttttccatgattttctccatttctaaatttaataattattttcacgaatattaattacaatatttacatttaaatttaatctttttatcattataacaaactatatctaattgtcaatacaaattaacgcttttcaaacaaatattgcattttgcaatcaaataattaaatatattgtatttctattaatattaaatcaataattaatatatatttttttcactttatcatttcaactttatagtatttattctaaaaatctagttataaaactcctatgtaaatatattagttggttaaattcttataaaaaaacacctaaatactaggtgattttttagttaaacgctaattataattgcttaatggattgtttgcccttaggaagaatcttaatagaaactagcaaagaaattaccataattgagaaaccaaccagatacattgcagtatatccaaaatttctttggattgaactaaacatatgtggatatacaaagttagctcctgctgatcccagcacgctaacaaatgaatatgtaccagcaactagttcatcatcaactacttctcttatatatttaaataaaaatgttaaataacaaccatacattaggccatgtaattgatcccctaagacaactaaaggtatagaacctgttgaaaataaaagtattctagtagttcctataagaaatgctattattaaatatttcttaggttttttatcctttaggtactttcctacaagcatgaatgatataaattcaacacatactcttgaaaatatagatttactatatatagagttagctagatccgcattccccgttatttcaattaaatatgttgaatatgcaaattctattgcggtataagttcctattattaagatattaattattccgagaattactgaatttttatttttaaatacagcaattaatttccccctatttggatttccatctgcttcaatattcttaaatttcatagctattaataatataactatacatgacattatgattcctattatatgtatagttttaaatccatattttaaaattatagttccacttaataaaactacgcacccaaatcctatggatccccattttcttatttctgaatactctacattttttctaactgctatttcttcaacatatacttcatatacatttccaattgtttgtactataattccataaagaactgcataaaaatatatgatagtcttgttaacagacattaaaaatactatcattccaacaagtgcgcataaatgtatgataataaatctttttttgttttttctcatcgaaaatttacttactaaaaattgctgtgaaagaattgcaaataacgctcctatagatactacagttccaacttgacttaatgataatccaactacttgattcaaatatggcacataaaaagtagtcactatacttgttactccataatttatataagtagtcagggagtaataaaacttttctttgcttttcatataatgctccaatcctaatgaattaaatatttctcctattcacttctcttattaaatttatatattaaattatactcagttaagaaaaagttttctatagacttagcaattttataataaatagaaacaatattaaatttatatttatgtgataataccctgaagatataaatattattatttcgcaggactataaaaatttcactaaaagttctaaattataacttgcatcactaatgcttactttcaatttcattataataatcattagataaacaacatacaattaagaacttttaacaacaacaacttatttttaaatgactgctgcattttaacactttcttatctaatacatattaaataacatactcaaactgataaaaccactcttctatttctttaagtaaaagagtggttttatcataattttaaatttcctattctataatataggagataccaatctaattaatgactctttaattttgagagacaagctcctaccatcatatatttgcctagttatctcttctgagcactccatgtcctttataaactgcttttctccatcctttgcaattctatcgtcataaataaatgcattaacttcaaagttaagcttaaaacttctaatgtctaaattagctgttcctatgctcattactaacccatcagctactacggtttttgcatgaataaacccattttgataactatatattttaactccagcttctaataattctcccacataagaacttgctgcccattgcatgaagaaatgatctggttttcccggtattataatccgtacatctacccctgataatgcagatatttttaatgattccaatattggtgaatcaagaactagatacggagtttccaaatacaaattattcttagcattattaattaattttaaataagcatttctaatatactcttccttgtgatccgggccactagttacaatctgtattcccacatctcctaaatctttcttgaattcttttgcatatttattataatcaattattttttcaccagatgcatgacaccaatccaataaaaatctttcatttaatgcattaactgcctctccctctattcttacatgagtatctctccaaaagccaacttcaggatcttcatttatatattcttttccaacattaaaccctccaacatacccgtactgaccatcaataacaactatttttctgtgatttctataatttatacgagtatttatatgtggtaaaattcctggaaaaaacagtgaaaacttcccacctgcattcaagtattccctaagaacttttttactcaacttgcgtgatcccatactatctaataataatctaacttctaatccacttttaactttcttagttaattcatcaagtatctgttttccaatagtgtctcctctaaatatataatattcaacatgaataaactttttagcattttttatgtcttcaattaactgactaaatttttcttttccatttacatatacatcaattttattattagtagtgtattttacgccagaattattaaaatttagcctccttaaatcagcaaatttttctcctccatcatgactgtgtttattggatttatatgtatcttttaagttttttctcttcttttcatcaaattttattttttccttaaaaatcttttgcctgcttagattttgaccaaacatgatgtaaatcacaaatccaaggccaggtaaaatcattaatattaagatccatgcccatgttgttgttggatcttttctttctataaacactaatgataaagaaaaaagtatattcaaaactaaagttataactgttaagcctaaaagtatgttcattgattcacatccctatattaaactcttctctattctaatattgtatcataataacttattctaaaaaaaatattatttgcttttttagatataatattatttataactaaaaattaatttcatttttaataagaaaactactactaatattatttcaaatattgcataaacaataagtagtaataagtttttactattaaacacatatatataagtcaacttcttgactttttttgatttcttaatatataatattattaaaattttatattgtgcgatgaataggagtattagtaataattatatcttaaagagagctgttgtttggtgtaaaatagtgttatattattatgaacttgcctaggagcttacttgttaaaagcaagtacggtaaacccgttaaaataataagtgagaaggataaatttgttttttatctcttctaattaagagtggtaccacggaaattatgctttcgtctctttgttttagagatgagagctttttttaatttatccattattagtgcataactttaatattttaatcaaaactttgttttaataacatatttttcaattattataagtgtttttcttttatatgcattatattgtgcattttacattaaaattataggaggctatatcatggcaaattacggaacaaaaattgatgaaaagtggcaaaaattttgggaggagaatgaggtttataaatttaatcctgaaaatttagataaaaaactctatacattagaaatgttttcttatccatcaggcgctcaactacatgctggtcactggtttaactatggtccaacagattcatgggcaagacttaagagaatgcaaggatataatgtattccaaccaatgggatttgatgcctttggattacctgctgaaaattatgctataaaaacaggaattcatcctcaagattctactttaaaaaatattgagacaatggaaaaacaattaaaatctatgggtgctatgtttaactgggaaaacgaagttgttacttgtcttcctgattattataaatggactcagtggctattcttgaaactttacgagaaaggcctagcttacagaaaaaaagcacctgtaaattggtgtccatcatgcaatacagtattagctaatgaacaagttgttgatggtgcttgtgaaagatgtagtactgaagttacaaagaaagatcttactcaatggttctttaaaataactgagtacggcgatgaattacttgataaattagatggtttagattggcctgaaaaaacaaagtctatgcaaaagcactggattggaagatcttatggtgcagaggttactttcaaagtcaaggattcagatttgaaattcgatgtatttactacaagagttgatactttaaacggtgttacttatgtagttttagctcctgaaaacaaactagttgatgagttaactcttccagagtataaggctgctgttgaagaatataaggaagctgctgcaaagcaatctgaaattgaaagacaatccgtttcaaaagaaaagacaggagtattcacaggatcttatgctattaaccctattaacggaaaaatagttcctatttggatttctgattatgtattggctacttatggtacaggatgtgttatggcagttcctgcccatgatgaaagagattttgcttttgcaacaaaattcaatttaccaatcgaaagagttataacagataaaggaaatactaatccagaccttccatattgcgaatatggagtacttgtcaattcgggaaaattcgatggattaacaactgatgaagctaaaaagaaaattgttgaagaattagaaaaagatgaattaggagcaatgaagaaaaacttcagattaagagactggctagtttcaagacaaagatattggggtgctccaattcctgttatatactgtgatgattgtggaatagttccagtacctgaaaaggatcttccagtgaaacttccttacaatgttgaatttacaccagatggtaaatcaccattaggtaaatgtgaagattttgtaaatacaacttgtcctcattgtgggaagcctgcaaagagagaagctgatactttagatacttttgtatgttcatctttttactatttaagatatgtagacaataaaaacgatgatgcaccttttgattctgaaaaagtcaacaaaatgcttcctgtagacaaatatgttggtggaccagaacatgcttgcatgcatttattatatgctagatttataacaaaagctctaagagatatgggatatttaaactttgatgaaccattcttaagcctaactcaccaaggattgatattaggaccagatggacttaaaatgagtaaatcaaaaggaaatactatttctcctgatgattatattaaggaatatggcgctgacgtatttagaatgtacttaatgtttggatttggttatactgaaggtggagcttggagcgacgacggaataaaatctgttggtaaattcgtagatagaattgaaagaattcttgaaacttgcagaaatataataagctcaaatgagagcactaaagattctattgattcagctgaaaaagaattaaatttctggaaacataatactattaaaggtgttactgaggatggagataagatgcaatttaacactgcaatagcaagacttatggaacttacaaatgctcttaataagtacactcaagaaaatattaaaaacacaaacttcttaaaagaaactatagttgatttcataaaactacttgcaccattcgctcctcactttgccgaagaacaatggagcttacttggaaataattcaacaatctttaatgaaaaatggccagaatttaatcctgctgctttagttaaagatgaagtcgaaattgcaatccaaataaatggtaaaataaagactaaaatcatggtagcttctaatttagatgaagaaggtataaaatctgcttcattagaaaatgagactattaaagaaaatactgaaggtaaaactatagttaaagttattgtaattaaaggaagacttgttaatatagttgtaaaataaaaaagtggccacttggccacttttttattagttatagatattcaactttaaagctatatttacgtgtcaacttaccgaaatcataaatattttgtttcgaaaagctatgaaaatatgttcacataataattctaattagtaatttggtcatctatatatactattactttagttaaacttttactctttttgataagatcatttcaatattgaaacttatgaattaaatctatatcccgttccccaaagggtttcaatatactctggatttcctgggtctttttctatcttctttcttaacttttgtatatggactgccacagttgctgtatctccgtaataatcctctccccatattctatcaaataattgatctttagtgaaaactatatttggattagaagctaaaaataccataagctcatactcttttgtagtaagaataacctcttttccatttacaaaaactttatgtgaatctgttcttatctccaatgctttatggctaataatattgagttgaggtctatttcctgataaccgctcatatctaagcatatgagactttattcttgctactaattctgccggactaaaaggttttgttaaataatcatctgcaccaaatcctagcccttttattttatcaatatcttcacttcttgctgatactattattataggtatttcatatttttctctaacttctcttactatttcatacccttctttacctggtagcattaaatcaactattataagatcatatgtaccaataagagctttttttaatccttgaatcccatcctgaattatttccactttataaccatttaattgaagatactctttttctagttcagcaatatttatatcatcttctataattaatatttgtttcatatgcttcctcctctttgttatttatgcacttaaatgtcacactgtcagatatctatgatccgtatcactatttaatcacgaaataacatctaaacactcctgagcattatgccccttgttggcataaattcagctatagtcctctccacctaaaaagcttcactttattggtagctctatagtaaacgtacttcctttccccattatacttgatgcataaatttttcctccatgagcttctaccatttcctttgcaattgcaagtcctaaacctgtactcataaagtcttttgtacgttctgtatctatacggtaaaatctattaaatatatttgaaagtttatcttctggaatcccaggaccattatctttaatttctatcttaatccattcattattattacttaattctactttaattattgaatctttttgccttccatattttatagcattccctataacattcctaataacttgatatattctttttccatctatgttagtttctaattcttctgacaacctatcttcaaatttaaattcaatatccttttctttaagaacaaaatcaaactcttccataaggtcactcataaatgccttaaatttgactatctcaaaattaaaatctaatttttgcatatctaattttgaaaataaaaacaaatcatcaataaggttatttatataagtagtattattatgaattatatttagataattgttcactttatctggtgaagtaacaacgccatctactaaggcttcgatatatccattaattgaagtaattggcgtttttaaatcatgggaaatattagctatcaatgcttttctattttcttcatattcaattttcatctcttcagatttttttaaggtttcagccatcttattaaaatcatatattaaaattcctatttcattatatacgtcattatcaattttcacatcataattacctctagctatctgttcaacaccatcttttaacttctctataggcttcataattcttttttccattctcaaagttatatatatatgagagctttgatgaataataaaaattattgcaaaaaatatagtaattgcctttacatctacaaatttaaatatggaaaaaacaagtaacatgcttattaaaattcccgttggacgcatccatcttaaatatctatgtatcctattaaattcattaaattgtttatgatgagaattatgatgtattttttgatgctcataaactaactcgtaacgcatttcatttaactctttgagtttttcaaaaaattcccgatgttcttcatcaattctattatgaaaatgagaatgaattcttcctctaaaccttctaatgctttccaccaccttaaaataaatttctaccattgtaatgattataacattacaaattaacttttaataaattaaattaaagccgcctattaataattctaataaaatcaattctatgagatacttaaattttgatttagaacaaagttccttatttatttataaatgaaaatctctaaataattgaattttacatcaataatttagagatttgtgaatttcaacccctctttacattaagaaatactcatttttcttaatagatttttcacatcagttgcatatatatatttatcatcttctttaatcatcactctagtgcgacatttaaagcatttattatcacaatacgttgtctcaaattgaattcctctattatttagagcttcaactaattcattatactttctagtattagtacaaataacatatttgggcatttactactatctcctaactcaatcaatttaccaaactaaatctagtgatccatttacagcattttcgcctttagaagaaatttctactttctcaacttcattatctttatttgcatatatttttaatatagcatcgctgctttcagaacataatagttcttttataaatttatgatgcttatgaaaacctctatcatcactttccttcatttgtcttatatgctccattatcttttcttcatccattccattatggaattctttacgcatgtccttgatttctttaaatacctctttcaattctaaagaaataatagccttttcatctttttcctctacttgcatattatttaataaatttaatataaaagtaacttttgaaagtcctccttttattccaccgtgaccatgcattccgtgcatattcatcccatgattatgattatgcattcctctataaaatccatgatgcgggcactcctttatattaaattcagaattactatcatgttttacttttttgccttcagcatctaaatcaacacttatgttagcttttgtttccccacttttagtattagtttcaaattcattagaaaatgataatacttttacatctcctttagttgcttccaattttacgcttcctttaaacacttctttttccttcatagttttaaatacatcatataatactttaattttattcatttataacgcctcctaatattttcaaagatttatttccttgcttgttatgaattcattataaaatctaattttaaaaatcctttaaagcaattataaaaattttataaaaaaatagaaatccctcaaaagggatttctatttatactatggaacaaatcactatatcttttcttcttaatttactaattataaatttttaactataagccatcttattttattacattttgcggagtaccttttaaccatttttcaatattatcaaaaacaataaccgctctcttttcgaaagcttcagctgttgcaaaggcaacatgaggagtaactattaaattttttgctccaaacaatacatggtctgtaggaattggcggctcaatttcaaatacatctactccagcaccagcaatttttccattatttaaagcttctgcaagtgctgagctatctacaacaggacctcgtgctgtatttattaaaattgcactttctttcattaatgataatttttcattatttattaatcctttagtgctttcatttagtggaacatgaagtgatactatatcacaagtagccattaatgtatctaaatctacaaattcaattccttcaacatcttttttagtcctgctataagcgtatacatcacatccaaatgctttagcaattgcagcagttctcatacctatagctcctgcccctactactccaaacttctttcctgcgagttcaaatcccacaagcccattctttgttccaccttctctagtcaccttatcacatggtataatatttctatatagagaaataaccataccaaatactaagtctgcaactgcagcagttgagtatccagcacaattgcatactaaaatgtctctttccctacagtaatccattgcaacatggtctactcctgtaaacgcaacacaaatcattctcaaatttggacagttttctattacctcttttttatatggaagattagatagtactacagcatcagcatctttacttctttctattaatgtttcagtatcttctgctcttgtatcataatatattatgtctacttcatttcctaaactttcctttgccattcccaataacttatccttatttacacctaatggctccaatatcactaatttcattttcttcattctcctttatatattaatttatatttaaaaatgatttgttaaaagagctttatctatattataatgatacatccctattagaatcttttgaatagatgtatgtgaaattttttattttaattatcctcatagaaaaaagattcggatattttcttctacagtatctaagaaaacatccgaaccctttttcatattagccaacgtatacgtgatatttctaaacgcaatttcgaaaataaaattaaaatatcagtatatggtaaattacatgaacttgcaaataatgtttacatatcgcatttgttgcttcaacttactaaatattgattttattattgtaaataagacttagtaagctgagcatatttaccaacttagttttaaaataataatgtataaattttgagccatataattcattccttgtaagagtacttaccttgtattacctgatgacttaatgcagattttgatggattaaaatttttagaacgtattgcttataaatacaactatttttcaaaatctttatacattaaacttggctgtattcctttattattctgatatttcccactgctatataaatcatattctccatggatatcatgataatatatttggcatatttctacattaggataaacttttattggctgaacacaaaaaatttctagcgtccagtagcctgaaaatccaatatctccaaatccagctgtaacgtgaataaataaccctaatctacctgttgaagagcgcccttcaagcatagggacgtatttattagtactggtaaattcatttgtccttcctaaatataatttgcctggttctagtaataatccatcctctggaatttttataacttttgttggatttagagttttcatatctaaaatatcattttcataaactaataattcattatgtaaagacaaattataactattaggatttatctttttctcatcaaaaggttcaattattatattactaccaatattttttaatatttcttttcctgataatatcattagttctcctccaaactatatactttaataaatagttcataatgtattgttttaatgtattaaagctactaaattataaatgcctaaccaataatatcacaatatataaaaaaatttatgcatttaagatttctttaaactcaagcaatacttttttaacattctcttcatctaaaggcttatagctatttaaatatcctgaagcatctagagcttcatatgctttcttactcattgaaatccaattttcaggtatataaatccacactatatcctcatatttacaacttaataaaaaatgttctaatcctctaaatgcatattcttcaatttcgtgaagctcatttagagttttataatcctcaactattttagaacttaactcacatttatatatgtctacatagaagaaatcaaatttattcttttttgctttaaaggcatccccttttattattcgtattttttcatttttaggaaaattattattatataattttattatttcttcactactttcatatacaattacttcttctacactatttttttttgcaatttcttgaactacatatccaataccaagtccaattacaccaacttttccgtgagcaaaagaaattgctccatatgaactttcaactgtctctggtgttagtttcattaaatcattgccatttttatataattgaattatatctatatcatattcttcttcattttcatacatataaccttgtaattcttgctttattatggtatctttaactattttatagtcgccacaagttccttgattaattaagtcactatatcgctttatctcttggaacacaaaacttttattatatggtttcatagttaattccccttcttacaatatttaatgaaaaatctttaatagtcctatttattatagcacattttccaatttatgtataatattgtataatttatttattaacattatatattcaataaaccataatataatagcacattcttagccataatataactattaatattaactttttattttaatatatatatgctatacttactttaatgatttaatatcattaatatttcacaaagtaggtgtttatatatgaaaaatgttaatataagtgaagaagcttataatgaatttaaagcttttttagaagaaaataaaataactgatttcaacattagaataaattttgctggttatgcatgtagcggcccagtttttaacatatctgtttcagaagctactgatgctgacgaagttgagaaaatgaatgatatttcatttatatacgaaaaatccctaatagaacaatttggtggatttataatactttcttctgatgaaaatgaaggtaatggtttaagcttaaagcccgttatagcgcctgaaggcggatgcggtggttcttgctcaggatgccactaaaatcacacaaaaaaatgtagaataaatgtagaatatttattctgcatttttttgttgttataagctcttacaccatctaagattaacctttcaaaaagcttaattcttgtcctactgctaatcaatttacttatttgtactatcaaccgactctattttccactgtacatccccataatcatcacttattttatatataccttctaaaagatctatccaataatgattttttataactttactttccttatcttcacctgtgactccctttaaattttcttcattaaattcattaaaatagtcatatgtttttgaagaaatttcatacatgtatttaaaagattgtaaatcttcactttctaactgtactttacttgattctttcttcatctctctacttaaagtagataacatatactcctttattttttcatttatattattttccattatcttatctgttttaatcaccttagaaaaaaacggtattgcattttgattatacgctctatactgttgccataattctattatgtcattagacatttcatcataattcttataaagtttcaataaatcttcattttttaaactattttcttcaattcctttagacaatatgtccatattactttcatttctttgtttaaaatcctctatcttagtataggattcctgacctagcttgtatttgtaattgctcaatttaaatgatacatatatattaaatattatacttactacaagaagtatagataaaagccttacataatctgtattttttgttcctttggtcaagaatatcactcctctatactgtaatttattttaacatattcccttatgtttgcctatttaaaattagctaataatttacctatctagcccaatcatgtattgcttcatttaccatttttaatccgatattcccacctgagctttctttcttttcagtatttattcttttaatctctccatatggattttttaatgataattcttcatttccggatataacccatatagtttttttattaattggctttaccttaagctctctttctccaacaccatctgtaaaatatattaatacagcacttcttaaattattttcatttatatacttaaatacaggtgtaaatttcgtagatccattatccttacttctctttcttatgtcattctcatttcttaagtcatatacttttctaatttcactatcacattctataattgtgattttatttttaatatttgaagttattgacagtatctccactagtatcttatgcatatcactatccttcatgctggcacttatatctattgctacaattaattcagtttgacttttaggtagtcttcctcttaaatctaatctttccggctgccttctattccttcttgttattgtcctcttatatcctgatttcacacttggaagaatattcttaagtactacttgccaaggtatttccgccttttctttatacgctagaattatattttctaatccttttggagtattttcattataagcgcttagagccgttttcttagtcaaattactaatatcttcatcacttatttgagcaccctcccacagatcatggacttttgacatatctacttcatatttcgaatcatcatctttatcaactttatcttgctttatcctagacttaattgacttatgaatttcttctgcatattcctcaacacttctattttcatcaagtgacaaattatattccatattaactgcatcaagtcttttgctaaagggtggtaaatcttttatatactgattaattgaaatatctaaagcaacatttactgcctctttactaaatctagccttcaattttctttctctttcaaaatgagaattcattatatgatatatttcatgtttaaataatgctgccatttcttttctattacaatccaaaaataaaaatggattaaaatgcatctcaaatctatcacgctttggaatagttgctattggcgcagttaatgtagtatttattttccgttgaactctaagcatgaattgcccaaaaaaaacatcttgagtttgcagcaaatataatataatatcctctattaactcaaagaaatttcttttataattgtcactaaatttatcatcttcacgcaattgataggcctcttttaaaagttgctgtcttttttcttcaaactccatactctcctccccctcttttattgattacttgcaataaacttaatttgtaatagcaatttttaggtgtaactttactttttaaaggaaactcgactcacattcgttcgctgagtaagttcgataaaccaaatcatagatttggattctcacttaaatatattaaaaaatgcatctaaaaactcttcagtagccagtagcttttcatataatccattttccgtataatctctttttatttccttcatgataccaagcctcaaatctcttggatataagtttagaagttctgaaaatagccttaaatttctttctatagaaatattctctaaatatcttaacgaattttttgacaatatatataatctagaatgattttccttttctattttttcctttagctcaaaatttaaaatatcattgctgaatatatcttcaacctttactaaaggtgtttttagattgattaaaaaatttccaaaatcatttgcaatactaattccaacatttccttttacaacattcagtaaagtatctaaagagtatttccccttattcttcacaaatattttatatgcttttgatactctctcccagcttcttggagtagcttttattgtttcttctgaatcaggagtatgtagatattctggaaatgtagacaaaaattctattatatgttcgtcaatatttccatccttactcattccccacttaatccattctttaatgtcagaatcaagccttacccaaacaaatctatcttcttgagctggatccatatcaacaacatcatattgactactattaaatccatcatttttattagaaggattcattgcagctattactttaactctttcatctaatatatatccattaatctctctatttaatataagattcataagttcttgtgctacagcatgatcgcatctattcaattcatctataaataaaatgacatctctgtttgtgtcttcatctaatgcttttttgatttcaataagcttactatgtgttgcatatatagtcgttctattttcaactacaggaagccctcctatttccccttcttttagtaagttagcatctattgtaacaaggtaatgcccattttcttttgctatgctcttaactaacgaagtctttccaactccactttctcctataattaaaggtacatcatttgatgcaactattaaatctactgtgtttaaacactctgaataattcaatcttttcgcctccactcttatatagataatttataatctactagaaactttttagcgttggtgcttccatattctctaacaaaattaattttatccatctccaaaacctctaactctagaaaatcttcaatgtatttcttactaatattatcttgtctaatcttttcttgaagcacctcaactactagttctacatctatgctttcataaatatacttaactacatttatattttcatatataaatttttttatttcatctaaatcatagttagaaatataatttatagcttccccatttagttctatagcttttattttcgccctaaggcttggattttttataaatctaattgctacatagtagttttctatagctttaagctgaatttcttcagaaggattctctatatatttaattgcatcatagtccctactaacagctaataattgaagttcctcgctaggattctctacaaattgtatagcccatcctttagtcttaatagcttcctttatcaccttttcagtaggattatttattaactctaaagagttccacaagcttttaacacacattatagcgatttcttcattaacgtctttaatatattttactgacaatggagtatttgcaacagcttgtttttgtacatctctgctagggttcttaatatatttaatattgttaccattattcttaacaataaataactctaattcctcatcaactttgtctagttcctgaatatattcaggattgtttttcaatctcaataatagttgatctctatccatttttatctccttattatatatattaatttcatattatgttatttctatataaaacattatacttgatattgccgacatattcactatgcttgattaataaacacagtctacttggataatacttaataaatatttaatattctataaaaaaatatagccgcagatatttcttttaaatattgaaaatctacagctatattttaaattatttgaacaataaaacataattttccttatgaactaaatatacaaaaattcctaatctgtatatttttcaatttctcttttaacagaaaacaataaactatttagctcccaaacttcgccatcttctattaacttatttaaagttttttggaatctggctgcctctgtttccttacctagtgaaattaaagttaatagtaaattcattatatttgaaattaaatgcgatttaacctcaaacaacttttgcgcatctttaatttcatcttttatttctaacatttcttcatctaatctaaatgctgcatccgcagatcttttaagtttttcctttaattgttctggtatatgttgcttatatttgtaattaagagaatgttctatagttgcccagaaattcattgctaatgtccttatttgaaattcagctaaaatttcaactaatccttctgccatatttacaggatattttattatcatatgataacttctataaccactttctttgacattccttacataatccttctcataaagtatttgcatatctttacgttctcttaatatctgcacaactgtgtctatatcatcaacaaactgacacattattcttatacctgcaatatcctcaagttcatatctaatcctatctattggtatttcaaatttgttagctttttctaacatacttgatacttcttttactcttcctgttacaaactctataggtgaatattcatttttttttctatattcttttctaattgattttaacttaactttcagttcatctactgcttgctcataaggcattaagaaaaccttccaatcattcattgccattatatcaccctttaatacattactatcatttctcaatttcatccttatctattatatcaaaaactttaaattaagtgtaattaataataaataaactatttaaaaaatattcatatgaatgcgtttaatatgttataatcaatgtataatatagaattttattctagattgtatttttgatggggtgactaaaaatgagtgatacgagtatattaaatcatctttttgacaaacagataatctgtcctgtttgtaattcacattttaaagctaaaacagttaaatctaagtcaccacgagttatttctaaggattcagatttctttataagatactctgtagtaaatccgtatttttatgatgtattaatatgtaattcgtgcggctacgctgcaatgagatcagatttcgaaaaactaaaattgcataaaaaagaacttgttttaagcaacgtaacaccaaaatggaaaccgagagaatatccacatatcttagatgaaaaattagcaattgagcgctataaattggccttattaaatgccatgcttattgatttaccaaacagtacaaaagggatgatttctctaaaaattgcttggatgtatagattattggataatagtattcaagaaactttatttttaaagcaagctctcgaaggattcaatactgcttatatgactgagatttttcctatatatggcttacaaagagattctttaatgtatcttttgggagaattaaaccgaagattaggaaataatcaagatgcattacaatggtactctaaaactattgttaatacaaattcttcttataaaattaaagagatggctcgcgttggaaaagatttaattaaaactgccaacacataaaaatatatttttatttatcatttcaagggggaatataacatgggattttttaacaaaaacagtaataaaaatactactatgacagaaactattgtatcagatgtttctaacagtggggaaaacaatactaacgctagtcaaaaaaatttaaccaacatcaatgatttaagagaaaaagcttctttaattgataattctataaagaacgcttcatctactgcatccgaattagtttcttctgctgaagctcaaaacagagaaataagcaatgttaagaatattttatcaggttttcgtgctaatatggaagacttagcgattaacattactaatgttcacattaaagtgttagatactgataaattggctgatacaggattaaatacaataggaaatttagatacatctctaaatgagcttgaagacgctttcacaatatcaacttcaacagtaaatgctttagtatcaaaactagaatctgtaaatagtataactgattccataagccaaatcgcaagccaaactaatcttctatcattaaacgcggctatagaggctgcaagagctggtgaagctggtaaaggattttctgttgtcgcaggtgaagttagaaaacttgcagagaactcaaaacttgctgttcaaagtataactagcatactcgaagaaattaaagtggacatattaaaagcttctaatgcaatgaattctggtaattcagcattaacaactcaacataactcactacaagaagctaaaaccagtttttctgatattaaaacttctatagaagatgccactgaagaaattagcacttgcatagagaatttgactactgcttctgaagcaaaagatactgttattaattcgattgataacataagcgttcttttcaaagaacatgaatctttatcaaaagaaattattacagatcttaataaccaagaagatgctattaaaaagatgagtaattcaatagaacatttatcatagattttaaaatccatttattaataaataatagaaagctatctaatattttcaattagatagcttttgttatttcaattatactataattttattcttcaatagaaatgatgtagctacagttaaattcttttccttcttctaatgacattattccttctttatccttaaattctccattaaaatctccataatcagcatgaccaaaccaaggttctatacatacaaatggagcgccatcaactggagcccatattcccatgtaaggaaatccatcaaactccacacttaaagacttattatgattctttgattttattgtaattttatttgattttaaatcatcaaatactaatgcgtcatctttaaatatatcttttttaagttcaataatatcactattaattagataatcttttttttcatgggtaaaatatgtattcttatcaaaacacataattgagctattctctatctcattaaacttaagataataatcctctaatatctctgttttttcaattggacacataaatgctggatgagctccaattgaaaaatagatttttttatcatccaagttgataactttataacttacctttacactattttctttaatagtataagtaacttgcaaagaaaacttatatggatatacttcaagacttttatccgagaactttaactcaaaagtaatagattcattgctttgacttagcaaggtaaattgagaaattcttgctaacccatgagatggtagttcatattcctttccatcaactctatacttagaatcctttaactttcctattataggaaataaatgcggtgcgtggtatttccaatattccggattgccattccaaagatattcagtgccttccttcttgcctgttatagagtgtagctcagcgccattctcactagcagtaattttaattttttcattttctaaggaataaatcataaaacgtcactccaaatcttattataattatgtaaagagatataacgtatttatcacagttatatctataataatatgtaaatacaattacctaattgcttattattaatattattcagattaattttaggctcaaacaaattttctatttatatttgttgaataaattttattctatatttatctgcctcataatatctttttgggatcaaaattcaagtaatctgctgatgttagcatatattctactccatctaaatatccatttaatacttttccaagtagtactggaccatgcaaatggccatatataactttttctactttgtattctttaatcattcgtgtaaattcagattcctcaaatttatcatttgtaggaggataatgaagcataacaattatcttttcaaatccactatttttcgcagcatctaacgaaagtttcaaccttatctgttctctggtatatattttttcatccttgctagtatatttatctccgcctgggcacatccatcctctagtcccacatatagcataatcttcataagtataaaaattattttggagaaacttggtattttcatacatcttatttaatttcgatatgcttccccaccaataatcatggtttcctttgcttataatctttttacctggtaattcgtttatccagtccagatcatatttactatccgtctctttcaaagaccaagatatatctccagctataagcaccatatctttttcagttatttttttaagccaattttcttttattttatcagaatgcgctttccacttgtctccaaaaatgtccattggcttttcaacattaaaacctaagtgtaaatctgaaatagtataaagtgccatttttctcaccttccgtgtttcttctgtctatagtctcttcttatctaaatcagtaagaaaagcaattacatgagctactgcttcatataattccgtaggaatttcatctccaacatctacattacacaataaatcagttagttctttattgtatactattggtacttcattttgtgttgctttttctattattttatctgcaatatgccccattccagctgctgtaactactggtgcatcgctattaaattcatattttaatgctgcggccttcttcctctgattcatattctgtacactcctaaccgatattttcaatagttctaaaatgtacaattaaagctaaaattccttctgaatctaaaagtatttataattaaggctcctttattgcacattaactgcatattttaaatgaatacactaattattataccttaatatcgatagcagaaatagttaaatcgttaaagaaatttctacaacttactaagtctacaggcttttctttcatagatacacttatattaacaaatagcccaagtgttgataatccatcaactaatttggatttattattgtttaaaatagatgtaaaatggctttcacattttaaattcacatcaattctgttatctcttaatgtcaaatatccatcgacctctcctaaattagctgttttaacactaacaaccattttagcattagttttatctatttttttgccatcttttctattatcttttattataagcttacatggatattcttgactatttgcatttataggaatatttaagtaataatactcattgcttatagaattgaataccttaatatcatttatattattttttattaaatccattattttttcgtatccagcatcctttaaatccacatgcgctattaagttcttaactatatctcttactccatctattttaaatttcatatctgcttttatagcttctttgctatctaaattacttcttaatagtaaatcctcattttttagatcagcaaagttttccttagatgatatcgataattccttaggctgtatatttccacctttatcattagatcctgtttcctcatagtggtcttttccttcaattctattattcaataatttattgaattctttatattcactatcagtaagtttgacttctctaccttcaatattactcaataatatttctaatttatttttatttgatgattctataagactttgtgcttgtgtcttgggctcattatcagttgtcaccccattaccaattgtttcctttatcagatcaactatttctttattatttaatttctcaattaatgaggatggaagatttactttttgagtatttaaattattcttttcattatcagcaagcttttgagctatatttagttcactatcttcacttcctgctaatgttttcaatacgtctagaacatttattttcctattcgaaggatcattctcattatacaacttcgatgctattgctttagttgtatctgcattattcttcattagatcaagttctttgtctatagttttatttttaactacagtctcaaagttattatttggtgattctataaaatttaatgactcattcattttttttagtatttgctctattgatgaatttcctttaaacaacttattaaaactatctatactttcttctgaaaaatccaagttgttttctataaatgtaagtatatcgtcttgtgtcatattcttaaattcattcaagaacttggtaagcatctctttaactgcttgaccttcctcactattaccagatatattcttactttgaagatacgtttgaataaatgcatctatttcctttggattggaacttatctttccattaaattgaattaatcctttaatcaaattaatattatctctagttagaggaagattacgtttaaccatttgttttaaaatatcaatatcttcctttgaaagaccttccttatcaattatttcctgaaagctttcatcgccagttgatttttcatctacagaatcatcaactagttttaattttaactttccattttcaaatccgtttacttggaacttaactaacttaagatcatccaaattaatatttccttcaagctcagcgataaactgccatccatctgataacttgactgtaatatcttttccatctccctttgcaactactcttcctgtaaagcgttcccctacttcaaaagttaacttgctagaaattttctttgtatttatattatatccattatttatattccaaattcctggcatattatcttctcccctactaatttcattcgtactttcccgatcgattactctattatacttatcgtatgaaaatagcataagttaactaaaaaataaaatgttattaattacagtctgattatttatatttaaatattcagcataatcaatctattataatattatccgagtattttcttattcgacataacattatagcatttatactttcaaattttaatattataaaaaataaggtgaagcttccgttttaaagaaccctcacctctatcattatcttattaaatttacttaataatctatttatattctttaacttcttcttctccgttaagtactctaattactccttgtgctaaagcaagcatttcatcttcaccaggatagatcactataggtgctataaaccctactcgttctcttattaaattaactattggctttccatatgccattcccccagttaaaattatagcgtcaacattaccattaagtactgttgctgccgcacctatctcctttgaaacttgatatcccatagcatcgtgtacaatcttagcctttggatctccatctagtgcagcactttctacaatcctagcatcatttgtgtcaagatatgctacaaagccaccttttcctgttattttctttaaaatttcttccaatgtatattttccgctaaaacacattctagctaaatcacctgatggaactcctccacttctttctggagagaaggccccttcaccatcaagagcattattaacatctactatttttccttttttatgagctcctacagaaacaccaccgcccatatgtgctacgataacatttacatcttcataatttttagagttctctctagcgtatcttttagctactgccttttgatttagtgcatgaaaaatactctttctaggaagttctggaacacccgataatctagctatttcttccatttcatctactaccactggatctactatgaatgcagatttaccgattgtttttgaaatttcatttgctattatagctcctaaattagatgcatgctctcctttaacactttcctttaaatctcttaacatattatcatttaccttatatgtcccacttaggattggctttaaaagtcctcccctacctactactgcatccaattcttttatatctattttattatctttcaatatcttcaatataacttctgttctaaagttttgttgatcagagatgtgtttaaattttcctatctcttctgaagaatgtcttatagtttctccaaatacttccttttcatcctcaaatacagatatttttgttgacgtagaacctgggtttattattaacaatttatagctcacactttttcctcccttaagattttattttcaatattcccacatgacctgtaaaattaaattttatagtaattcaaaatattaattgctactgccattaatgaaaattttgtagaaaatacaattatattggcgataatattatatactgtatattggattattacaagaaataattactatataatttaaaccttttcatcactttactattataacctgaaactatattaattaacaaatacttttttcgtataattaggatatttaataagtttttaaataaaaaatcacttgtgattaattagtaattcacaagtgatttttatttacacttagtaacttaatatattggaataaagtatactatatattaataatatactttatactttatttttttgttaaatgctattaaaattatacttattttttctacttatatcctctttctttatccaatgcttcatctctaatttcttctctcatgcctcgaagtgcttcttctcttctatcattcttctcttttaatgtttgttgcattttaggatcatcagttttttctatcatttcatctgcaagttcgcaattcaaaatagttctatcaatgttatattgaattctatctacattatcttttctgttatctggtttgtttttcataattgcatctctcctttgtttaaatattggaattacttatcttcaagtaattttcattttttattatttacaagataataatttattatgtacaaacatatgatgcctataaaaaatataaatattaatacatttattttccacacattaatgaatttagtggtgcaatactattatagtcaggaggtgattatatgaaagctcaattagcgccacatgaagctatagaagttagagaactcataagccaagaaatgctaggaataaagaaaattaacgctagcatgaatatggtagatgataatgaactaaaaaactttatgaaggattccttagccgctaaaaaaactgctctaaaaaatatacaatctgtattatcataagcaagtttattacatatagaaaggagagaaatttaaatggatcaaaataagaataactcattatcagaaaaagacattgctcttgacttaataacaagttcaaaagcaacaataacaactttagcaaaagtattaacagaaacaacaaattctgaactacgtgatacacttaaaggtcaattaactgcttgtgttaattcccactatagattatcagacatagcagtaaataaaggttggtataatgctaatcaagatcctcaacaacaacttcaaacagaattatcatctataggttcaataactcaataatattacttaattatattcaagattttaatttagcttggaggtgaaattatgtcaaataataataataataataataataataataataataataataataatagcggattagccccacacgaaatgattgaactaagagaattgatggatactaatattataggtgctaagaaaatacaagccagcatgggtatggtagatgatgatgaattaaaatctttcatggaaagatgcttagatagcaaaaaagaaaatataaattcaatgcaagattttattgaaaataaattaaatatgcaataagaataggaggtagttaatatgtcttttttagataagttactaggaactgatgattcaactctagcagctaaagatattgctcaagacatgcttaaggattctaaatttgctgtgacttctttagctgctgctgctactgaagcagtaaatccagaattaagagaaatgttaagagggcaattagataaagctgtagctgagcattttgaattatctgatatagctgtagacaagggttggtattcagctgaagaggcacctatggaacagcttagaaatgagtacgaaaactctcaaaatttgagctaacaaaatatatagtgaatttttgtgtcaggcaagaagataaatgctgttccattgaacacaatattaatctgacttgccgatacatcattataaaatatgattaatatatttgtatgtattataaataatattgtcatagatactatttatactcatttgatataaatattcgggaacttttagccttttatctagtaatagaaaaaataaaaagttgttaactaaaagtttttataccttcaattaacaacatattttatatgataaaattatttaatttctatcttattataatttttctttcctcttttaattaatacagcaccatcctggaagtcttcctcagttaaaattctattaacttcttcaactttgaccccattaacagacaagccgccttgctcaattaatcttctaccttctttttttgatggaataattttagtacttgccattacatctaatataggtaaaccaatttcttctttagctatagtaacagttggaacatttgacatatcagctccaccagcaaataatgctgttgctgcttcttctgccttcttagcttcttcttctccatgaacaagtttagttatctcatacgcaagaactttcttagccccatttatctcagctccttcaagcgcacctaatctcctcacttcatccattggtaagaatgttaataatgccaagcatttttcaacatctgcatcatctacatttctccaatattgataaaaatcatatggtgaagtttttgctggatctaaccataacgctcctccaacagttttacccattttttgtccttgactatttgtaagtaaagtacaagtcatagccatagcttccccttgagcttttcttcttacaagttcaactccagctatcatattagaccattgatcatctccaccaagctgcattttacagttgtatttttggtttaattcataaaaatcgtatccttgcattaacatatagttaaattctaagaatgataatcctttttctaatctttgtttaaagcattctgctgttaacattctatttacagaaaagtgaactcctacttctcttaagaaatcaacataattaagatttaaaagccaatcagcattgtttgctaatattgccttaccatcagaaaaatctataaatctctccatttgtttcttaatagaatctacattatgctgaatatcttctttagtaagcatttttctcatgtcagttttaccacttggatctccaaccatagcagttccaccaccaattaaagctatcggtctatgtcctgctctttgcatatgagccataaacatcattgctataaagtgccctacatgtaagctatctgctgttggatcaaaacctatatagaaagttattttttcattctctaataattttcttgtttcttcttcatgtgtaaattgttttatgtatcctctctctaatagctcatctaatacatttgccattatagtacctcctaaaattttcttatttgagttaatataaactaattgcagattacaagtccaggttataaaaactatacgtatttctcaaaaaaatatattttagcttcataaatttattaaactttttatcataactttttgttacctaagtttttaacttatactgcatttcaggttaatagagtaagattattctaaatttcatattagaattacttattatagtatatcctcaaccttaaattttggcaataattcatattttatatacacttatttagattaaaactccatgtcatttaatctcaacgcctggcaatatcaccttaaaactatgttctgctcgtgaattaataaatttaactctgcctttccctttaaaagaatttttaataattgtgaatcctcttccgctatttaaaaatcttcttttctcatctaaagaaattagtttttcatataaccaaatatttcttttattatagttagttctttgcccttttacattctcatctatgaactcaccaggacttgaaataataatcttattcctatctataattatttcgattattttattcaaatcaaagtactccctatatagaactgcattctttattgcttcaattattgcttgcattggataattctttggtaatatatcttttattttttcttctgcactatctatcatagataaaagatttccttgaattatgtgcaattctccattggctttttctaacttattaatgatttttatcatattgttaggaatatatatataattcttatcagaaaatacaagcaatcctccatatgtgcatttaagaggtgcgccttctttatgttcaaaggctattcctgcacttaacagtaaaaatctcttattttcttcattaatttctataccttttttactgaaatatctattaactaattccatatttaaaatatcaatgctactttttataagagggcaagtttcaatggttaaacttagattttcctccagtagcacaattaattcttgctttctcattacatctgtagtagaacctctccttatataaaaagctccattgtctctaacttgatatggcttttgacccccatcataaattgatattacgcctattttcttatttttaatctctacgaaatcaacttctattggtattggaggctcacatcttgtcgttattatttgctgtatctgctcttctttaaacatgtcattttcttgtatgcctataatattcttagttttatcttcaactccaacaattatatatcctcttcccccacttgaattggctatggcacatatatctttagttaattctttcttacctgtctcgcagaaaagttctagtttcaatttaaaatctaactttgttccttcttctctttttatcaaagatagtaactttttactatccataatataccctccttatatatttattaataaataccacaagttacaaaatattttaccggatactttaaagatgtatataaatttagccaataaccactttttaatttaataataatttttttacttatccactataaaatattattagcctaaataataaaaaagcattcttattaatataaataagtttgctttataatattattattagattttaaatatatttccactcagaactctattcttaccactttttttagctttatataataaatcatcagccttacttataagttcatttaaatctgtaccatttaaaggaaaaaatgaaattccaaaacttgctgttatagactcatctctaccgttaaaattaattttactaccttcaattgtacgtcgtatagcttcaattttgctatatacattatcctcactagtaaaatctgaaatatatagaataaattcttcccctccatatctggcgaagatatcatttttatctattccatatttaacaatattagctgtgttaatcaaaatcttatcaccaaattgatgaccatatgtatcatttaccttcttaaaatcatctatatctatcattactatggcaaatttatcgtttaattttctattctcattcttttctaaaaattcaaaaaagtatttcctattatatattccaagtagagggtctctttgatttattttttctaattctttatatagcaaagaattttctattgcaattgcaatctggtttgcaatcgacctaaggaaaagtttaagctctatgttcataaatttatagagattatgttctactactatatatccaataaatttttctctcaactttattggcgatcccatgattgagtgtatgtctattttatgttctccagtctgcttcaaaggctttctagaattaactaagaattcctctcccttgtttatatgcacaaattccttagaagttagatttatattcatattctcaatattgctcgccttaactatcaactcaccattttctatcataaatatggttgaatatgtaactcctagtattccaagaatcatgtcattaattagagatattaaattatcactgctaaaaaatgtatttatatatttgcttacttctattatattagataaagaatctatactcttttctagtcttacgtttttctcatttagttcttgtatatgttgttctgaaaacttctgatatgtttcatattctatctttagcgatttatacagcttctcataatcctgcatttgtcccaccatcctctaatcatacgaactccatgattatataacaacttaaatttaccattattttatacttaatacaattatactacaagtaacaaaataattgaatacaattacttcaagctgtttgtaaattttactatatctttaaattgcatatgtccagcatgtacacgccataaaaaatcataataaggttaattataattagtttttttataacgatttttactatattcttcatctctcttcaattactaggaaaattttcatgaattgcatctttcaatttaggataaactaatattacaaaattaattttacgaggagacaaaataatgagatttatacaatggcttttaggtgtatttatatttttattgatatgtacactatttatacaatttggtaattcggtattaaatattgtattacttatttcactaattatatttggtataagatttttaattcaaaagtataccaatcgttattagtttctaaaagtttaatttctgatattagatttttatatacatatcaaaaatactatagttatgtatattttataaattaataaatcctaaaatacactttaggatttattaatttaattactattaatttattttctaataattattttcccatggcttagaacttaaataatctataaattcttctcttaattcatctttctttaaagcaaattctattgttgcttgcaagaatccaagtttatctcccacatcatatcttttaccttcaaagttatatgcatacatagcctcagttccaattaaagtctttaacgcgtctgttaattgaatctctccaccttttcctggcttagtattttctaatatattaaatatttctggtgttataatatatcttccaagtatggcaacattacttggtgcttcttcagtattaggcttttcaactaaatctttcaccttataaactctatcttcaacatgtattccgtctactataccgtacttggaaacattttctttagctactgtttgaactcctaggatagtagttttatattcgctataacagtctattaattgttttaagcatggtttttcactatcaacaatatcatcacctagcaaaacagcaaatggttcatttccaacaaaagtctttgcacaatgaattgcatgacctaagcctcttggttctttttgtcttatgtaatgtatatcaaccatgtcagatatatctcttactaattcaagtaattctgattttccagacttatctaattctaattctaattctactgatttatcaaaatgatcttctatagattttttgtttctacctgtaataattaagatttcttcaattccagaagcgattgcttcttcaactatgtattgaattgttggtttatcaactactggaagcatctcctttggttgtgccttagttgcaggtaaaaatcttgttccaagacctgcggctggtataatagctttttttactttcacgatatatcatcctctcatcttattattggtaatttaaatatattaagccataataaacaattctaattaattttgcccaacacattttttaagtattcctattttatatatactttttacatatttatgaaataatagtttaaatgcattcaataacttaatacatttaaactaaaatctttgctaattctctttcatatctaatgttttaaaatctgttaatggaaattttactggcattcctgtttttcttgatttatatgctgcaagtattatagacattgccttcttaccttcttctcctgatactagtggatctctattttcatttatagcatctattacatccttaaataatggtgtgtgtccttctccatatacattgtctattttaacatttacagacttcttaaccgcttcttcatcttctccttcaaatctccatgtttcaagctcattaactgcaagaccaccaattgatactgctcctgtttctccaaatatacttaatgtttcttctagatttttaggatagacacaagctgatccctcaactattccaatagccccatttttgaatcttattattacagcaccaaaatcttcagcttcaatatctcttagatacgtatcacattcagcataaactctttcgatttctccacccatcatccattgaagtaaatctatattatgtatacactggttcataagtgtaccaccatctagtgcccaagttcctctccaaggtgcttgttcataatatcccatattcctattccaaagtattctagctgtaccattaactaattttccaaactttttgctttctatagcttctcttaatttctgtataggcttattaaatctattttgatggcaaactccaagcttaacatcgttttctttagcaaccttaatcatttcattagcatcttcaatggacatagccattggcttttctactaatgcactagctccttttttcatgctataaatggcaatttcagcatgataaccactttctgttgctattgtaaccacatctatatcttctttttctaacatttctttataatctgtatagacatgcacagaatcttcagctgctccagttttttctatgtattcaactttctttgcttccgctttttctaaaaccacatcacaagtcgctacaagttccgcttcttctacatttttagctaacgcttcaacatgcttatatgagattcttccacaaccaataatagcaaattttaattttttcatattaatctacctctctcaaattaaatacttttagtcaaattcaatagttcataatttcctctaaagttagttttactaatgtattaagaacaacattttaaatacataagctaagatcagaagttaagacactaattttaaatagtagtattttaacttcattagctatcgaaataattttctttgatttttttatttaataatttcgaattctgtctgagataattataaatctatatttttctttgattaaaggcattttactattgttttaagtattatataaatatctaaaaatatattatttttatttatatattctaaatttaatgcgagtttatctggcataattgtgtttatgtaaaaatcgtcaggattttctgcttctccaagtaaatcattttcatctctatatctaattgatgctaaatctgttatccctggtttaacttctaaaacccttctctgttcctcattatacatatttacatatctaggaacttctggtctaggtcctactaggctcatgtcccctttaaatacatttattaattgtggaagttcatcaagtttatattttcttaagaaagcacctattttagtaattctgctatcatttcctacagtaatttgccttcctaacttttctgcatccacaaccatagttctaaactttaaaatctcaaattctttatttttttcaccaattcttatttgtttaaaaaatacaggtccatcagaatctgtttttattctgatggcaataactatcaaaatcggacttaaaactataagtcctaaagtagaacatatcaaatcaaatattcttttaactactttattgaatgtattcatctatttactcctaatttatttatttcagaacatataatattatattaactattttacaactttttagtcaattcagctcatattattgaatttcttcataaatttttaagttattttagtgcatctaaaaatttctctgcaagcccgcgataagtatgattttccaatacataatccttaccattttggcccaagttatttttttcatcttcgcttaagtttctaattttcataactgctttcacaacagcatctggattttctgctggtactgtaataccacaatttgaatctttcactggatcatttgaagcctcaactgcatatattactggtcttgctgccatcatatagtcaaataatttatttggacttacgccataattaaataaattttgcttttttaatcctatataacatatgtctaataatcttagtacattatccatattatctttaagtacaggatctagaaactctacatttgttacattattagttttagcatattgtattaattcatttttcacgtttccatttccaactaatacatactttattttttcatctgtagttttcttcgcagcatcaatcatagtatctaatacattagctggtgagtgatttcctgtgtatccaactaagaaatacccttcatcttttagttcttgcaatctttcaatagttttttccataggagcattcttcttttctccaacaattattccatttggaacatgaacataattatccgcactaaatcccctatctttcatatgcctatctgcattaggtaaaattgagataattttatcacaatttttaaaagcaaaatcctctgctctttgaagcataactatagctggattattcttagaatacccccctatttccattggagttaaaggccataagtcatgtatctcaaaaaacagtttagcattactcctctttgcaatcctatgagctggatatatatctaaagggtaagtcgaagatgctattactgcatctggtctatatttatcagcaagtttcttataattcattctcaatttgaacatgaatgttgatatatttttaattcttccaactccatttccctgatattctggagtcttaacccatacatatgtaattccatctataatttcttcttcgaaatcctcttttatttgtgggtttttctttcgtaaatgtgaaaaatcagcaccaagtatgactactttatgtcccatatcaacccattctcgccccatataatacggtctaaattccattccatgataatcagaccctgcgtaatgatttataagtaagatattcatcttaattgctccttttttgcattataatgttaattaacgctatagattataacataagtgaacatcaaaatctatgattttgctatgtgaacttactcagcgagcgtatgtgagtcgagtttcctctgaaaaatatcttaagagttgcccaaaatactcttttcatactctctaccacaattatctattttatgattttgctagtcaaacttatccagcgaacgaatgtgagtcgggtaagtgaaagccacaaacttaacctattattaattgtcttagataaaactttctaccacactcttcttggataatctataattaatataccaaaaagttctgataaaaatagctcagaactttttaattgattttattgaaccgctctaatttcatgtgcaaattttctaaaattactatctgcacaaaaattttcagtccaaagtgaacggcatctatcacggaatttttgtttttcttcctctgatatttccgccatatatttaattttatttccaagctcctcaggatcgaaatctttatccactaacaatccagtttcgccatctttaacaatctcagccgtaccacctacattagtagcaatagttggaattgaaaaagaacatacttccatgatactaaccggtaatccttctgaactgcttgtgtttatgaataaatcgactgattcatttttatagtactccattaactcggaatttttaacacttcctggaaaacttgtatccataaaatcaagattttctcttgcatactccttaatttcatccaagccatctcctgctccaaaatgtgtccattttagatttaatcccgaatctttcaatgttgccagtgactttgccaataaatctatacgctttactggagaaacatggcaacaactcacaattctatatgttgagtcttttgatccttgcgaagttccataatcttttgtcccaagatatgcagttttaattttagctgagtaatctggataaagcttctttagataattacttccatcgtcagaacacggatataccgcatctaaatttctcaggaaataatgtctaagtggtatataattcatcgagttttcattagcataaagatcatatctatgtgttctacttactactcttgtaacctttttaccataaagttctttaagttttattgccacaaaagcaatatcatataaccaataactatataaagttatcccgctatactcatccatattatattttttaatgatttccaaaacttcttttaaaacactgtttgcttttgctgtaaaatatgttaaataagctttcttttttatggaaccactaatagcattacgttcttctttatctacacatccattataattataaaatggaaatagcttcacagcactaattggtaaactatgctttatttttgaagccttaattttatgtacttcaaagttactaggaatatttcttgtttgtatcgcatcatcagctacactagttgctatcactattactttttcaaaagcttcagaaagcatttttatttcgccttctataaattcttctcctttatcaaaaggaaaaactttagttaaaagtactaaacagtttttcatctttttccctccagagttataatcagtataagaataacatatgaaatacttcatttcaacaatatgaatataagcttttactttataatatcgcccatattatttcatttatgaattttatatgataaaataacgttatctgatgtctagtcgctatagcacttactctttatgggagagccctctttcaaaagtcagctgagtgattttatatagcaataagccaagatactcgcaaggagatggccaaggatagaacataaaaactcaaaagcgaaagcttatgcttctaaaatataaactttaggaattcgcttttgagaggttcgcttagacgagttacactaaatcaatttttaattctgcgtagcgtaatatcacttttcatacacctagacattgtggtaattattttttataagtttaactaatattcagattgagataattctcatatcaaataaatttcactttatatttatttatacgtaaatataaataattcacaaataaatacctaaaatttaaggaggcctattatatgaaagtattaactgttataggtgcaagaccacagttcattaaagccgcgacagtatctaataaaattagaagaaatggaaacagtgaaattttagtacacactggacagcattatgataataatatgtctgatatattctttgaggaacttggaattccaaagccagattataatctaaacattggttcatctaaccatggacatcaaactggtagcatgttaatatctcttgaagatatatacttaaaagaaaaaccagatatggttttagtttatggagatacaaattcaacccttgcaggtagcctatgtgcaagcaaattattaattcctgtagcgcacgttgaagctggtcttagaagtttcaataaggctatgcctgaagagcaaaatagaatattaacagaccatatatccgatttacttttcacacctactttaactgctttaaataacttaaaggatgaaaatattacaaaaggtgttcataatgtcggtgacgtaatgtatgatgcaataaatctctttaaagaaagagctaaagatatatcaacaatacttgacaaacttgatttagcaccaaatagttatatactttcaacaatacatcgtgctgaaaacactaacagtattgaaagattatcttcaatcattactgctttaaataactctggtaagagaatcatacttccactacatcctagaacaaagaaatttattgaaacgtatgatttgcatgttggagaaaatataagaattattgatcctgtaggatatttagatatgatttctcttcaagaaaattctcaaaagatagttaccgacagcggcggagttcaaaaagaagcatacttcttaaagaaaccatgtataactatgagagatgaaaccgaatgggttgaaactgtaactaacggttggaacgttatagttggaagcaattctgataagataatggatgctatagaaaacttcaatccaacaggtactcctgcttctgcatttggaaatggagacagttcttcaataattacagaaattattgaaaaatatttaggataagtataaatcaacatattccaagcatttgaaatataagactttaacaactaaaaataagcaaaaaaatggaaggtattccttccatttttttatttgatgatatattaatatctgaattatattacattttaaattataaacactcgtgctctctattatcctattctatattccttcattgacgatgatgatattggtttatactcatcactttcctttttgtaaacttgtatacacgctactgcaaatcccataagcatccaatatgaaaatacatatgttatagaactaggtccaaaacttgctggtgcaaaagctataagccctgttacagctgcaaaacacattggactctttttctttattccaatgattatattttgaattagcaagtataaatagtatataccataaagagctaaccctggtaaaccgaagtctccaagaatttctattggataacagtgcgggctatatatatttcctgtatttccttgatttttaatatattgttcaacatttcctactccatagcctagataatgtttctcacttattgtgcctcttaatacatcctttattattgtgactctaacattaagagatccttctccgccttcttgaatttcagcatcctctaaagcattcaccttatctgcaagaccattcttcttctgctcctgaccagattctgtctgggcaatattcattatcatataactatatttaaaggccacaaaaagagaaataactaaaattagtgggcataatattcccttaaatcctattctttttacatttatgattgagtaaattaaataaactataactccaaatgcagctgccacaaaacctgttcttgatgtcgttattgaaatcaacgaaaaagcaataattgaagcaattatacaaactactttaaaaaatatgttctcaaacttatatattgcataaaaaccaattggtaataatattgcaagagtagccgctaagttgttcggattaaatgaaaatgctataggccttgcatttattaaattttgttgatcttttggcaaaaactcaataaaagcgtcagcataatgtttaactggcagttgtcttccaagaataacttctacaaaaccaattaatgtgataagtaaaattagcgacaataatatagtaattgtttttttaattctttctctattaatgttatataccatcatatttacaataaatgcaaacatcattaaatatatagctatatattttattgataaacttttgtttaatgaccatattatactaacacacatatatataaaccaaagtacatatattgctaacacttttctatccaaatccattaaaatctgtctgtctttaaatattctaaacaatgacataagtgtaaatatgcctaaaactatatggaataagtatacactttgtactcttggcacatataatgtataatcataaaatgcagaaattaaaagcagtgtataaaacatattatataaatctttatctttaagaataaaaactactaatattactactgtcaatatgtacattatagatactatataacttccatttgctattcctaaaaatccactaatagcaaatataatagctaaaaatatatttctaattacgtcttctctcgtcattattactccttatccgcattttctgcagccacttcatcttcgtttttatagtgatatgttggaactatcttttgcatttgatgcttaatctctgatatatcattaagctccaataacttttgtaattgttccagcttaattgttaagctattcatatcttcaaatgttggtttacctacatatattttattgtgaactgtattttctaagccttcttcactcattaaaagttcttcgtatagcttttctcctggtctaagacctgtaactacaatttttatatctctatttggttcaagtcccgaaagtcttattaaatcgcatgctaaatcataaattttaactggttttcccatatctaatacaaaaacttctccgcctcttgcaaacgcaccagcttgaagcactaactgcgctgcttctggaattagcataaagtatctaataatttttttatgagttacagtcacagggccaccattagcaatttgtcttttgaataatggtattactgatccattacttccaagtacatttccaaatctaaccgcaacaaattctgtcctagactgcttatccatggcttgaataatcatttcacataatctttttgttgcgcccataatattagttggattaacagctttatctgttgaaatcataacgaatctttctacattagcatcacttgcttctattgctaaatttaaggttccaaaaacattgttttttatagcctctttaggactatcttccattaaaggcacatgcttatgtgctgctgcatggaatacaacatttactttatattttgtgaatatttcatgaagtctctttctatccctaactgaacctattaatacagtaagattcatgtctgggaactcttctctaagctcattttgtatatcatatacattgttttcgtaaatatcaaatattataagccttttaggattatatatggaaatttgcctgcaaagttccgaacctattgatcctccccctccagttactaatatagtctttccttctatataatctgaaattcctttattatcaagttgaataggatctcttccaagtaaatcttccaaatcaacatcttttattctactaactgtagcatctccacttaatatttcgtacattccaggtattatttgaagtttgcaattggtattcttacagatttcaattatttctgctttatttttagcatcaagagatggaattgcaattaatattaaatctatttcctgctctccaactatataaggtatatcgtatctgtttccttctatttttacgcctgatattctttttccaagtttacttttatcatcatctataagaactattggattatactttagttcccttcttgccatcatttcattaataagcatagttccagccgaacctgctccaactatcattactcttctttggtctgatgagtatttaaatggtatgtacaaaagcgttcttctatatactctatacagtattctatatcccaacacaaagaaaatacttaaaagtattccgacaacagaaacatttagcggaattgtattacctaaaattctagtataccctattgatattatccctgctaaaatatttccaccaacacctaacaaaaactcgtcagtaccagttaaatgccatagactttcatacattttaaataagtaaaaacacactaaatatatcagactcaaagctatacaatcgtgagtatatattttcgcgatttctgtaaaagttccactttgtgttatatttattgagaaaagatatgccatattaaccataaacatatcgattatcataactataaaagtcttccaattcttcactatacttcccctcctacttcagagattctcactaaaatgtcctaatttaaagtattatcttactttatctaaaacttttattaataatttaggacaagacagcattcccttacattgaatagaatatctaatattattcttatccaatttttgcattttataattctttaaatattttcttacatcatccttatttaaaaacttaaaaagttcctcatggaaatttgaatccttacctaatactgaaaaaacatgtgatattgaataaggtattttaaattcaactaaaaaactttttattttctttaggctttcatcatcttttatatcatttaataggtcaatatatgaataatagcaatccaaatgcttcagcgatacattttgagtcacagaatttccccatataacataaaaagccaatacttcatttacgcttataactttttttgcatatagcagtgcctttacaacaaagaccatatcttctccatattttcttttagtatcaaataaaagattattatcttgtatagtggaagatttatatatagcacttctcattcctattgttatatcatcttttaactgcataagagcagcttcttttccgctaatgaaatcatttaaatagttagttctattttgaactagcacatctcctttagcgtcaacctcactataatcacagaaaactatctcacacttagtttcttcagctttttcatacatacgctcaacaaatttatgatcaatataatcatctgaatctaaaaaagttatatactctccactagcttcttttattcctctgtttcttgccgcactaacacccgaatttttttgagttatgattttataatttatacttgaattctcaagtaattctcttgctatatcgatacttttatcctttgatccatcatctataagtaaaagttcaaaatccttgcaagtttgattcataacagatttaatacttctttcaatacattcttctacattataaacaggagtaatgatagatacttttaccaaaactattcgctccttttatttaatcatattcagaaaacaataagtcagcatactagtctatctaatgccataacttactataatattggactaatagacattataaacatatatattcttttgtcttaaagaatatatatgttaaaattatcattttttacatcaattgtggatatcccaataataaactatacttagccaatgaaatatattccaactagaaatgagtgatatacttttgtaaccacaagtgtcataatatggaatgtttcattggtaattttgatgtatgtgattcttagctataagttgttccaagtgtgctagttcaaaaagtgagaatcgaaaagtgatgctccaaattttacatttgggaatcagaactttctctatgagcattttatatttcgttctttgaggctagcaccttcgatgcaactttatagctttagaatcccccatcagaattacctagaaactggaacaaaagtatattattcatttcggtgaggtatactcataagtatagattatagttgatttatctataattttaaaaatataaaactacctttatatttaaatactgtaccgtcaaataactttaaacttttcaacactacttgaattatactagtattgatgcccatatgcaatattaagccattttcttaagtaaattttcattttcattcattgtagctaagtaaaaatactctcatttagagaaatagttttactactataaataaagctacattcttgtaccattaaaatgaaaatgcctatttagtattttttaacttttttattattctggcatgccatactctatcttcttctttcggaagtgtcatataatctccatacaattgtgttaaaacagcatcataattcctaggcgcattaaaataatctccttcgaattcaacctttatcaaatcaaaaaaatcttcttttctatatatgtactgactccatactgtatccaatccatatcccatatattctgaatttctatcattccatttaactaaaaagtcaaataatttctgtcttctttttgttgtaaaaatacttgatacaatattataaataaaatatgtaattttattttttaatgtaagcttttcaggtttttctctaattcttatgaaacttcttaatacaaaattgcttatttttctttgaatattgtatacccatctttttttaggaagactatcataaggtataatatctataaataaaccattatgcatcttttcattttctgcaatcttatcttcaataaaaagtgtattattatatcttattttgcatggaacttgatagatatcataattaggatcattttcatgagtctgcaaaaataaatgatcaggtagttcattcttaactacacttaaaaatttattataatcttctctaagcattccaatgtcaatatcgtcatcccatggtataaatcctttatgtcttaccgctcctataagcgttccagcatctaaaaaatatctaatattatgcttgtcacaaattttttttacatcttttaaaatgcttgccattattagctgcgcatctcttagccgtaagtcttcataatttgaataattagtattattgttcatctttttctcctttaatacatatctaccttttattatatcaatgtagtcataaaactcaataatacatattaaatattgacttttaattttctattacaataccttctacagattattaattctaaattatgccttaatatgttataatttattacagcttaaccatctatagagcaaattttaacctgagtaaaagattggagaatatattatggaaaatactaaagatttaattagtgttattgtgcctgtttataatgttgagaaatatttacctcaatgtatagatagcattttaaatcaaactgaaaaaaatcttgaaattattttagttgatgatggttcattggataattccggaaagatatgtgatgaattctctaaaaaggatgatagaataattgttatacataagaaaaataatggtctaagttctgccagaaatgctggccttgagatagctagaggaaattatattggtttcgtagacagcgatgactggttagataaaactatgtatgaagttttgttaaaattgctaaaggaaaataattctgatatttcatgttgcgatttttttaaaacagctaatagcaatgactcaatacctcatatagataatgagattattaattcttacaataatatcgaaagcctaaataacttctataatggcttatatactcaaacagtagtagcttggaataaactctataaacgagaactctttaaagatatttcttatcctgtaggcaaaattcatgaggatgaaggcactacatataaattatattataaagctaataaaatcacttatactaataggcctttatactattataggatcactcctaacagtataactacaagcaagtttaataaaaaaaggttagatataatagatgtttacgatgaaaaagttaagttcattaaaaatataaataatgaagaaatctattcaaaaacattaaaatggtatttatttaagcttataaattgttattttgaatgttctaataatattgaaaataatactgaatatttaaccttgattaaccaaaaagtatcggaaacatataaatcttatattcaaagcgataaaaaacaacttcactggataattttattttctatatttaaaatcaatcctaaattatataaaataatattaagaggttaaaaaataacaagagaattattttattcatattttgttttagtaaataaatatttttaaaaataacaagtccaaaatgcgatgtatattttgtgttacacactgaatgatattaatcccatagaaaactactagtttaatactaggttaatatctgtgcgaaacactaggtaaaataagctaacatattgacttgttatttttttattacctctaaaaattttttcttaattttacataatgcggaataaattccgagacttggcttaaaatttgcttgattatgtgttataatattttgtattgaatttaaggagtgttaaaagataatgatgacaaaatattttaaaagttttatactattctttctaatctgtttatcttttcatctttttacagaaacaatagtatatgctgaacagcaaacaaatgaaatttctcaaaaaacaaatgaatcaactttacataattcaacaaacgaagattcttcaaaaaatactgacaaagatattagtacaagcatttcaaacaacgaatcagagaaagattcaaaaaaagatacagataataataacaatgcaacttctgtaccgaataagcaggaagaagtatctattccatatggatggaaaactattgattctaaaaaatactatatagttaatgataaagttctcgcaaaaactggatggttcatggagaaagatgttaatcctgatataacctctaaagataacagctatgatgataaatattatctagatagtgatttttcagtagtaattggctggaaagagatagacggaacctggtattacttcaataaagatggaataatgcaaactggatgggtttatgataataatatctactatacggataaagatggtgccatgcaaactggatggcaaaaaataaatggggatacttattattttgatcaatatggccacatggctactcataaaacattaatagataataattggtatttctttaacgatgatggacaacttcaaaaaggtctttattattataaaaataaagaatattattctgatgacaaaggaataatggttgtaaatacttgggttaattctagaaatcacaaatattacataaaatccgatggttctgttgccactggaaagctttatttaaacggaactatggaagattttaattcaaatggttactaccaaggttcagataaagatgataaagactatttatttgtacgccatttaaatgtaggcaatgctgactgtgcatttataagattacctagtggagaaactgtcttaatagatactggtgatacaacaactagcgaaacattaatagactttttaaatagtcaaaacctaaaaaaagattttttcaaatctactactactagtagtagtgtacaagctactgaatctaacactagcaaaacttctaatggaaaaggagttgtagattacgtagtgcttacacatcctcactcagatcacattggtggagtgattgatttgctaaaaaactttaatgtcggaaaaatattagttcctaaatactttgaaatgaaagactttacaagtataaatgatactacttctagtgccagtgaaaaagaaattatgaaacatgattatgaagtatatacagaaacaatgaatgctataaagaaaagcggagtacctttagttacagctgaaccaaaatcatatattgatagcgaaaatattttacaatttgttcatgctgataaggattatccaagctttgaagcagctaacccttaccaacaatatacattgctaaacaataactctgctcttgtttatttgaattatcatgatcttcaagaattatttgctgcagatattgaatggggcgcagaaaacgactttcttagtagaaaagccttagatggaaaagaagttgatgtattaaaagttcctcatcatggaaatccaacatcttcatcgtatccatttatcggatatgttaacccaattgtaggaataatttctagagctaaagaatctattagcactactaatgaatcttacaatgttctaactacatgtggtgtcaacatatatgagacaagcaataatcctgatggaatttcagtatattctactaaagataattggaatgtagaaccagcagctagtaaatcttaatattaactcaaattttaaaaaagcttatcatttgtatttttttacaaatgataagcttaaattctaattacctaaagttttaatctttccttgtcatagtaatattatttaataattcttatgcctgaatattatcaccatgttgagctgccaattcattttttaggtttatactatcttgtctcttaaagaatggaaggtaaacgaagaatgacattgctaatactaataactgtaatattgctgttctaactccacctgtcaaaagtcctgatattggtgccggagttgtccatggaaccattacccctccaaatggtggaactattcctgttgctattgcaaaataaagtattgtgcctgatagcattggagtaattataaatggaattgccataaatggattcattactattggtgttccaaatgtaattggttcatttatattaaatattcctggtactattgcgagttttcctaattgtttgcattgtgccgattttgcaaaaaataacatacatattactaaacctattgtcataccagatcctgttactgtcataaattgatcaagaaattgctgtgttactatatgagctccatttgctattgttaattcttttccacttgtaactatagctgcattatctaaggtatttgattgtaatattcctgacattacaccgcttactattgttgctccatgaacaccaaaccaccataagaatggaattaaaaatcccatgactaaaactccacctaatgagtctgtcataccttgtaatggtgtttgaagtactttatatatccattcaataaatgttgtttgtaatccccatttaaatatcatataaactattgttgctccaagcactataactgctgctggtattaacgctgcaaacgaattcacaactccctgtggtacgccatcaggcatctttattgtaatcttatttgccataaaccatgaataaaccgctccaactattaatcctattataattgctgtaaccattccctttccaccacaccatgctgttggtatgacatcacctactgtttctccacttttagtagttactgaagagctagttgttaatataaatactacaaatgatattattcctgctgataaaggttcatgaccttcatttttagcataagtatatgctattcctattgttgcaacaagtgctatcatgttaaaagttgccccatttgctttaaacagcgggtcagtccatcctgcacctaatgtaacatttagccaatcatttaacggttggtatggcaattgcgctagcaataaaaataccgatcctaccaaagttaatggtaaagtgaataaaataccgtcttttaatgcaacaactccctttaaaccaacaaacttcataactattggcaatactttttcgtttaaagttgtcccagatgatgacataataattcctccttaaaaattaataaatataaattaacaaggtctattagataatttataaaaaatgatattgtaaaaactttttaactattttcctgctagctttaaggcaaagtctaaaactttttgcccattcatcattccatagtcaaccattggtataacatccacaggtattcctttaggttcgcatatcctttttgctttgtttaatgtatatccaacttgcggacccaataatgcaacatcaactccctctatatttttatccatttgactttctggaaaagcttcaatatctacatctatccccttattcttagctgcctccttcattttgtttactaaaagacttgttgacattcctgctgcacaaaataatctaattattaccatggttcattcctcctgaaatataaatttatttatataaactttgaataaatgtacttatgaaattttaatctctttattaattatttaaccaatgtatttaccacttttcttagttccattatctgttcaattaagtttttctctgttattgctgtcattagatgatcttgtgcatgcacaaacaaaactgacatgtcaatcttttcaccatttgcttctttatgaaggaacattgtttgcccatcatgtgcttttgctaatgcatcatttgctaattgcatttccttatcagcttcttcgtattttccttcatttacattgttaagtgccatatacgcatgatttttacaatctccagcgtttattataatgttcatgattgccatttctaactcttccactctacactcccccattcaatgtcttttagaatatttttccttttatcctattgcatagcataaattgtgccaaacactattctgctttttagtagacattattttaaacatattaatattatctatattaatcttaaccctagatttttaaaaacgtttacaagaaattttatgcattcaaattatgattaacattttatatgtttacttaatataatcaatatctaatataagagtttgattattcttattagagttttggtaatattgtccagtgtttagatgaaagtatataattgtgattagtgtttgaacacttccaagaactgtttaatcactaaatttattttaattatcaaaaaataatttcaccaactcgaaattaagcaaattatatagaactaataaaaagcatcttcttaactataagaaaatgctttttatctacaatataaataattaaactatatctaattttttattgtacactaactccaaaatataatacttttccaagttcagtatcttttattgattgttttgcaattgcagccgcattttgttgatcactaaggctacactcaaaaagtattttaatcccttcctttttaacaaatttaaatactttttcattctcaacttcaatattttctactatatttattatatcatcttgtcttaatgcacagtttattaatatcatttttctacctcacttctaattaatcttttgaaaaaacaaataattttatcttaatttaattttataatttgactattaacatattatatattttatttttcagaattatactgagtaaactctaacattttaattattttctcattgtgtttctgttgctgcagaaatcataattttaataattaaaaatgttagagtttttaaatttattttaaattgttaataatagggctaattaattgtatttacgcttgagcgctattttcgtgtttttgtgctgctaattcatcagcatatgacatagcatcaactttcttaaagaatgggaagtatattgccattccaacaagtaggaatactaattgagctatagcataactaggaccaccaattattaatcctgagaatacagctggaactgtccaaggtggtaatgctccacccattggtgcaagtattcctgttgcaattgcaaaataaagtaatattgcatttactactggagtaagtatgaatggtacacccattattgggttcattactactggagtaccaaataatacaggttcattaatattaaataagttagctggaagtgctaatctacctaattgtttatattgagcagattttgcaagtactaataataatatagtaaatccaagtgtttgaccactacctgctaagttaatgaagttatcatagaattgttgagttactatatgagctccgtgagcaagatctaaagtccctgcttcttgtaatttagcattagctgcagtattagcagttaataaagcacctaccatacctgatactgtcatacctccatgaattccgaagaaccataagaatggaacagcaaaagcaataagtatagctcctggaagtgaatctgatgcagcttgtaatggtgtttgaacaactttatatataatttctacaaaagaagtattgaatccaaacttacataccgcatatacaacagttgcacctataaatataactgtagctggaattaatgctgagaatgcattaacaacaccttgaggtacaccttctggcatcttgattgtaatatttttctttaccattgcgcaataaacaaatgaaacaactaaacttacaataattgcagtaatcatacctgatccaccagtccagtcttgtggaataactccaccaacttgaattggagttgcatcaggtgtagctttaaacataacaaaatcatttgttacagttaagaatacacttaaagcaattactgctggtgaaaaaggttcaagaccttcatttttacagtatacataagtcatacctataacagctaccactgccataatacccattgttgaatgctgtaatttaaataatggatcattccaacctggtccaaaagcgctagccataccatctgtaaatgcttttactgggaagcaagcaattaataagaatatagatccaacaatatttaatggtaaagtaaataacataccatcttttaatgcttgaacacctttaagattaacgaatttcattaccgctggcactactttttcgttcagtgtttgattgagtgacataataaatttcccccttataactaaattgtgattataatatgaataattacaaataaaaatttgctattattacttataaacttacatatttattttgattttcctataattgttgttaaaggttttctttcctcatataacatatgaatataagttaatcgattagatatatctttatatgtgcatttgtatttttacttaatcatgtaaaactacaaatgctgtttatttttgcaaattatttcttattggttaagtttataaaaataattaatttttcaattatttattttttgcaagatttaatgctagatctaaaactttagctccattcatcattccataatcaaccattggtattacttctactggaatgccatgtggttcacaaagtttctttgcttttcctaaagtatatcctacttgtggcccaagtaatgcaacatccatactatctaaatgtctatccatttgagattctggaaatgctataatttctgcatcaacacctttagctttagctgcctccttcatcttattaactaaaacacttgttgacattcctgatgcacagaataatttgattgtaaccatatttcttcctccttgatttaacttttataaattttaatatgttctatacctttatatagttttgtgttaattttaaagttacttgcgaattttatttttatagtatttacaaaatatagcttgtctatttacttttccaagcttcaattttttattttactaaagtgtttacaatttttcttaattctataatttgttcaataagattcttttctgatatagatgtcattaaatgatcttgtgcatgaacaaataaaactgataactctactttttctccagaagcttctttttgaagcatttctgtttgtgcatcatgcgcttttcctaacgcatcatttgctagttgcatttcattttcagcttcttcatacttaccttcgtttactaaactaagagccatataagcatgatttttacaatctcctgcattgattataatattcattattgccatttctaattgatccatttgtactcctcctccaatttatccaatagatagtatccgtaatatagttaacggctacatacttctggataagttaaactaaaattcagaagatatattaaactcccactgaataaagttttacttgatgctttattgcttcatgccaatatatatagcaatacctgtgccaaacactattaaatatttaaatttttttctaatttttttgctgtttaaattttacatactatcggatcgttcctatatatcaacacttataataaaaatagacaatataattttacacaaaagttatatcatttttataataaaagttatatattttatttattttatgatatgtgtttacttaatacacttagtgttttataattatatatagtgtttgattaattttaaaactgtatgtaaacactaaataaacaatgtttgataataaataattttactataatagtctacttactatagtgttttcagcatagtgtatgaaaatgcttaatctatttatagtagctataatatttttagttatataggaggacatataatggctaaaaaagatttgatttaccaaaaacttctccagctaaattctccagatggaatagatactaaaacactagcgcctctagttaatatgactagagctaatttaagccatgaactaaatgaactttgtaaggaaggtaaattgtataaatcatcaggtagaccagtattattttttcttgctgaaaataagattcaaagcaatgaatctcaactagatttgttagctaaaaataatatttctcttaaagattctgtggaacaggctaaagcagctatactatatccacctaaaggtatgaattgtttaatattaggtagtactggtgtaggaaagtctatgttcgcatctcttatgcacaattatgcattggaaatgaaggtaaaaacagaagcttctccttttatagtgtttaactgtgcagattatactaataacccacaactattaacttctcaactttttggtgtaaaaaaaggtgcgtatactggagctgaatctgacaaagtcggattaatagaacaggctgatggtggtattttatttttagatgagattcacagattgccacctgaagggcaggaagctctattcatatttttagatacaggtacttttagacgcattggggattcagaaaccagaaaatcagatgtattaataatttcagctacaacagaagacccaaattctgctttattaaacacatttacaagaagaattcctcttgttattaatattccttctcttaaagaaagaactttagatgaaagattatttttaattaaaagtttcttcaaatatgaaagtatccgtttaaataaagagatttatgtatctttaaactctcttagagcattactttcttatgattgtcctaataatataggtcagttgaaaagcgacgttcagctactttgtgcaaaagcatactctgaatacttaactaatatacgacgcgacgtaagaatccatagtaaaatactgcctccttatattaaagaaggtctttataaagagaaagaacatagagttttatggaataaacttatgagtgaagaaattgaatatttcagatttaatggttctaatgaagatacaaacactatatttaataatggagataatactatttacgattttatagaaagtaaacttgaaaagcttaagtctctagaaatttcagatattgatattgagaacattcttgagaaagatatagccaaacatttcaataaaaataactctgaagtttccgaagaaacaagcaaacaaaacttattaaccattattgatgaagatacattaaaatgtattgatagtatagtaagtcatataactcgaaagcttcctgtaatttttgatagtaatttatatacggcttttgctctgcatataaacacattaattaatagaataaacagcgacaagataataataaacactaatttaaatagaataaaagatctttatccttctgaatttgctgttgcactagagattaaggagatcatagaaaacactattaataaatcaattccaatagatgaagctggatacttaacattattcttgataccagataatacttttaacgataaatctcaagataaagtaaaagttatcctaattgctcatggtgaatcaactgcaacttcaatggctgatgtttctaacagactacttggagaaaactatataattccaataaacgctccaatagatgttgctccatcaaaagtattagaaagccttaagattggtattcaggacaatccaacttctgctggttatctcttattggtagatatggggtctttaacaacttttgcagatgttataaaaaaggaatttcaagtagacattaaagtgatatctcttgtttcaactttacatgttttagaagcagcacgaaaagcattaattggatcatcgctagacgaaatatataatgatgttcttatggtaaattcttatgtagaaatacataaaaatataagtaatccttctagcgattcagataaagttttaatagtaactgcctgcttaactggtgagggagctgctattgcaattaaaaacttcttactaagtaatcttagattagataaagattattttgaagtcgtttgtctaaactgcttagacaaaaaatacttcaagcaaaaaataattaatcttcaagaaaaaaatgaggtactttttatagtttcatcttttcctgtagattcacctataaaacaatatacaatgtacgaagtatttaacatgaatgtattaaaagaattacaaagtataattgattcaaaattaactatgattaatctacctaaaattataaaggaaaatatatataatatagatggtgttgaactttataaagatgtgactctatttttgaatatattacaagagaaactcttaattaaattatctgatgaaaatatggttggcgttattctccatttatcatttgtaataggacgattaagaaatgaagataatccggctgtttatcctcaaaaagagaaatatctagaagaaaatataaatctatataatataataaaagaaaatttaaactttataactagcaaatataaagtagaaatatcagatgatgaaatatgctatttgatgaatcttttatcaaactcagctcctgaattacaaagtaaactttaataccaatatatccctataaaagaataaacatattcttttatagggatattgaagttttacttagaataatcagaagaatctactataaacttattatgtagcctttttcccatactttcaataatatataatacaggtatttgtgttgttatatcactaatccctaatctttcttgttggacataatacgatatattaagatctgatattttcgatattgtacaattttcactatttgttatgcttacaagcgtagtattctctctttttatattacttatataatcaataaccgtacgtgtttcgcctgaaactgacattgctattattattgaatcttcatatagcttataatttcttggaaaatatggatcatctatatacatagaaaacttaccaattgatgaaaaatatctggctgcatatttacacagtattccggatgttcccgttcctataaatactacattgcttgctttctttattaaatcgcagagtacgtttaattttctatcaagctcgctattatctaattttttaaaaaaatcaactattatcgatgtatcattatttactttagtactttcattttcttcaagatacaattttaatttcactttaaattctgaatacccttcacagttcaactttttacaaaaccttaatatagttgttgttgacacatgtgcttcgtcagctaattctctaattctcatataaacaactttttcaatattcttcattatatatctgtatagagacaactctaaatcgtttaaactctggataatttcataattaaacataatttaatcaacctcttcctttataactagcttttttacattcatatatacttgaatatattgttgtcttaaaatttaaaacactatactagttagccttttatgactttggtagatagtataatttatcttcattgatactatccaccaaagttcttttaatttaagtatacattatttgaaaaaaacttttaaggctatgtttgtaaaaattccttccagctatattataaaagcaaaatataccaaagtgaaatttcttacaccttggtatatttcatttatattagtatctatttttaaatactattattttattctaatattatattaattatctttcactaaatttcttctccattagtttcgatgacttttttataccagaagaaactcttctttcttattcttcttaaatccttgagatcaaattcatctctatttacatatataaagccatatcttttcttgaaaccttggtgagtacttataagatctatagctgaccatggacaatatccaatcaaatctactccatcagttatagcaagtctagcctgttcgatatgttttcttaaataatcaattctataatcatcatttatagtatcattttcttcaacattatcataagcacctaatccattctcagtaattattataggtaaattatatctttcatatacttcccttaaagtatttctaaatcctataggatcaatctcccatccaaattgagttttctccaagttcggattagaagctcctttataaacacctaaatctcctacagcaatttgttgatctccaccttgagtcgaaacttctttatcatcaatcttactttcctctgctgttcctgtacaataataattaaatgctatgaaatctggatttccaccttttaatatttccatatctccatcttcaatagttggctcgattcctttttcaaccatatagctccaagctattggattatacctaccatgtacagccatatctaagtataaccaattccttatagatgattggttactagccgctaatatatcttctggtcttgaacttgctggatatattgaacttatattaggtgcaggccctattttcgcttttgggcacatactatggcataacttcattgtttgcgcttgcgcaagcatcatatgatgattttgtttatataattctttttcaatattttctactccatcatttacagttccaattgcccctccatgaagtatcatcatattctgctcatttattgtaagccaatacttaactctatcaccgaaattttcaaacaatacttttgcataatttacgaatgcatcagcagtctttctatttgaccaaccaccttctctttgaagagcatctggcaaatcaaaatgatacatagtaactaacggttctattccgtgtgataatagttcattgattaaattgttataaaattcaattccttttggatttacatcccctactccatttggtattattctagtccatgcaattgaaaaacgataagtcttaaatcccatttctgcaaataatgctacatcttctttgtaatggtgatagtgatcactagacaccttaaaatctggtgttcctggaaatggttcctttgtatcttgaacggataatccctttccatcttcattataagcaccttctacttgataagctgatgttgaagctccccataaaaaattctttgggaaatcttttaatttcttatgaaacatataaaaccctccattgcacattatctttttattattaacataaattttttaatcaaaataagttgattactatgaattcaatatatcatatactgtaaccactttatatattttttataatttaggaacacatactactttttaggtatttgtttttttagaaaacaagttgttttaaaaaaactgctacaggcaaaaattctttttttaccagtagcagcttcattaataatatccttaaattttcttatatatttctcataatattttttacattatagtcttatttgaacgcttagcttacactgtatcgtagatttgattactttaacatctatttttttactactttaatagctttatcaacaacattttccacagtaaatccaaattgtttaaataatacttcagccttacctgatgctccaaaggtatctaaagaaataacttctccatcaagacctacatatttatgccatccaaaagatgttaatgcttcaactgctactcttgagcgaactttgtttggcattactgattctttatatgcttcatcttgaacatcaaataattcaaagcttggcatacttattactcttgcatctattccttttgcttcaagttcatctgctgctttatatattaattcaacttctgatcctgatgccataagaagtacatctggagtttccttctttgaatctttaaggatatatgcaccttttaatgctctcttaggacatccatcatatagtggtagcttttgtcttgttaatactaatgatgttggtgtagctccattagttactgcataataccaggctgctgccgtttcttttgagtcagcaggtctaaatactgtcatatttggcatacttctaagagctgctaattgttctattggttcatgagttggtccatcttcccctactccaatactatcatgtgttaatacataagctactggaagattcataagagctgataatctcatagcacccttcatgtaatcactgaatacaaagaatgttgcacagaatactttaagtcctccatgagcatacattccgttagcgatagctgccatagcatgttctctaaccccaaagtgaaggtttgatccgcttctatcttctgctgagaaatctcctctatcgttcatatgagttttgttagatggagctaaatctgctgatcctccaatgaagtttggaattagtttagccaatctatttatcattattcctgaagattctcttgtagccatttctttatcaaagctccaaagttcttcattgtttaataaagcctctttatcaagttccccactcatccatttagtatattctgctgcaagttctggataagcttttgcatatgatttaaacaactcattccaagcttcttcagtcttttcaccttttgctatgtgttcattcatatttgtgtacacttcgtctggtacgtagaatgcaggctctgtcttccatcctaagttttccttcatagcaattacattttcagcccctaaaggttcaccatgtgctgaagcttttccttgttttgctggacatccaaaaccaatttgatttttaactattataatagaaggttttgttgtttctgctttagctgcttctattgctttttctattgtatctatatcatttccatctgctacatttagtacttgccatccataagcttcgtatatcttagctacatcttctctaaatgctatgtctgtatttccttcaattgaaatattatttgagtcatataatacaactaattttccaagacctaaagttccagcaagagatgatgcttctcctgagataccttccataaggcatccgtctccaactatagcatatgtatagtgatcaactacgctataatctggtttattgaatttttctgcaagatgtgcttctgctatagcaaaacctactgcattacaaataccttgtccaagtggtcctgttgttatttcaacaccttttgtatgaccaaactctggatgtcctggtgttaaacttccgaattgtctaaagtttttaatatcttcaactgtaagtccatatccaaataaatgtagcaatgaatattcaagcattgaaccatgtcctgctgataatacaaatctatctctgttatcccattcagggttctttccattatgattcatctttgtccataatgtataagccattgtagctgatccaagtggtaaacctggatgtcctgattttgatttttcaatagcatctgctgataatactcttattgcgttaatagataatttatctaattctctactcatctttatcctcatttcatagacatatttttttataagttcttagttgtgctaattaagtcccatgctgcgcttcgaattcatttcaaacctgaaataatcttagctatccttcattatcttttcaaaaggttcctattttaccacaccttttgaagttgttttatgttttcatttataaattcttaaattcctatattcttaaattcttatattcttatattcttatattcttatattcttatattcttaagaatatatatttttatctctgtcatttggaacatgaataaatcataaatgatagtcatacttttgcgaaagcattatatcaaaatatttatccataaacatttacactttcctaatttcagaatctaggcattatatctctaaattactcttccattttcgaaatatatctgcactagaaataagtaacatattttgtggagtgttcattagaaattgtgttggtagtgcttcttgattataagttgttccaaatgtgcttgttcggagcttgtctttgaagcaagcattttgagtgcaacttataatcttagaagcactcaacaaaatttcttagcaaccggaatcaaaatatgtttcttatttcgacggactattttccaaatgctgctgcccagtctgctttgaatctttctaatccttgatctgttaatgggtgttttagcatttgcattactaaactataaggtactgttgatatatctgcgcctgcttttgctgcttctattacatgaattggatttcttacgcttgctgctattatttctgtttctattccatgaactgcaaatatttctgctatatctctaactaaatccatacctatcattgagatgtcatctactcttccaaggaatgggcttacatatgttgctcctgcatttgctgcaagtaagctctgagttgctgagaatattaatgttacatttgttttaattccttcacttgctaatactttagttgcctttaatccttcagctgtcattggaatctttactatcatattcttatgaattgctgcaatttctcttccttcttttatcattccttcagcatcttcacttacaacttctccacttattggtccatcaactatttctgtaatttcttttattacttcattgaagtctcttccttcttttgctattaatgatggatttgttgttacaccacatattactcccatttcatttgcttctttaatgtgttccacatttgctgtgtctaaaaaaaatctcattttaatctacccctttattaattatgattcttaaaactattattctacattgatatgattttttgctgcttcactatctgataaattatctcttctactcattaataagcataaatcatctaatactatatggacagattgatcaaataatgaacttagtagttgaattgacgaaacaccggtatcattctttgtttttcctggaacctcaagtacaagatctgatacttctgcaagtggagagtcctttttacttgtaactccaactatagttaagcctaaatcctttgctgcttttgcattacttagtgtattttttgtttttccagaacctgatattgcaacatatatatctccctttttgagagctggtgtaattgtctctcccataacataagaattataaccaatatgcatcaaacgcattgcaaatccttttgcttgaaatccgctacgaccttcgccatctacaaaaatctttttttctttttggagtacatccattatttttttaatcgcttcttcatcaactttgcttattacatctttaatttcttctaatatttgatctattactctcatttatctattactcccttaaactcttttactttttccaccttatcatcagcactagttattgctgatcctactataactagctctatattatatttattcaattctggtatggaatctaatgttattcctcctgcaactgcaattcttttaattgaaggaaactgttctttaaatcgcttcactgtttcacctggattagctagtttttctttatcaatagaggaatgtatgcaataaatagcactgctgaagtgtgatatttccttaattttctcatctgaacattctaataaatctatcatcattgtcccattatattgctcagaaacttcgtgacatttttctatagttccaagtgatgcactccccatcacagttagaatatcaaatccttgtttgaaaccttgtttaaattcataagcaccttcatcacttgtttttatatctcctaacatttgagatttacttttttggcttgttatatcttttaatttaagaagtccatagtcttttattaaagatgttccaatctcaataatatctgctaatccatcaaaagttttaactaagttttctgctttctctaaagacaccctatctattgcaacttgtaacttcattttatcctccttaaattcttatgaaacttttcttttataatttttcaaaaaattatctaattcatctactgttggtaatccctcattatcacttagatgcattacttgaattccaccaatagcgtttcctctttctaaaattttattatcttcaagattttctaaaattccgctaataactcctgctgcaaatccatctcctgctcctactgtatctaaaactggaacttcaaagcttggatactcagcttcttttatttgtccattctctaatttctccctagaatacgaaccggtagttcccatttttataactaccttttttacacctttgtctaaataaaaatcagcaatctcttccttgtaatcttttcctgtaaataattttccttcgctgaaaccaggtaatacaatatctgatttaaatgctaactcattagtcacttgaatcatcttttctttgctctcccataatacgggccttggattagggtcaaaagtaacaagcataccattttcgtgagctttttctatagctttaaatgttgtttctaaagttgtttcgcttaatgctggaaaaattcctgtgatatgaagcacctttccatctgaaaaacttatttcatttaaaatatctttagttattcttgatgctgccgctccttttctaaaatatagtacctctggatccccctcatcagttctatttttaaattgaaatcctgttggtgcttctttatatgtctttacaaaagttgtatctatattttcattttctagatatttctttacatattgcccaaatggatcttctccaacttggcttatatatgtaactgtatgtccaagtcttcttagtcccatagctacattaagttctgctccagcaattaaccttgtaaaatgttctacgttgctaagatgttctttagtatctgctaaaaacattaccattggttcaccaattgtaataatctcactcatttttttcaccctttccgttgccaatctatagcaaaatttttcttacttcctctaattctcctcgtatatcttcatttctaattggatattcgatcattactggcacattattagataacttctttaacattgccttccaattaatttgtccttctgacagtaaagttgtagtaggcttattatttagaaactctacattttttaaatgaaatactgtaatagctgaacgtaaaatatcaaatgcattttcaggatcttcattctgccaataccaattgcctaagtcgaaagtatatccgattggtaatgaatttttgtttataatatcaatagcatctattacacattttaaatttccattttcaggagtttgatcattttctattgttactttaatctcaaatttataaataatatctcttaatttttttatttcatctaagcttaactctactaagtcacctatattgaattttatgtgacttgcccccatcagttttgcttcctcaaaataaacattaatatctggatttaatttcttttcgcaagctactttctccggaactgaataatataattctattccaaattctttagctaatttatttataatcggaatttcttccgctaagttctttagacattctcttcttatttcagctatatgaacacctaatgcctctatttgctctaatatttgttcttgttttatccctttatctaattcatttttaaatactaataaatttatacctagttgattcataactatccccacttatttttttatatttcttgttgagtaatttagatgtattttaaccggtatttcttctaagataaaatcatcttttctacttccatctattctttcaaatagtagcttagctgctctttctcccatttcatatgggttctcatctattgatgtaattcctgggccaattaatcgggcccatttctcctcagcaaaaccaaatataccaatatctgctccaattcttatatttaaatcatataagcattctataagaacctttaaaatttcatcattatttgcaaagaaacatatatttttatctttatttttatttagaatattttctattatttcttttatatcatttatatcattttttttgataatattagtttctcctgacgtatttgcatttctagatagaaattcttccattgctttctttctctctattcttgaacttatcccatttatgtcttctgaaaaatatacataatgatcataatcattctttagtaactcatctaatatgtttcttgttacctctgcattattcattgtcaccgaatcataaattaatggatttataaatctatccaataatactattggtttaaaattatcactatccttaaactcttgtaaatatttatagttattacccgtagtattaactagtaaaccatcaacttggctatctaacagggattctatgttctctctttctctctctgctagattgtcagcatttgttacaagtagctgataattatttgctctacatacgtcatttattcctttaattagtaatgaagaaaatgggtttcctatatctgcaattgttaccccaattatattggaatttttagcttttagtgtttgagctatacgatttggcctatattttaatactttaattgcttcatctattttttcttgagtttcctgtgacataaattcaaaatttttgtttagatatctagatattgttgtcttagagactcctacataagcagcaacatctgcaattgttacgttcttttgtttatctgtagaatttttcagcataacttattcctccattcaatacttttattatcaatcttaactgtcaaagattcaataatttatgctactattctctatttttctttaacatatttattaatcaactcaatcagattaaatcgctttaacaatcgtattcactattagtttatcgttttagtttaccggtttctaaagtgataatataatgttaagactttcaccaaaaaatgtcaagccattacacgatcatttatatattaatctgattaagtttattattctagatatcctttacaaaaattttaaataaaagacttacctctatctcttaaatattaggtctagtttgtataagattctttttatagtataaattcaataacctaatgaattactaatttatgaagcctctactgcattttctattttattcgatgccttagaagttttaaccgcaatcattagaaatactgataataaaagtgaccctgacataaatatatatgatgcatctactgagcctgttataccattcaaatatcctacgacatatgagcctgcaaatgatcctagtgcacccatactattgattaaggcacttgctcctccagatacattcttaggtaatatttctgtaattattgcaaaaaacggaccataaggtgcatacataacccctcctgcaattacaagtaaaatatatgatagccaaaagtttgaagccccaattaaatatgaaccaaaaaatgcaaatgtacctattaataagtatgcccaaacaaatgtctttctatttccggtacgatctgaataataagacgatactaacatcaatactactgctaaagcatatggcaatgatgatagccaaccggctgaaacaatgctaatttgaggacttgcctttagaatagatggtaaccacattacaaaaccgtaaacacctatactccagaaaaaatattgaaatgataaaattattaccttaggtgatttaaatgcttctctataattttttactggttttatgcctttttgttcttcttccatcaccatatcaatatctttcttttcctgttcagttaaccattttgcttcctttggtttattatctgaaagtttcaaccagaagaacgcccataaaattggtggtattccttcaagtataaacatccatctccatcctacagaatttactaaatatcctgatacaatagacatccataaaacagtagctggattacctaaaattagaaatgtatttgctcttgaacgttctttttttgtaaaccaattacttaaaaaaatcaacatagctggcataacagcactttcaattattccaagtatgaatctagtaaccattaaaacttttacattcgttatcaagccatttgaagcagctaatatcccccagaatattaaactccaaaaaactaattttttagcacttttcttttctgcaaaccatgctgctggtacttgaaaaaagaaatatcctaagaaaaataaggcggatagaagagatgctatcgatgctgtaatatgcaaagattcacccatacctcctgcaacaccaaaactataatttgcacgatccaagtaagctaggctataagtaataaatgctactggtattaatcttttccaccttttagaagttaattgaatacttgatttatccatttcatatcctcccataataatcattttaatttccatataatttaataattaaaaacaattttagctttattgtgcaatcatttgttcaatttataaaatttattattccttcagcgagttcataataatatcgattatcttcttacattccccctatgcttatcacgctacttcaaatatttttgattttttaaacttgagtttaaatttcaatattttttatactttagctttagtttatcgttttagttaaccggtttctaaacttaatataatgttaacgctttcaccaaaagatgtcaagtagtatttataaaaagttaaaatcaattatctgtataataaaaaagccactatagttctagaaggctttattccagaacatagcggtttaatattctccatacaaattatataaatttacttttaatattttttgttctctaaattcaaagccttataaatagctttagcaactccagcattgtcattggtatcagttatatacttggctatttcttttatttctggtactgcattttccatagcaacagattgagtaaattcagtaaacattgagtaatcattaaaactatccccaatcaccattacttcatctctttttatccccattttttccgcaactcttgctaatattaatcccttttgtgcatttttattatttatttctatatttttagtaaaagttgatgctatagcaagttcccctattgattccaatttgttctttacctttttagttgtctcttcatcgttataaaatgcaacaaattttcctatcttaacattactattcaaaaaatcgtttatatctttaacatattttaaattaataaaatgaggatgatttttagccatttccatagcatcttcaaaagttgtttctgggtcgaataccataattctgtatgcaacttcagttaatgcttcctctattgtattcacactatataatccatcattagtataaatttcagctataattttttcctttaatatcatatctataatttctcttgcttgcttactatcaatgtaaattccttctaatacctttccattctcatctatgtattctccgccatttagaacgacacattgacattttaaattagattcatcaagtaggggtttaacatcttcatacattcttccagtagaaattgcaaatttcactcccattttctcagccacttttatagcttctatattttcctttgatatcttatgattgctattaagcagtgttccatccatatcagctgcaataagttttatcatcccttaatccctccatactcgtttatatattctacaacatgtatttactcaaaattttcttgtaaaatatttacctataatttctattatatactataatacaaaaaaaataaggctaaagatacttcttctctagcctcaaattctaaatagaattaattattaattttattctcttctatttatttatattattttttcatttattttattataactagtgccataatttcttacaaccataaactatcttaagtaagatgaatgcatctatatcatacttttttctcatgtatatttacatataactatgcatattgcaatttatatagaaattaaatctttaacgctaaaattaacattaagatcataattttcatttatgttcttatattttattttagttgttttttgttctatatcaaaataccaaccttcttcgcttaattcccattcttttatatctaggaacatggcaagctttttatctcttaagttaacttgaactggagctatatccttacatattaaatctatattaatttctttaggctgcttgtcatatccgccttctttttcaaatgcaattttaacactattttctctcttcactgatattaacgtctttaagtattcaccatttttgtagttattagttacaccatcgtcttcatataatacaaagcttgattcctctgatggctctattagaagcttaagtgtttctattgaatcattatgaatattagctaagccttcagcaattggaattattgctccacttctaaagaacataggaattgagtttaatgaaacttcaacttcaatcgtctgtccaccttcatatgtctgttttgtatcccaatcaaaccaaacagctccttcaggtaaatatacttttcttctttttgcacctttttctaggacgtttgcaatcaaaatagaacttccaagcataaaatcaaagctttcctcaagtaattttttatcatcttggaattcatatattaaaggcctcataattggtgatccttctttagatgcttcaaataacaatgaatataagtatggtactaatttatatctaagttttatagcttcttttatatattttgtataagatggatacatccatggttctgtaacagtattatcagtattgcaagaatgaattgagaatcttggctggaatattccattttgaacccatcttacaaatagttctggttcaggtgctggtccaaaaaatcctcctatgtcacatccttgatttgcaactcctgaaaggcccattccaagcattactggaatattgaattttaaactcttccagcttgtattattatctccagcccatgtttgagcataacgttgaatccctgcaaatccagccctattcactatatatggtcttatatttggataaacttctgcgactgtttcctttgccataagtgccattaaatttggcattattggtcttaaaccacttatttctttcttcatgccctcgaaatgacaaattgcttctgtattatttatttcatactcattattatcattccatatagatgtaattcctagcgaaactaaagattcttttaaatgctttttccacaattctcttcccttaggatttgtaaaatctacgaaagaagcttgtcctccccaatatctatctgtttgagatttttctccttcatcatcctttatataagcgccagcttcatcaaattctttgtatagcggattagaaattaacatacctggttttatgttaggtgccacgcaagcccctttttccttcacttggcttacaaaatcttcagggtttttgaatctatcgtaattccaattgaatacatatctttttccatcttcccctgtagtatatcctgatgacataaagaaaccatcacaagggattccttcttctttacatctatctaaaaatcgtaagatagctttatctgaatctttatctaattctgtgtaatacatagttgatcccatatatcctaaggaatactttgtagacattgcagtttttcctgttaaatcagtataatttcttaccacatctttgattttaggtccataaatgaaaaatgcatctaattctccaccatcagcacagaaataactgtatttattccaatatccacttctttcacatcccatatcaaaagtagaatcataagaattgttatagaatattccgctagctatgttatttttattattaaattttatataaaaaggtatatgcttatataatggatctgtattttctgaatcataacctatagtatctacattatgcattctcattcttctctttttcttatttaaatacccagctttttccccaaatccataaaaataatcttcatcatccatacatgaataatgataaagtcttcctaagctatcttttacatatgatttttcttttaaatctgaatgtagtatattaccttgcttatctgtaatctctactccaaaaggttctttataaatatttatatttaaactttttgtagctaatataatataattacctaagtcttcataactactgctaattgcttctacttgttttctttcatcttttaataactcgtccattttatctttccaagctgtcataactaaagcatatgatgcttcttcttgaaactcctcatcaaaagtacagcgaactcttactatattatcatttaaaagtataattctatatttagctgcattagtagtgatttctaaataattatcaatattttttagacttataattttattacttatcttcataatgctatctcctagtatatttattttataatttttaccctatttacaatataagcctcgtcttatcaactattttagcgaattgagaaatgcttatctacttctcaataatacagttcacaaaatctatgactccatcttcaacttcatccctaatatctaaataatattgtatttcatgacgatatcctgaataaacttttgtctttaccatgtgccctgtttctgcaagccaattcgacacagcataaacaccttctccgtacagcccaactggatctttatctcctgcaatattgtaaactttaattgatgtcggcactttctctgcccacttaactccaacaatatcattcatcaaatttgcaaaataatatagtgaacgtatattaggctgcattagaagatcactatatatatctcttgcatggtctgcatttacatcaggatcgccacatgcccaggtatttgaagtaacaggattttcttcataacgttctgttttccacatccatcccatgagcatctctaagcaagaaggatcaacttcttctcctctaccttcatctattaaatttttaaaaacaggtattactgaacttgctgttggaattactcctgaagttccacataaaatcaagccatcaattccttctccataaatggtagcataacatctggcaatcattgatcccatactatgaccaaacataaaataaggtaaatcaggatattcttcttgcacaattttacgaagtgaatgttcatcttctaccattgtcatataacccttatctccccaatcgctccaattgtccgaaacataagcagtttttccatgtcccacatgatcatctgcagcaactataaatcctgcgtcatttaattttaatatcatgtgcatatatctacgtgaatgttcatgataaccatgcacaagctggataattccccttggtttacgaaaaggagtgtaaatccaagcttgtaccatgtcccttttattaaatgattcaaaacttttttcttgaaatgccataagaaagcctccttgaattctatatattttttcaattcaatttccaaataattattttcatacacttcaataatagttatttcattacagatatccaatacagatatccaattcaaaaattcaactcgtaattggcataactatctatcatataattttgagtacataactatactagaaataagtaacatattgtgtgcagtgtttcattggaatttttctggtaatgattcttaactagaagttgttccacaatgcttgttcaaaacttgtttttgaggcaagcattgtgggtgcaacttctagtcgtagaatcatccataaaaattcctggaaaccgaaacacaatatgttacttgtttcggtaagtcacacaaagtctagtttacatacttaatatctatactgaagcataggctctattcgtctcccatgccaattaaatcaaatctttcacaagaaattataatttcaaattctttctttgctggtttcttgcattttactaatactgttctatctgataattcatagtaccacccttgttctgctttttcccaagatgatttatttaagaaacgaggtatttgttcattgtctacagaaacccaatatgcacctttatctttacttactaatttaattgtaagatcagatattccactttcataacttcctgttgtcttgaaagaaattttcttacgtgctcctccgcttacattgatttctgtcttttcatatatacctttttcaaaatcattagttacaccatcatcattgtagaaattgaagcttctttctgcttctcctccgattaaaatgtctaatgtcttcattttatcagtagtaatatgctttacttcttcgtttgttatgaaaattccatcgcctcttaggaacataggaatactgttaagggtaactggaatttctatcacttgtccgcctttatatgcagccatattgttattcatatcataccaagtacatccttctggcaaataaagttttcttgaatgtgctcctttttctaatacattggcaactagcaccgatggtccaaacataaatgtcatatattgatcatcataacaattaatatcatcttggaattccatgaataatggacgcattattgatttaccagtagtatgagcttcatacattaaagaatatagatatggtaacattctataacgctgactatatgcattacgtacaaattcattattttcttcatacatccatggctgagtaacagtattatcattattggctgaattaatgcagaatcttggctggaatataccattttgaatccatcttaataatagttctccttctggagcacctcctgcaaagcccccgatatcacaacctgtatttgctactcctgatagccccattccaacaatagttgctatattaaattttaatgtacgccagtctgtcaaattatctcctgcccatgtttgtgcatacctttgaatccctgcaaaaccagcacggtttataatatatggacgacagtttggataaagttcagctacagcttgctttccaacataagccattaaattagaatgcattattttaagttccgccatagttcctggttttccatcaaaatcacatacagcattacgatcctctattccatcatattcacagttgtcattccaaacggttatagttcctttgcttaaaatattttctttaagtagcttcttccacgtttctctaccagatggcttagtaaaatctacaaatcttccaacaccgccccaccaacggccattataatctccctttccatctggatttttaataaatacatcattttcttcaaattcttttttataaggatgcttagctaaaatacctggttttaaatttggtataacattaaggcccatttcattcattttttccataaattcatctggatttgggaatctctttttgttccaattgaaaatatatcttaaattatcttcttctccagaagaataaccagatgctaatttgaagttgtctatatacattttttcatcaaaatgctttttaattacttcatatatttccttatcgcaatctttttcaagttcagcataatacattgtagaagctgtataacctaagctttgtttaggaggcattgcctgctttcctgtaagttttgtgtaattatctaagacttgttcaacttttggtccattgataaagaatagatcaatgtctcctccatcagcttgataataactataacgaggccagtatccactgatttcattacccatatcaaatactgaatcatacgaattatgatagaaaagtccaatggcatgatgattattgttatttaacttaatataaaatggaatatgtttatataaaggatcaccaaattcaggatcatgcccaattgcatctttaggcgacatacgcattcttctgcccattttatctaactttccagtcttttcaccaaatccgtaaaaatgatcattttgtaaatcaacctcattatagtgagaaactcttcctagttgatcacattcaaaagctctatctgcaagatcactgtataacttttctccatttgatttatatatagaaaaatgtaatggtgatttagatagtaccaattttaatgtttttgtataaaatataatttctttttcattttcttcaaaaggaatatctaatgcttctattctttcacgttcttctgcaagtaaagaatcaaaacgatcctcccatgcagtcgtaaccaatgtataagatgcttcctcaaactttctatcaaaagaagctctaacacgtataatatcatctgacataaaaattatttttatatctgcggtatcacccttcactaaataaccattctgtattctatttatagacataaattcctttaataacatgtaatttcctcctaaactactaatttatacttattaatttatcaacctattaaggcgtagattgcccgtttataaacttgttatataggttgttgaattatgattttttcaacaactgtcaaaattcaattatttaacaacctatatctatatgacattatgaaagtagaaaaataacttagcttatactattcattaaattatcttgtataagattctgtttccaaacctcctcatatttatatccagtaagactttcaacaacttcttttgtctttgagtcaacattatcttttgagccaccattttttaaacgttcaacttcatctattaatatctgatgagtttctttattaagcttgaaagtaaatgcaagtattaatgataatgcaaacaaaccaacacatccaataagtaaaacatatccaataatctgtactgtttgaggagattgaacatcttgacctttaacaaatcctccttcttgtaacacaacaccgattaaaaatgtagcaagggctacagtgctctttctagtaaaagtcataactgctgcaaaaagcccctctcttcttttcatcgaaacaatctcatcaacatcaggaataaatgggaacactgtccaaggagttagaaccgccaatgatctaaatgcaaagtaaactatagatattccaagtaaaatggcagtcttagctgcaggatcagctaaataaactccataataagctagtacacttaatatcataaatgtatacgtaatcttatataatttagtaggtccaagctttaaaaataaaattccacctataattgttcctggtatgccaataatactaaatgaaagcaaatatgcaccaaaagatgatgaaacctttaaattataaacacagaaaaataagaatacggcattaaatatatctccagcagtaaaagatagcaaataaagtcctaaatgtttcctaaaactttttagcttaaatgtagatgcatattccccaagcacttttaagtaatcactaaaatttttctttcctttagattgagatgcagctaataattcttgctccattgctggtgtaatttctctttcccaagtcactttatatgttataaatatacaaatcgcatacaatactgcaaaaaataatccattatagaaatatgcataaggattcttttggccaaaatgtccaatcaattgtgcaggaacaaaagtccctaagaactgacctaaagaagaaataactaatctgcaagtagaaatttttgttctatcagagtagttagttgtcatttcagtcggtagtgtttcccatggaattaacaccatagctgcaactatttcaaataataaatagcaacttaaataaaaccagtaattcattcctattgtccatattaatacataaattgccattaatggcgccccaattaataaaaagaaacgacgtcttccaaatatctttccaagcttagttttataaaaattatcagatatactacctataaaaagactggcaattgcatctacaaaccgagcaactgcaacaatagatgccccttgtataggtgtaagtccacaataagttgtatagaaaaacaataagaaagctccaattattgtaaaggctccgccgcccattatatcaactaatccatatccaatacatctaggtaaagtaatctttttatcttttatagacatataatctacctctttctttaattaatatttttaattagcaatcttctatctaaatattgaaatattcctttgcattgttgtagcatataccttcaacaactgtttttagcaatttaatatttcctggtacttcaccattttctacccattctccgattaaattgcaggcaattcttctaaaatactcatgtcttgtatatgataagaagcttctagaatccgttaacattccaacaaagcgtcccaataatccaagatttgctaacgccttcatttgttcaatcattccatctttattatcattaaaccaccaagctgcaccgaactgcattttccctggaattccctcaccttgaaaatttcctgtcatagctccaagaacataattatcctttggattcaacgtatataaaattgttttaggaagggaattttccttatctacagaatctaaaagtctagacaatgggtacgctatactctcatcattaattgaatcaaatcctgtattagggcctatcttttcgaacattctattattattattccttagcgcagctatatgaagctgcatagcccatccaagctcatgataaagtttaaatacatgtgttaatgtataagttttgtacttcttttcttcatcaaggcttactacttctccatttaaggctttagcaaatatagctgctgcatcttcttttgatgcatctgcataaactactgccccatctataccatggtctgctatcctacatccaaccgaatggaaataccttactcttgagtcaaatgcatttagaaattcatcataattacttatagtgatctccgatattccttctaatttttttacccatgaaacaaaaccatctaggtttatttctattcctttatctggcctgaaagttggtaaaacatttacattaaaactctcgtcttctttaagcttaatgtgatattctaaagtatcagtaggatcatcagttgtacatatagtttcaacctttgattttgtaattaaatctcttgccctaaatccttctccacttaacaattcatttgcttttttccaaattgctggcgcagtgtcttcatcaagcggttcatatattccaaagaacctttgaagctctaagtgagtccaatgataaagaggatttcctatagacataggtatggtttttgcccaagctaaaaatttatcataatcactgccatcacctgtaatatatttttcatctataccattacatctcattgctctccatttgtagtgatccccgtacaaccatgcttcagttatgttattaaattttttattttcatatatctccttaggatcaatatgacaatgataatcgataataggcatattctttgcataattatgatataactctatagctgttttattagataataagaaattttcatccataaatttcttcaaattcatcatcctactttcaaataaaagtttaatatttgtaaagtattgaatggattttctttaacagtacacactctgctaattagagtacattatcgtaatctttatatatccaacaccctactataacgttttcttttacactaatctttgtaaattttcattacttagattatgttcccaactctaatatttctttaaatcttcataatctaagcaagattgttagttagtacaatttgtgttataatgtatttcttaataattttcttagcatttttatcattctttgtttatattatttggcagaatataataaactggaatgataaaaatgttatttttttacatatcttaatttcaccataaactatctgcattctaaatacttttctaaagttgctctaacagcaccagttccagaaatcatttcattgaaataaccttcaattttttctcctaatcctataaaataaagatctacaccaaaaatttcttcattcattagtattggttttagagtatctcctaattgttctgtagtacttaattttatattagctacatatttctttagttcatctaataatggatctggacttaattccattgcattaccatcatcagctattcccattaaatatctgcaccaacctgcaataacaagtggaatgtatttaaggtttttagaatctaaatctactctatctctgtaagccttaattgtccctccaaatcttataccaaccttttgagaggtatctgatgcaatcctttgaggagtatctggtatatatgggttcggaagtctaacttcaagtacttctttaataaaatcttcaggttttaatattccaggatcaacaacaactggcattccttcgttgtacccaattttttctactagtttctttagagtttggtctttcatttcgtctgcaattaaattatatccaagtaaacatccaaagactgctaaagaagtgtgtaacggatttaaacaagtacaaaccttcattttttcaactctctcgactgtttctctgtttgttaaaaatactccagcatcttctaatgccattcgtccatttgggaaatcatcttctataacaagatactgaggcccttctgcatttacaaaaggtgcaatataagtattcttattagtacatataatctcagtactgtcaaaaccgttttctcctaaagtatctttaacactttgagatggtctaggcgtaattttatctatcatgctccaagggaacgatacctttttatcatcattgatatattgtagaaagcctttatcaactaatccattttcattccacttctttgctattgtttccattgcatcatgaagcttttcaccattttttgaacaattgtccatacttacaaaagctattggaagttgtccattcttatatctcacatatgctaaggaagtagctttagcaataatacttacaggatgttctaatccatctgttatatcctctttagatagattttttacactataacctttttcagttatcgtaaaacttgctatttgtaatgctggatttgaaaatatatctttcaatctattccaatcttgtcctcttgaatagtcacaagctaggctttctcctatgcttcctacaacttttttctccaagcttccatccggtttcataattactaacaaactcaaatcatcatgaggcgcataaattttatctattatttcatagtcatatccttctacagcaacaatgcctccacttactttttcattgtttaaaagttcttgttgcaacattgctataaagcctctaaatatatttcctgctccaaagtgcacccaggtaggactttccctagttgacgctgacatcttatcatgatcaaactttggaagttctattccagcactttcccataactcgctgtttttaatactttctttgcttagtattaatttggcattactcattcctattttcacctcttcaaaactattattaatgacattacaaattttaattatcttttatatcttaggattaataaatctaagcttttcttgcaatatctaattttatttattcctaagccttatttatttctttgtaatgtatcccaaattccccataaatacataatcccaagtgctctatcataaagaccataacctggtctacactgctcattccagatatgtcttccatgatctggtcttacatatcctgtaaactcaacttcatgataagccttcactatatcacatatatctaatgagccatcacaagttctatgagatgtttcaataaaatcaccattttcataaatctttacatttctaatatgagcaaaggcaattctgtttccaaattctcttatcattgctggcacatcgttattaggatttgaacctatagcaccactacaaagagtaaggcaattatatggactatcaacaagctttaataatcttgctaagtcgtttctacttttaactatccttggtaaaccaaatattgaccaaggtggatcatccggatgaactgccatcttaatatcattgatttcagctacaggaataatttgctctaagaaatatttcaagttattccataaatcttcttctgtaacatttttatatgcttcaaaaagttgtgtcagattctttaatctttctggctcccaacctggcattgtaaggtctggatttgatgctatcttattaaccaattccatcggatctatatctgtaatcctcgctttttcatagaaaagagctgttgaaccatcttctgtttttttatacaagtctgttcttaaccaatcgaataccggcataaagttatagcaaattacttttacaccaactttggctagcttctctattgtctttttgtaattttcaatatatttatctctacttggaagtcctaatttaatgtcctcatgaacattaacgctttcaacaacatctaagttaaatccatatttatcagctgatttctttacttcaagaattttttccatcggccattcatcaccagctgccatatcatgaagagcccaaacaatcgtttctacaccaggaatctgtttaatttgctcaagtgttacggtatcgttaccttcaccataccatctgaaacccattttcataataatatacctcctgtcattttatctaatttggttttatcgtaagttttttgccagcgtataaagagtttaaatcgaatgctctatataggcctcacctccctaaattgaaaattcattttaatatcagatgattttatatcatagcatctaatatttaagtgtgttatataaccctaatctttaaaataattaggataactttctcttacttgtgttttatcaaagatgaccatatttaaatgcttcttcgtgaattcttctgccatctctggatttttattttttatagcattaaatatttctttatgctgcagatagatattatcccaactagaattaactgttaatcttaatacacgaattctttgaaattcggtacttccatcattaatactattccatatcctctttttgccgcatccttcaaaaattatcttgtgaaattcctcgtccgtattaaataattttttatagtctttattttctatatacattttttgaaactttaaattaatttccaaagctaatatattttcctttgaaaattccatgcaggcttcttttactacagctctttctaaatgctcacgtaaaaatctttcttcttcaacagcagataagtcaattaatgaaacaactgtacctttttgaggataaatttgtactaagccttcttgagctaaacgaacaagagcttctctcactggagttctgcttactctatatttttctgaaagttctttttcagaaatgcttgtaccaggctcaagatatagatttataatttcttctctgagattatgatatatagccttacttgtagaatttttgcttattttaaaagtcatacttatattctctcccattggcgtgttttaccatacttgtatggtaattatgagtatagtcttgctgtctaagaatcgtttacaaagaattgtatagtaaatcttttcacttgcttttccctaattgctatgattaaattatagctatacaactgtataaaaaatatgttttaattgcttcaaaacttgcaaaaattgctatagtaaaatataatgaacctcagttttattaaaaattacttatataaacaatctctttcgtaatttaaaacgtttaattgtttaataattcagtaactttatcgcaatttatacaattcgttgaagaggtgatatcaatgaaaagaaaaatacatgagttttttacacgcaaacatatgctttctagtgactacgaaatctttcacttcttaaatactgatgtgccatttcaatacctacacaatcatgacttttatgagttttatctatacctttctggagatgttacatatttgatagaaggtaagtcatacaatctaaagtcaggtgacatagtattaatcaatacaagagaactacaccgagctgttattaatagtatgaaagttccttatgagcgtattgtgttatggataaacaaatcttttctacgtgaactgtcaacgccagaaacggatcttatccagtgctttgaaaacgtagagaaaacaaatgttatacgagctgattttcaaattcagcagaatgtaagggcacaacttagcaagctacttgaacttgaaaactacaaaggcttaggcaaagatttgttatataaagcctatattatagaacttgtaatacaattaaataatcttgttttaagtcataaatctgattttgatattgatgtgacaaagagcagcttaattgatggaatagttgaatatattaataatcatattaatgaagaacttacaattgatgagctttctaaagaattttatcttagtaaattccatttgtctagagaattcaaaaagtatactggtactacaatccataggtatatcgtacaaaaaaaattaatacaagctaaagaattaattcttaaaaatcatcccataaatagtgtttacaaacaatctggatttggtgattactcaaatttttttagagcctttaagaatgaatacaacatttcccctaaacaattctatgaacttatggttgaatctaatttgaagaaataataaacattagtagttctataatatatagttttataatgaatatttaaatagctttttctatttaaaaagggaaataacatatttaaattcatcttatatatctttttcaataacaaaactatgctaaaatctatatgattggagaataactggacaaggcatataatatagagaactaattgcaacgtatgtacatcaacgaaatactttaaggactttacttaattttttaattaataaattttaaatgcacgagatacaaactcattattaataatttattacaagaatagcatatgtaagtactattcttgtatttttttgtgtagatatatataatttatttaaatgtacaccaaaacttgttaaaataaaaaattcgtaaataatttgaataggcttttttgaggtgaaaatatgaaagcaaatgtagaaatagttcttggatttcttggctctggaaaaacgagttttataaattctatgctaaaaagaaaagaattacaagatgaagctatcgttgttatacaagatgaatttggagactgtcaaatacagaatgacttgaataataaaaatccaatagtagtaattaatgttgataaaaataaagaaattgatgaaagttatataagcggaatcataagtaaacatgctccgaataggatttttatcgaaatcaatggtatgaaagattctactaaagtaattaatatatttaatacaaaaaagataaagagtatatgtagaattgataacataataaatactattgatacaacaagctttaatatgtatttcagaaatatgaaaagtattattagcactcatatttttaatagtgaaactataattttgaacaatgtagtcgagttagataaaaaagaacttttaagcatacaaaaagaaattgaaaatattaatgagactgctgatatactaaagcatgtatacataacagatggtgaaatatcaaataaaaaagaatatgtaacaactacaaggcatggtttttcattctttaatacttttttatattcaggttttgtactatttttattcatttttttgattacaatgtcaacattaaatattaagatatctagtgcgtatttagatagattcaaaaaattttatgatgtatttataagcatattaattcaaggttttcccttcattcttattgggagttttgtatcttcaataattcaaatttgtatatcaagagatacatttattaaactattttcaaaaaatagttttttatcttgtgtaattgcagcttttgcaggtttattatttccaatatgtgattgtgggacaatccctgtggttaaagggcttattaaaaagaatgttcctatatcagcaggaattacatttatgcttgcagcaccaattgtaaatccaatagcaattattgcaactctctatgcttttccaggtattatatctgtcgtaatttacaggttagctgctggaatattaatctctattttggtaggtttaattatgcagtttactactaagaaggatgaagaaattttaaaaaataattctgatatagatgaatgtgattgcggtttttgtgatggtaaccaggattattcaaaaagtaagctacaaaaagtcaaggcaatattcattcatgcaggagatgaattttttaatataggtaaatatatgattattggaacttttttatctagtatttttcaaagcatggcatttataagtagcaatacttacatttctaatgatagtagaatttctcttctggtaatgattttattatcttttttactttcagtttgttcaacttcagatgcatttgttgccaaaggttttttaagagcctttccaataagctctatacttggatttttagtagttggacccatgttagatgtaaaaaatacattgatgctttttggaagctttaaaaagaaatttgtattaaaattaatatttactattatcttagtatcatttggcattttgattaactgcaaattaacttgataatattgaaaaatagctcaatatattatcatatattctatagatatcatagaaaaattaattgaaagaggtcgcatatgaaaagaattagttcagatataattattaaaatactgatattgctatgctttggaatattttattttaagataattaagaataatgaaataataatgtatgtacatccaagaattattccatttgctattttgggaatgctagcaatgtttgcaattgcggtatttctaattgcagacagtcgtcgcaccaaaaagaagaatgtcaagttaaggaattatgtagtcttcatcattcctttagttatggtatttttcatgcaaagtactagtgcaaattcttcaataaaaactgatgatataagtgcaaattctagcggatcattaagcaccaatttaacttatgacaattttaagcctaatccctcagaccaaaagatcaacaatgttgaacagggtaaatatgatgatgatttatatattaaagataatgttatagaagtagatgtgaacaattttctgcactcctttgatgaactcacagagaacgcaaataactatgatggacaagaaatagaaataacaggatttatttataaagacacaacccttaacgataatgaattcataataggtagatttgtaatggcgtgttgtgcagctgatttacaagttgtaggaattaaatgtgatagtaataatcaagaaatctacagtaaggatacatgggtaaaaataagaggcaaacttaaaactgaaacagttaagtatgcagtgaacccagttatagtagtcgaacatatagaaaaagatcctaatcccaaaactgaatacttatatccattttaaaaatccttaactatctaaattcaatatgtcataaaccttactattaattggactataaaaaattatctttatataaaaaaataaactatgccactttcatttagtgttttattagcataaagagctatataaacattaaatgaaaattagcacagtcatataggcataatccccaaaacagcaagtccagctgcctaataattattttataattttaaattcatatccttgtccctttaaatattctataacttctggcaaggcttttgctgtttcttcttttccgtacgtatcatgcattaatattattgctttttccctgtttgccacagtttttataacttcttgttttaactgttctgcttttttaggagcaccttctgcatctccagatagcgaattccaatcaatttgatgatagtccttatcatgcaatgctttgtctatagcttctgctcctgacggatctttcttatcccaagtcatttgtcctcctggaaatctaacagctcttgccacaaaatcttgtcctaaaatatttttcaaagattgatttgttttctcaaaatcggacatacaattctctaaatttatttttccatttggatataaatagttgtaatcatgcgaataagtatgattacctattgcattaccttcatcaaattccctttttactaaatctttgcttgcctgatctttatctatatattttcctataaggaaaaaggttgcatgtacatcttctttcttaagaatatctaatatctgtggagtaactgtttctgatggtccatcatcaaaagtcaaataaacaactttcttaccatcagctccatcaggcctttgccctttcatttgttgatttaaatatttttctacaaatgctgagttttctacttcagaattactttctgatttaagagcgtcactatccgtttcacttttactctgattatcacttgattcagattttgcattctggttatcatcaagcgcttgtacagtttttgtattatttgaaaatttttgcattactatatttcctactgttataaccaatatggaaataataataaatagaatggtaatctttgctactttaatgtttttatttgggttatttctattgttatacttcatttttcatccctcttatgtcttatctatgtgtgtcttaataattttttattagatagcagcatattaagtatatgttgcaattgaattctataatttaccttaattaaatattcgtcttattagaacttttaagattaagtatactattgcaacatatatactgagtatttgtagctaattatttgaaaactccttgtgtaaattcatctaaatcaacatcatggtttattccattaacaaatcctgtctcactgtattgatgtccaactcttgaaaaccatattttatttgttggcagattttgaaatggagtgttattataatttgcttcccataaaggatagttagataatcttccgtctagattgctaatgaagctgctatatgtgtatatacctatatccatattacttactttcttgaattcggctataaatcttaaagcataatccataatgtcaaatcctgtagcttctatatctaacattggcttcaaatcgtttcttttatcctttatgctattataaaaattatcggcttgagtttctggagcacttgtcccaactaagaagtgatagaaaccaacctttaatccagctgatgaagccccattataattagcctgtaaatacggatctataaaagttgttccttcagttgcttttatatacactaattgaactccacttgattttacagcattaaaatctatgtacccatcataattactaatatctataccataatatttgcttaaagtgttcccactactgcttgaaccagaagaactttgacttggagtgcttccactactacttgatccagtagaactttgacctgaagtgcttccgctactacttgatccagaagtattttgatttgacgcacttccgctgccacttggtccagaagtattttggcttgaatcttcatacctcttgccatcagatccaatcttatatccatctttagtagtgttagtaagcatttttcctgtgtctttgtctaagtaataccacgctccattaagataagcccatcctgttgccatgcttccatcattattaaagtaataccagttattgtttatagtaatccatccagtttccatatctccgctgtcagtaaatttgtatgttgtaccgtctatcttattaataccagttaccatacttccatcattctttaaatagtaccatttattattattcttgatccatccaatatgaatttttccacctttatcaaagtaataccatttatcatttattttactccatccactattggttgacataactcctgaatctttgaaatagtacaaatttgaaccatcgtcccggattccagttgccatagcacctgaatcagttaaaaagtaccaatcaccatctaactgtttccatccttttgccatagccccactttcatccatataataccagttacctttatctttcacccatcctgttttcattttaccgtcatcttcatttaaatagtaccaattattatctggtttaatccatccaatcgcttttgtattatccgatttgtaataataccaaactccattctcattcttccaaccaatactagatgttatattagtatcactagttgcagcttgtacatttaatcctggaattaatattagtaccattaatacagataatattgttagtctctttttaatattcaaaacaacctgtcactcccttttttgttttttagctaaaatatgattaaattgaatacgaaattaattttatgtttctataagattttttccatctatagcaatgcttccatccttgtaatattgcattactctcttaacataatcctgaaccccttgcgacatcttacataaatcatcatctgataagactccatctttttttacattttgtggtccagcattataagctgctattgctatttttacatcaccattaaattgatttagatattcttttagtaattttgaccctccatcgatattttgctctatatcatatccgtcagtcattccaagatacgtataattctgaggcataatctgcatcaatccagtagcacctgagcttgacgttgcttttggatcaaaatctgactctgctttaattatagctagtatcaattttgaatctagtccatatttatttgccgaatcatttactgagttatatatttttttcatagtatcacctgaccccttcgagctagtgcttaaaggaatttgattaaacggcttatatctttttccatccgatccaatcttatatccatctatggtagtatccgttagcatttttcctgaagtaggatctaaatagtaataatcgcttccatttgatgtaacccatcctgtcgccattgatccattatcatttaggtaataccatgctccatcaagatttatccaccctgtcgcaacacttccatcagtattgaaataataccagttattgttcacgctaacccatccagtttccatctcaccagtatcgctaaatacatatgttgtatttcctactttgttagtaccagtttccatacttccatcatcgtttaagtaataccacttatcattattctcaacccatccagtatgtatctttccatctttgtcaaaatagtaccatttatcatttatcttagtccatccagtatttgtagccataacccctgaatctttgaaataatacaaattcgaattatcctgctgaattccagttgccctagcacccgaatcagttaaaagataccaatcgccatttaactgtttccatccttttaccatagctccattatcatccatatagtaccattttcctttatcctccaaccatccagttgtcattttaccactatcttcatctaaatgataccaattattatccggtttaatccatccaattgcttttgtgttgtcagacttataataataccaagatccattttcgtttttccaaccaatgcttgatgttatatttgtatcagtaacatctgcttgtacatttaatgttggaatgaagcttaatgcaattaatgctgacaaaactgtaagtatctttttaatattcaaagtaatccatcacttccttttaactgattcttaataaaaaaatgttattagactaaataactaatactgattttaaaaagttaaatctcatattaaaatttatcattaaaaatcagtattaattatgtattttataatttattaatattatttattatttttaaaataatttttttcaatgatggcttccgaaactttgaattcatcttttagatgctttacttctttttcatcttttggatttcctacaatttgaccttcatttaaaattgtagcatctctattcgtattcactagtactcttcctattgaattattctcaaattcacttctatcctcgccaagcaagtataatattgtcggtttaaaatctgtttgcccaccagctgttgatatgacttctgattttgagttctttgagtaaataatataaggaatttttctttgattatccttccaccaatctccttctaaaggtgcattttctatatcttgttcataaaacttatgaacaccacaatgatccccgtaaatcataactaccgtattatccaataaaccttccttatctaattctgctataaactttccaatagcctcatcggtatatcttacagattgaaaatattttcctaacatattatcatcaagttccttaggtagattcaaatattttttatcttctggcatctcaaaagggccatgacttgtcaacgtagtcataaatgcataataaggttgtttttcatcttgtaacttttgagctacttgctttaaatatgattcatctgaaagtcccaaacctataatttcatcttgattaaactttcctacgtctaatattttatcagccccatagcttttatgcatttctgtccaattccaattcccaggtggttctgcatgagtagaaactgtagaatatcctttaccttctaaaatattttgaagtgtattatattgactccaaggataagaatacactgtagtgccttctcttataggaagtactgatgcattaaccatcaaatcacaatctgaacttgttccagaattattttgttcgcgtatattattaaaatacaaactatttgacaatagcttatttaaatttggtgttatttcttgtccatacactttttgattaatgacaaagttctccagagactctacctgtagtgcaattacatttttccctttaaacattcccttgtaactattgtcaggtaaatcttctttattagcgctaaaccaactttctatttcttttttatcttcatctgttaaagtcttatttttacttttatagaactgaatatcaaaaccatgatatccaagtggactcatatctccaaaagtctgaaatggtgcccaagacaatctaaatacatttttcccttgatccatttgcttgacgtctactgtgtaataaccaagccatataacaagtgcacttgctataaatacatacaatgtctttgctatcctaaaatatgcttgactttcatttgcttctttaactttaataaacttatgtattaaaaggagtattataaagtcaacaataaatactaaatccactattctaaaattaaataaatttttgccttctggattaaatatctcagtgtgcattaaatgccttatagataaaaaggtttcatttgaacgataataccagatatctgcaacaaaaagaattgtgactaaaatatctattattaaggcagcaccaagcctccccctctctttaaaaagaaatattggactgcatatcaatactattattgctatatgcacccaaagtactggactatcaaaataagcacttcctaaacttatacttgatgagtctggtgtccttagcatagataatagcaatgttgatttagcttgtaacattgctaccataaatataaataaccaatttcttcgaactaaatttttcattctctcttttgtttccattttcattctccattaatatccatttttcttcctacattataactcaaactttatcttttaccaacataattttattaaaagataattacaaaatttcaaagataatatgaatcttacttagattgtaaatcattaatactaattattataaatttcaaacttatattttattaaatatttgatatctttcttaatttgcaggcgcttaaatgcttaattgatcaaaatttatcttaaaatatcaagtaatgcgcttaaatagctttataattaataaattacaccacaacctatataatatcaacccggaataatttacatattaagataaaaaaaggataaaagctacttgtgcaaattcctgatttacatcaaaattgcatacttttatccaaaataaaacttataatttaaataaactatattagtatatctaacgtcttcattcttttcttaaatacctaatacctaatacccaatgattaaaatatctttagcaaaatagtctttctaatttattattatttaagttgactcctataacacatattctacctgtgtaatcaacatttccataacgaatttcatattcctctggaactaagtcaaaattaatccattttccatcaacatcttgaacaatacctttagcacgtaaaatctccccatactcttttgattgtatcaattttcttaatttatcatctaattcactgtacttatattttttaggagtctctattccccaggttgcaaatacctcatctgcatgatgatgttcatgatgatgacaatgacatccatgagtctcattattatctttttcatgattatgacaatggcatttatgaactttatcactgtgttgatgcttctcactatgattgcaattgcaactatgtttatctaaattttcattattcattacctctttttcaagagaattgctaccttcaattgcgcttaatatttgttttccactcaattcatcccacggagtagtgataatactagctttattattatacttttttatctctttaacacatatatctaatttttcatccgataatttttgtgaacggctcaaaataatggcacttgcattttcaatttgattcttgaaaaattctccaaaattatccatataagttttatacttaatcgaatccactactgttgcaaaactatttaatgagatattgtcatgttcctttatatttgcaaccgcttctattacatcagataacttgcctaccccagatggttcaattatgatacgatctggtttatatttttctaaagcatctttcaacgcacttttaaaatctccaactaaagagcaacatatgcatcctgaattcatttccttaatttcaatccctgcatttttaagaaaaccaccgtctattcctatttctccaaactcattttcaattaatagaactttctccttttttaattcttcttttataagcttcttgataagtgttgttttccctgctccaaggaaacctgaaattatatccacttttgtcatataaaactcatctccatataattattttctttactataagcaaagtcacctaaacttttcttcatttgttcttgtttatttttatcagcgacttctttacatacttctataagtcttaatagcaatataggttgtaccagttctgcattaatgtgaaaacctatcccttgaaataaatttaatttcataagtcttaattaactatccacgttataaaaatagactttaaacattaataatttcaatgctaagtctatttttatgataacattttaattaattgaaaaagctaatttttcaataatcttaacaaataattcttctattcatcttttaagcatccatagatttcatccaaattgtatctcattgattccaaataactcttatcatcttctttagattctaatgttaatattggtactacttttgcacctacttcttttgctaaagtttctgaaaccttaggacttgcaagtgattctgaaaaaacagtttttatattactttctttacaaaagctaaccaattcttctaattgtttaggtgttggttcaccttcagcaaataagttttctactgatttctgtgttaacccaaaatctctacataagtatccaaaagcagcatgtcctgttataaagttctttttatttaatgcttcaaacttaggtttgtattcaccatatagactttctaattcacctttgaatttgctatagtttccctcgtaataatctttatttttctcatctaatttcacaagagtattttttatattttcagattgtatttctgcattttttaagcttaaccagctatggggatcaacagcatcttcttcctttctagactccacccctgtgctcgaatctacgacaggtatatttttatctttaattacatcattaaccttatctatccaactttccattccaagtccattataaataaatgcatcacttttagttaatccttcaaggtcttgagccttcggatcatattcatggggttccacgttatttggaaccaagcaagtaacctctgccttatctccagctatttcttctgtaaactcttttaacggatagattgaaactgtaatttttaatttatcatcttttgtgtctttcgtattttcagtcgtagtttttgtattagctccgcaacctattagcataacaccagttaataaagctaaaattcctgaaataattttctttttcatatctgcacctccacatgcatacgatttgcatttgcatttaataatattacacttaacatttaaatatgtcaataaaatctaatatctaatattaattattattattcataaatgtttatatattaaacatttaatactatatactacattttctaacacaaaactattcatacctataatctcatttagtcttattttttaaggatactatgtagtaaattaaaactaaattctatatataataatttgcatcttactattcacaattcttgaaattttctacattgaggaatataatctttgtaaatgcaaatctattgcaacaaggagcctttatatgaaaaataaaatatctatactatctgaatccctgaacctaaataagcatattatggaagaacactttaaaatcaagaaacgatatgaaagtagctctctcactaatgtaaagcatagttataagataactagaagtatacggaatatgtcaaaaaataagcatataaaaaatcataatctaatctataaacatatttttattaaaaatatataactaaaatttatataattcttaccctatataaattttagtttttaatataaaaattgagcataatacttttattaaatgtttcattagaaaccacaataaaagtattatactcatttcagtaagttctatatttaaatatagtttatattaaagttcttctccattactttctattactttcttataccaataaaaactcttttttcttgatctacttaagtctccatttccatcattatctttattaacataaataaatccatatctttttttcatttctccagttgatgcactaactaaatctatacatccccatggagtgtaccctattaaatccactccatcattaactgcttccttcatttcctctatatgttctcttaaataatcaattctataatcatcgttaattgaaccgtctgcttcaactttatctacagcacctaatccattttccacaaccattaaaggaatttgatatctattataaatattatttaatgtccatcttaatcctttagggtcaatttgccatccccaatcacttgctttaagatatggattctttacacctccaagtatatttccagatgttctttctaattctggatctgtgcttgaacagtttgacatataataactaaatgtatagaaatctacacaaccttcctttagaatttgctcatcattttcttccatctttatttctatattattctctctaaaaaatctctttgcaaaaccaggataagctcctcttacttgaacatcagaacataaaaaattattcaaattatctctttcctgagctaaaagtacatcttccggattacatgtataaggatatgttgtcatatatgcaatcatacatcctaccttgaaatctttattaatttcgcgtgccagtttaactgcttttgcacttgcaatgaattggtgatgaagagcttgaaatcttatttgtctactatcatcaatctctttattaaattcaagttcaccacctttattcaataaaattccgccacccataaatgtaccaaatggcattgttaaacaatttatttcgttaaatgtgagccaatattttacgacatctttatatctgttaaatattgtgccgcaatatctaacataacaatcaataacttctctgcttgcccacccattatactttttagttaaaccaaaaggtgtttcatagtgagatattgtaactaatggctcaatgttgtattttcttaattctgcaaaaacatcatcatagaattttaatccttcttcatttggttctaactcatcaccattcggaaaaattctagtccaatttattgacattctaaaagtcttaaatcccatctcagcaaacaatttaatgtcttctttatagtgatgataaaaatctatagcttcatgacttggataatacgttccttcttctaattctggagttattcttcttggcgtagtatgcgtaccacctgtcataacgtctgatgtactaagaccttttccaccttctctatacccaccttcaaattggttagcagctgtagctcctccccataaaaaatcctttggtaatcctcgaaatttattatttagcatttttatccccactttcttcaaagaaatcatttagcaacccttgaaacttattgttcaacattctttattctcatgattttgcaaaatttactacttatttttctctagtttttctattctttcagcaaattgtggtaagtgttttttatgtgcaagtaacatttcatctaataaatctttagcaatttgtccacttggaactaatggatttattgtaaatgcatgaagagctttgttgtagttccctgtaactgctgctgaaattgttgtttcttccattcctttcattatttgaaccatacctcttggcgctggatcaaactttccaaagttaatcggttctggtccatgagacgtgattgtacttgaaacttctactatagagtcatatggaagatcctctaacgcaccattattctttgtgctaactaccatagttgttctcttgtcattgtagattgaagcaattaattcacaggcagcatcactgtagtgagttccacctcttttagttaattgttctggtttatagtcaagctttggatctttatatagttcaaacaattctgcctctgtcctttttacaacctccgctctagtttcaccttttgagtaactttcaagttcctctttcaacatatcatctgtaatatagtaatacctatgatacggacaaggtaatattcccaagtctttaatctgctcataattaaacttgacatctttaatattggcaactcctgcatctttcttttcttctgctaataatgggttatacaatttttcaattacttctgcagttttttcattaccttccttatcccatactctatgccaatggaaatgatttaatccagcaaacttaaagaataattcacttgaaggaactccaagcatctttgcatcatcttctatacagttgattggaacattgcatagtccaacagttctgtcccatccgccatattttatagctgcttcagtcaccattcctgatggatttgtgaagttaacaagccatgcattagggcataactctctcatgtcgtctattatgtctaatattactggaattgttctaaatgctttaaacataccaccagcaccgttagtctcttgtccaattattccatggcttaaaggaattctttcatcctttattcttgcatctaaaagtcctactctaaattgagttgacacaaaatccgcatccttaagggcctctctcctatctaaagttaaattaactttccaatccaaccctgctgccttaaccattctttgagccattgctccaactatttctaacttctcttttccatcttcaatatctacaagccatatttctttaataggcagttcatctttcctttttataaacccttcaattaattcaggagtgtaacttgatcctccaccaatagtaactattttgattttttcttttttcattacttatttcctcccttaatctcgcctcaggcaaattttaaatttaagatattttcctaatctgaaaattccttggatataaaatgtaagagttactttttataaaatacatataagtaatcctttacctaaaagatatcacaccccaacataaaataccttattttttcggatttagtgacacatgctactatttagttatttgtttttttataaaacagtttgtttcataatatagctagtctaactacttactaggaatcaataagcaaaataatgggaatattatacctaaacaaatttcagtaatatttagtataaaacataaaattaatagataataagagttataatgaatttattctcaccatgaattcttttccacaagaaactgatttgaatcaaatttttaatagattattatatcttccatactttaatcaatcttaaaataattataaaaagaaggtgtactatggcaaaacaaatattgttattagataatgttcataaatctataaaaaataaagaaattgttaaaggcattaccttttcaattaatgaaggtgaggttttaggttttcttggaccaaatggtgctggaaaatctaccactttaagaattattgtcggcctttcttcccctactagtggaaaaattttaatcgatggctattcaattactaaggattatgttaaggctatgtctaaagttggatgtattatagaaggtccagatatgtataattatttaagtggtttagaaaatttgaagatgcttgcttctatgaataaaaatgttactaatgaagatataacaagagtaattgaacttgtaggaatgcagaatagaataaatgagaaagtgtctacttattctttgggaatgaagcaaaggttgggacttgcgcaagctcttattcataagccaaagcttcttatattagatgagcctacaaatggacttgatccttcaggaataaatgagtttagacatattattaaagatcttgctaaaaaagaaaatattgccgttctcgtttcgagccatttgatatctgaggttgaattaatgtgtgatactgttgcaataataaaaagtggtactttactaaaatatgcttcagtctctgaacttataagtgataaggaagtttcctttgttctaagtgataattcaaagggaattaaaatattaaaagacaagtggaatattgatagttcactaataaacaatacgataatagcaaaagttgatgtatcaaatattgaaaaaattaattcttcgtttatcgaagaaggaatagcaataaagttcgtaagtataaatcagaaaactttggaggatctgtttttatcacttacagaaagtaactctattgttagttaaggaggtttatatattgctagtattagttaaaaatgaagttaataaaatattatataagcggaaactcctacttattagtgctataatcctaattttagtttcactttttgcatatggccaaaattatcaatatcaaaacactttgaataagtatttaaagacaactactcaaagtggcgatatcccttggcagtcattacaaaagcaacaaatccaggacttaaaaaataggcttaatagacctgatacccctgacgaaagtaagccctcagttaatattcaaattcagcaaaatcagtattatttagataacaacataaatccaattactccaagtgctgcaaaattttcagttaagctaatggaacagtccatatctgtattaatgcctttactaataattctgttggctggagatagcgtatgtggagaattttctgctaaaactataaaagtactgctaacaagagctgttcctcgatggaagatattacttagtaaatatatagcacttctaatcatgttttctatagtaattctagagatggctctattttcaattttaatttctggtttattttttaataactggggatttaacgagcctgtagctacaggttttagctctgcttccggaaccttagatgtttccaatgtaatcaaagtaaccgaattgcaatatttaattctcgtatactctcttggatggtttgtatcaattgttatcggtacaatttcatttatgatttcagttttagtaagaaatacagctacttccataggtataatgatggctacattagttggtggaggctttcttagattgtttctaaatgattggccttcaataaagtacttttttgccatcaatctaaacttacctcagtatcttacaggatcatatactccaataagtggaatgtcattaagttttagcactttagtacttctagcttggtccataggcgcatttattgttagtttggttgtatttttaaaacaagatgtattagtttaaaaaggagggatttaaaatgtttaaaaatataagatggaaatttattttattactatccatagtttctaccataaccttagttatgggatttatatcagcattatcaataagttctcgccctcctaaagagatatcaaataaggaatctgaacaacctaaaagtgaagaattggatcaaaattattacaacatattagttcttggtgactcccttgctaaaggaactggagatgaaaaaggacttggcttttcaggctatttttcagaatactggaaaactaaagtttcaaaggagattaaaataaataatcttgccataaacggagatatatctaacgggcttttaaatgtagttcaagagtcacataccttagctgacattaaaggatcaaacatgatatttatatctataggtggcaatgaaataagtaaacttaaaaatacagatataagctcatccactactaagataaaagatattcaagatacctatttagctaatctaaaatctatttttaatataataagaaccaataatcaatcatctatggtagttttcattggcttgtataacccatttggaaaagatcttacatctgataaggtaagcatattaaatgaatggaactatcaaagtcagcagcttttatcattagattcaaatgcgatttttattccaacatatgatcttttcaaatacaacttacaagattatctagctgctgataattttcatccaaatagcactggttatcaagctatttctaacagaataattgaatctttaaaaaattataaataatatactataataaagctgcccagtctgataaatattttctgactagagcagcttcataacatactataaaaatttatgctagcttgatatcaacttctaaaggagatattccaacaagctgaatgcttctactatctggttgtgatataccaacaaataatttgaaccctttgctatctaatattctttctccatcatcatttaccacttcaaatgatgatttcttgattttcatttttacaatcttgctttctcctatttttaacccaacacgtttaaatcctgctagactatgattcctaacagcatgtttagattcaagatcttttatataacattgtacaatttcttctatgtcaaaatttcctgtgttagttatctttacgcttacctctacatcatcaaaatcactttctacatctggtacatgcaattctgataattttacagtagaataagttaatccataaccaaatggatataagctttcacaagacatatagcgatatgtcctatctttcattgaataatctataaattctggtagatccttagtatttctataaaatgtaataggtaactttccacttggtgaacactttccaaatattaagtcagctacagctctgccacctctgcttccaggataccaagcatctaatatagctgaacacttatcctctgcattattaaatgtcaatgcacttcctgcaccaataactaatataacaggtgtacctgtttctattattttctctaataattcttgctgccttcctggtaaatttaagcttgctttatcaccagctccttcactattacctgcatctccttgctcaccttcaattgtagaatctagcccaaggcatagaattgcaacatcggatctttctgctattgatattgcttcttttaatctgtcattaggttctgctagttcttcaactctgtctctaaataaatgacaaccttcggaataatatactcttacatcttctcctacggcttcatgtattccctccaacacagttatatatctagatgcagttcctgaataattacctttaagcatgatctgactatcagcattagggccaataacagcaattgattttaagttatctttatttaatggtaatattccattattctttaataaaaccattgaatttctagctgcttttaatgataattcattatgttctttgcaatcatttaactcatatggtattttgttatattcacactcttcatcaaacattcccaatcttattcttgttgccattaatctttctgttgctgttgttatatcttcttctgttaccaatccctctttgtatgcaagtagtaactgaagatacacattaccacagtttagatcacatccatttttcatagctaatgctgctgattctgttgcagtgcttgtcactctatgatgcaagtggaaatcagcaattgcccaacaatcggatactacatgacctttaaagttccattttcctcttaatatgtctcttaataaagttttacttccacaacaaggctcaccatttgtacggttatacgcccccattactgcctctacatcaccttctttgacacaagcttcaaaagcagggaggtaagtctcatataaatcctttttacttacaactgcatcaaattcatgccttaatccttctggtccactatgcactgcaaaatgttttgcacatgctgccgcttttaaatatttgccttctccttgtagtccttttacaaaggccactcctaatctagatgttaaatatggatcttcaccataggtttcatgaccacgaccccatctaggatctctaaaaatattaacatttggtgaccaaaaagttattcccttatagatgtctctatcatctttttggctgctttcattatactttgctctgccttctgttgcgataacttttgcaatgtcattcaataactcatcatcaaacatagcagctaatcctatagcttgtggaaatactgttgctgtacctgctctggctactccatgcaatccctcattccaccaattatatctaggtatatttaatctttttacagctgatgatttataagttaattgttctgctttttcttctagcgtcattttccctactaattcttttgctttttctaacgcatattcatgagtaattcttttttcttcgaccatattacacatctcctaaaataatcataatatttattctaatttttttaattataagactaaacaactaatgtattaaaagaatgaggctgaatattaaagctataatcttcaccattaacactaaatgtgacttcttgtgattcatcaaatggatttaataattctaatacaacacttccgtctggattctcaaaagccagagcatttcctgcaaagtccccttttaaacctttcatttttgctccttgttttatatattttgaaaaatgtctcattagataatactctggattatatttgacatcattatcttttgtcactgtaataagtgaattttgtttccatccccaagtgcttattccctcttcttcaagtaccatattccaataggtataggcgcttactccatttataaagtatgtccacattaaattgaatacatattcagcatattcccagctattttttccttctccacattcattttccgtctgtatcaatttcatttctggataagcaattcttgtctgcagcaaagcatgctttcctccccattgatatccaacgccatttatatatctttttgcatctttatcacttagtacagtgttagcaaaattattatattgaccaaattgccaattttcatctccataatcatcataaggagaatttaatgttccaagccatatctcagtatatagtttattctcttcaaataatggcccgatgtattcttttataaaatcacgtaattgttttcctgaccaaacacatgatggaaacttctgatctgctataggttcattttgtatgtgtacctgattaattttaataccctctttttggtattcttcaataaatttcttaaagtaaagagcatatgcttttagatttttctcctcccatattaatgttccgaaattgtatacttccgggaacttcatccaagttggcgggctccatggagaagcaaataaattaagctccccactatatttttctgcttctttaatatacggaatcaagcattctttatctctttcaatgctaaaattcttcatttcataatcgcccttagtttcatttagactgtaccagctttctgcataatcatttgctccaattggcaatctacaataagtaaaattacactcctctggatcaaatagatttctaagcacctcttctttcttatcatttggaatcttttttaatgctatatatcctaactcattaaaacatccaccaaatccatcaatagtttgataagattctccatttaactctaatgtatggtatgatttatctttactaatatctatagtactacttactaagctatcagtccttgttgttgaaatcaaagttgctttcctcattataacttccccctttttctctaaattcagttggtgacattcctgtctgttttttaaaagctaaagaaaaataatttgtatccttatatcccactaaagttgctattttacctgttttcatactagtcgtttctaataaggatttagccttctgtattcgtttacgtataatgtagttattacagccttctcctgtactatgtttaaacagctttgaaaaataggttggagttaaataaagcatttcggctatactatatactgaaatatcttcatttaaatgatcattgatatattgttttgcttttcttataatttcatggctttctccaatatcagtctgaagtatttgtattatgaaatctcgtgtgattctcaaagcatcacttctactacaattttttaatgaaattagtaaagaatttaacttattatctgatatatctcctttttccattgcataggaaaaatatattcctccaccaatatcaaaacatgttttcttaactaatgatgtcgataaattataaaactctatagcctctgaataggcctcataaatgctcattactttctcaaggtcatctatattatctatcatattcttcttaaattcctgaactctctcgttaaatagagtcaaacgcatttctctaggttctttcgttatgattttcccatatgtgctcttattatttaataaaacacatgcgtcgttatatgaaatattgatcttattaaatcctcctacaacgcttccaagaattactttaggattaatatcatactcatttttcaaatactcaattaaatgttgtactcttaatgttacttcttctaactcttctcttataaatatggcaattactatatttttatttttgtcctcaaatgtaatcccttgtttcttagaatcaaataattcaatgcaaatatttttaatagataaatttaataattcaaaatgttgtttccaagctaaattatcatctataattggacataccaaagcaatttgaagcatctcttccttctcgtaagaatactccctcaatacttttttaaattcacttgttttcactcgttcataaagtaaattttgcataatctgttcaagctttaattgttctgttacaccttgtatcctgctatttatcttttgctcatggcttaaagttttctcatgctctaaatcctctattaatcttccgatagcattctcaagttctatctcatccactggttttaggagataatcctccacctgcatcttgcagcatttttgagcatattcaaaattatcatatcctgttaaaacaataatttttaacctaggatttagataattcatcttttctactaaagataatccattcatctcagtcatacatatatctgtaatcatgatatcaaatgcttcttcttccatgatttttaaagcttcaattcctgaggatgccattttaacagtatctatcttaagtttctcccaaggaatcacactacatattccttttctaatcatttcctcatcatctacaactatagctttatacattaattattctctcctttaggtaatataatatctaccgtagttccaccatgttcatttttcttgtagtataatccatacccactaccaaataatatttcaattcgcttatgaacattccttaagccatatccagttttctcatcaaatactgatatagagctatttatttcatcaatttgttcttgtctcattccaactccattatcagcaactgatataactatcttgttatttatttctcttgcggtaactaatatcttacctttatacccatctttgacccttattccatgataaatggaattttctattaaaggttgaagtgtaagcttgggtattagtacatttttgaaattctcatctacatttatttcacactcagcaattccactatatctcatattttgtatgatcaaataattttctacattttctagttcttgcgaaataggaataacatcttttcctctacttagacataatctataataattagctaacgcttttaccatttttgatacatctttatttccatcggataaagcctgccaatgtatacactctagtgtgttatataaaaaatgtggtttaatttgagattgcagtctgtttaattcgatttgcttaatctcagattgctctttttttatcctatacataagtatattaatttcttcaatcatgatattgaagccacttgctagttgcctaaaatctttgccatcataatcatgttccattctaacttccagatttcccatagaaacttctctcatctttcttacaatgtcatccatcggcttatataagttattgcttaatttatagcaagctatactaattaatactccggcacctattactaaagctattattaaaattattactgcattggtatcccttaacattgaccttgtgggtatctccccgacaatataccagtcccaattatcaagcttctcataaataaccatcttatcttcaactttttgctggccactctttccttgtaatacgcttttataaggactttctgttccaatcagagatttatcctcattagatataataactccatctttatctgttaaatatgtttgtacttttaaccctttatccaaattagagtaaaattcttttatacttttttctccaattcctattactaaaaatccagtatatttattaaaattgtatttatcattgatcggttgatatatatttagtacatactgatctggataaaatacttttttcttcatgcttatcttacagttaccaaactttgtgcctacagcatcttgatagtcttttaaagtttgagtcctgaaatcgctgcttgtccaagactctccaacatatattaactctggaccatcaaatttcaccaatccaatataatcaatataactgtttgtatttaagaggtatcttactgacgaatatgcatcacttgtatctttgttataattctttgaagtcagcctattattcattaagaattctttaactctactgtctcctgtgatcatatttgatgtctcaataatattttttaatgttatatttaaaatatccgttattgtttcaaactgtccttgcactaatccactggatttttcagtaatttgttttcctgctaattgataaacagcaaaaattacaaaactattagtaattaagactgccaatataaaaaatgtagtaatcttctgattaaatttcattttagatagcttatttataacttttctcaattccttatacatacctgtatccctttttataattcttatacataagaattaatacctaccataagtatattattaacctttgacagctcctgccatcataccctttattaatttatcttgtccaaaaataaatgctatgatcattggtaacatagaaatagttaataccgacataatcattggaacattcattgtatattgaccttgatattcccaaatagcaagtggtaatgttctattaggtaatgtttgagttaaaactaatgcaaaactgaattcattccatatagcaacaccattataaattgctaaagttgctagtcctggcttcactaatggaagcataacatttgaaaaaattttatatttattgcacccatctatctcagctgcttcttctaattccctaggaattgcctgcataaatgtaaccaatataaatactgaaattggtaaattaaaagccacatatggacctattaatgcccaaggactatcatacaaccccatcttagtagtcatcaaaaatattggaagtaatgttacgtgaactggcactgacatacatgctactattatagcatatattggcttatttaacttaaatttgaatctagataatggataagatgcacatgcacttaagaatagtaaaattactagcgaaactataagtactaatatactgtttttaaagtaaataaatatgtttcctttgaatacgtcaatgaaattctttaaatataaactttttggtaaatcgaatacacttcccataagcatctcaaattgctgtttgaatcctgctaataacataaatataaaaggaactattgtaattaaaagccatgctattgctagtattccaacgatagcttttatagataatttttttattaatgaattctgcttcataatagtcaatcttcctttctatttaatgttttgattgtgattaatgatattattgttataagaataaacatccctgaagcaattgctgagccataccccattctttgagataaaaacgcattcttatacatataagttgccataagttctgatgcgttacctggtcctccacctgtcataacatatatgagatcaaaatattttaatgatccaaccattgataatacaattgcacttttaatagctggtttcataagtggaagtgctattttccaaaaatactgacttttttttgctccatcaattattgctgcttcatataaatctgatggtattccactatatgcagccaaaaaatacaccatatagaagggaataaattgccagcaaatagctattgtgattgttaatagtgctgtcttagggttacctaataagtccactgaatgcccacctaataactttgatattcctgatactataccagaatttgcatctaatgcatacttaaataaataaccaattgcaacagatgacattaacattggtataaaccaaattactttaaatatattaaattttttcccaccaaaatctaaaaatgttgcaagagcaagacctattggtaattggacagctatagatagaaccataataacaatattatttagaaacgcttttctaaaaatttggtcagcaataagttctttccagttatttaatcctacaaataccttatttgatgcaaatccattccaattatagcaacttaaattaaaagagtagacaattggatatgctatatatattattaagaataaaaatgctggcacaagaaatataattgctgcatttctcgttgacacggcacgtcttttagctaaactattagtttgtgattgcactttttctctctcctttatataattattgagctgttacaaaattaattccaccgcataagttcaacttcttcatttgacttataatataaacatatttacatctctgatatatcatatttgtactcctttttcagaaatcataaatgctttgcacattctcattcaaagataagctataactcaaatctaaatttgcaattgtttatatataatagaatttttattttgcaacagcttttacattattttttaatgctgctataattatttattttttgccttatatgaatccatagcagattgtagttccttatctgcatcttgtggagtcttagttagcccaaatatttcttggcaagttgatttgtgtacttctgcaacttctgctggtaagtattggtcataccataattgaactccttttgcttggttaactgtgtctaagattttttgtgttaatgcatcgtctggtttgaaatctttaagtggaataatcttacctaatttcttacgatcttgtaatgcttgatcatctaataaagattgaattaatttaaaagcaccttctttatctttacatgtttctgaaattgaatataagttatctccaactgttcctgcacaaagtgattgatcttcttttgaaccgtctaatgctgggaatgggaagaatcctaatttactcataaagtctggattttcaccaagtactgtacctgtgaaccatgatcccattaaatccatagctgcatcacctttgtataatgcttgtctagcttgaccactatcatcatccataccattgaatccatctataaagtaaccttttttaacccaatcttgaattttgcttccagcaaattcaaatgcagggttttcaaattttccttttcctgatgctgcatctgcgaatgcatttaacccaccaaaacgagttgctaagtacatataatacatagatcctgtccattttgtagcattagctaaagcaaatggtgctactccgtttgcttttaacttatcacatgcagcttctaattcagaaatagtttttggctcttgtattccatatttagcaaaaacatctttgttatagaagaaacctgctacggatacgttttcaactggaacggcataaatttttccattgtatgaacattgattaattccagcatctataaatttatctttgtagttatctttgttcatgaattctgtaagatcagcaattttatttgaatttacataatcaattaatcctgatcctccccattgaataaatacatctggagtctgatttgaactcattgccatagataatttctgtttgtaggaatcattaacctgatcaacaacttctacgtcatattgtgggttagcttccataaaccttttaactgatgccttaattgcatctgctgctgttgatgtttggatatgccataatgtcaattttgtctttcctgaagcagatccaccgcttgtctgtgaagtgctatttccgcagccaatcattgatgcagaaaccatggttactgtcattatgattgatgctatccttttcaaattcttattcatatacctttctaccccctagaattttcatatatttgatatacttatatattagcattgataacgtttaataaaaattgaataatttgtcttttagatataattttatatcctattgtaatttttctttattaaacgcataaataacctccattttaaatagttctctaaaatactatctaaataatgaaggcatttatatttttattcatatattaaatttttataaattgaggctgaaagctggaggggaacctgccttcagcctttgaaatatattatctcaaaaacaaggatagataaaaaaactgccaagaatatttatctataaccctttgattctggtaaatatccaatactatttgaaaggattttcagttttataaagcataccttttggttgattgaatccaacttctttaacacctaaatatctaaataagttgtaaactgcttttccgaagtgtccaaatgcaactgctccatgatgaggatatcttccttctactaatacgtgacgatagaatcttcccatttcaggaattgcaaatactcctatagctccaaatgaacgagttgcaactggtaatacttcaccttctgctacataagctgtaagttctgcatctgcattactttgtaatctgaagaatgtaatgtctcctggtactatgtctccttcaagtgttcctctagttatatttggttcttgatttggttcaagagctcttgccataatcatttggtttttcattgttccacatgttaatttacaagctgctgtattaccacaatggaatgccataaatgtatcatttaatgaatagttaaatttccctttaacttctgactcatacatatcagctggaactgtattgtttatatcaagtaatgttacaacatcttggcttatgcaagttccgatgtattcacttaatgcaccataaatatcaacttcacatgatactgggattcccatagctgttaagcggctgtttacataacatggtacaaatccgaattgtgtttggaatgaaggccagcatttatttgcaaatacaatgtattctcttgaacctttatgttcttccatccagtctaataatgtaatttcatattgagcaagctttggtaagataccaggcattttatttccttcacctaattctttttccatgctagctataacgtctggaattcttggatcatctttatgatcattaaatgcagcaaataaatctagttctgagttttcttctatttcaacacctaaattgtataattgtttaataggtgcattacaagctaagaaatcttgaggtcttggaccaaaagaaattatttttaagttctttaatcctaataatgcagtagcaactggcacaaattcagaaatcattcctgcaacttctggagctgttcctactggatattctggaatgtatgctttaatgtttcttagagctaaattgtagcttgcatttaacattccgcaatatgcatctccacgtccgcctattaaattatctccgctctcttctgaagcagctgcaaacataactggtccatcaaattctttagcaagtaaagtttctgaagtttcaggaccaaagtttcctaaatatacaactaatgcatttactccagcttctttaacttcagctaaagcttttctcatatctttttcattttcaacagttgtttgacattcaaaaatttctccattaaaagcttctactactgcttttcttctattttctgataattccattgggaaacaatctctacttactgcaacaattcctaattttacttgtggtatattattcatttttaactcctccattttttatgaattttaaattcttataatcagatcttgacaaattttacgaagtatattatttgatattttaatgctacaaattagatttattaagttagatattaattaatatcctattcctaaataattgaatctagctattattttacatagcctgtccgagttttaaatttagctttagtacttgttaatgtttcactttaaatatattttaaaataactttttaaatgttgtttgataagtctataataaagcttttatattaattagtcaatacctttttgtatacattttcataattaatttttctaatagttatatactgtaaaatgcataaatttttatctatttattcaattgctgtaatatgtaaactttgatataataatatatgttaatgttttcactttgaatttagtaggagtgattcggtatgaataaaattaaaaaagcttttaataaagataaacaatccttcataagtaaatcattcaaattaaaagaaaaattcaaaaactattctataagtaaaaaaatagatacaacctttaattttatacttatatttacattattgagtatggttatatctataggtgtactactatcattatctgctagaactttttctctatataatggtccttatcatatttctcaagcattatccgatattaggcttgcatttcaggtttctgatacaaatatttctagagctgtaatagaaaatagtcctaaaaataaggaagactttataagaaattccgatgaagcccttgaagagctcactagtaagatagatttattgaagcaaaatacaagtgataaatctgccatagatcaacttactaaaaatttaagtattgctgatacctatagaaaagaactatgcaattctatcaaaaataatgatcctaaaagtacaataacttctaagttggatacatatagctttcaaatagatattgtcgaaaattatatttctcaattatacgaatcttctaaaggaaatgcacaaacatttgtaaatgaatccattttttacaggaatttggctaccgtaattcttgttttaataattatatttttaatactcattccaagatttctaggtaaaactttaaaatcttctatatttgaaggaataaataatgtaaaaaaagtttctacaaatttatcaaatggaatattaaacatagacaatgaatattcttcaaaagatgaaatgggtgatatgttcaatgatttgaagaaatctatagatatgctaaaattatatattaaagatataacatatacattagaggaattatcaaatagaaatttaaatattaacaaaatggaatccgttcattacattggggattttgcgccaatacaaaaatctttagatgaaattatagctaacttaaattctagctttttagatatagataaatcaattgattttactgcaaatagcgcgaaagaaatttcttcaattacaaaagtactttccgaaggagcttctaatcaagctagcgcagtgcaagaacttcagggaaactttaatataatacttgatcaagtaaaaaagaatacaaataactctgaaaaagcttataattattacaatgaaacaacaaagattgttgctgatggaaataataaaatgaaacaattaatggaatctataaacgagattgctactgcttccaatgaaatctcagcaattataaatacaattcagtcaatatctgaacaaactaacttattagctttaaatgcagctatagaagctgccagagcaggcgatgctggaaagggtttcgccgttgttgctgatgaggtacgaaaattagctgaacaatcctctaattctgttaaaaatattactcaaataataaagaactcattaaacactgtatctaaaggcgaattgatagcaaatgaaactagtatagccttaaatagcattgtcgaaaatgttgaatatacttcagagttagtaaaggaaatagctactgcttctgaagaacaaacaagtgcaatatcaaaaatgactttaaaagtggatattatatcagatattgttcaaactaacctagcaacagcagaggaaacatcagcatctattgaagaattagcatctcactcacaaattatgcatgagcaaatttctgaattcaaattgcaacattaatataaataagcctccatataaatagtctttaaaaataactattttgtatggaggctatttactatagcaaaagtaataataatttagctttaattaaattacgactactaattttaaaaaattttctttatttaatctatatcaaatttcaattttatgcattttgtgctgcctgttcatttttaaagtttaaagcatcttgtttcttaaagaatgggtaataaataacaaatgatactgccataattactaattgcaataacgccattttccatccacctaagataagtcctgctattattggtggtgttgtccatggaactaatactccagtaaataatggaactaaccctgtatacatcgcaaaataagtaattaaccctgtaaccattggagtaagtataaatggtattgccataaatggattcattactattggtgttccaaatgaaactggttcatttatattgaaaaatcctggtactatagctaatttacctaattctttgctttgtgctgattttgcaaacaataacatacatattacaagtcctattgttacacctgaacctgtcataccaatcatattatctagaaattgttgtgttactatatgaccgccattagctactgtaagtgcttttccactattaactatagcttggttttccattgcatttgatgttaatattcctgtcattataccacttataattgatgatccatgtactccaaaccaccataaaaatgggattataaatgtcataacaataactccacctagagaatctgtcattccttgtaatggtgtttgaattaacttatatattagttctataaatgttgtattcattccatacttaagaatactataaagtattgttgctccaagtactataactgctgctggtattaatgatgcaaatgagtttgcaaccccttgtggcacaccagctggcattttaattgtaatcttctttttcatgaaccatgaataaattgcgcctacaactaaaccaataataattgctgtaaccattccttttccaccagcaaattctttactaataacatcgcttactttttctccacccttagtcatcacataagaattagttgttaataaaaatactacaaatgatattattcctgcagatagaggttcatgtccctcgtttttcgcatatgtatatgctatacctattgctgcaataaatgcaattattgaaaatgtagctccataagcttgaaataatggttctgtccaacctggtccaagctgactagccatccaatcgttaaatggctgatatggtatttgtgcaagtaataaaaatactgatcctaccataataaaaggtaatgtaaataaaataccgtcttttaatgctataacaccttttaggttaacaaacttcataactactggtataaccttttcatttagggtatttccaattgacataatgattcctccttaattaaatataatatgatagtcagaatatataataataaatatgttaggcttaatattatcttttatattaaagttacaaccttccatatagcctgctaatatcttaaatgattatatataactttgtacaataattcagttttatattacatttttctatataaattcagttcttatttattagctaaatttagtgcaaattctagcacttttgctccattcatcattccataatcaaccattggtattacatccactggaattccaagcggttcacatattttttttgcttttcctaatgtatatccaacttgtggccctagtagcgcaacgtttacattatctatatgtttatccatttgtccttctggaaaagcttctatatctacttctacacctttgaccttagctgcatccttcattttactaactaaaagacttgttgacattcctgctgcgcaaaataatctaattttcatcatagttgattcctccttaaatatatatagtttattaaaatatgaattatagttgttgatcaattaaatttatatctcttttattgttttactaatgtatttataattttccttaattccattatttgttcaattaaattcttttcagttattgctgtcattaaatgatcttgtgcatgtacaaataaaaccgatatatcaactttttctccattagcttctttatgaagaaacattgtctgaccttcatgagctttagctaatgcatcatttgctaattgcatttctttttcagcttcctcataatttccttcgtttacattattaagagccatataagcgtgattcttgcagtctccagcgtttattataatattcatgattgctaattctaattcttccatcttgctctctccttttaatactttttgtttttgtactttatattaattttgttttgtttctcttatgcttatatataaagcaataaccgtgccaagtttatgatgcagaaataaaaatgtcgttatgagttcaatcgtagcatttatccacttttgaagataataaaacacttaaaaaacaattattatgtgttttactttttcgcaaattttttaaaacaaatggccaatgtgttttattttgtgcatttattatatgttttatacccaatttttttagctattatagattcaagaaaatattttgcactaaattataaaacttggtctataaatttaaacaaaaaaaatataaatatctataaagtaagattactaattatcctacagaatagatatttatatatttcttattttttcatgattcatttattaaatgttattactatcaaagaatgtcatcaagtaacatatttcatcatctgaaacattaattgaatactttgtatttataggtgcacatgcatttttcacaattttatatagatttaaattattttttatataatcctttttcccttcaaattctacggtaattttaccttccttatatctatctattacacacgccatatgaagtgttattccaattagaatattaatctttatattaacctttaattcttcagtaacagttctattgaatttctttatactctttagtaccattattccatcaacattttttaaatcacgctctaaagtttcctccatttttatatatgtttcttctgcatcaataaggttttgtatatccttagcacaatctccatctataatatcatctagcgaaaactgcggactatttacatctaactcaaaaggtccgacaaaacaaataatttcgtatttatttcttaatttttctattctttcatatacattttctttgcctataaaatttataggcacaatttctattaccttattatcaaaagctagatttcgttccaatatccccttaatagttttagctccaccttcaccagttgtacatactgttactattgctaatcttttatctttttcgttttccttataatctatatctgcaacattatcatcatataaactattaacatctagtgtttctctatatatttcgtctaaagaatatcccatcatagattttcttgttgcttctaatgcatgcaaagtgctgactaatggtatcgttctggtttttatatcaaatatgttttctacttcttttccaaaagtcgtaagtgatcccatatccactaaaaataatatatccgatttaattttttgttctctaatgtatcctatagttttctctaatatcttctcaggtttttcttctatgggtgcattaatacccacagtattttctgttccaagcagactattaactgcctcagccattgatgtcgcagtactaatgccgtgggcgattattattatctttacatcattttgtgtatatcttaagtttctataattataacttaagaacatagctataaacccggcttcatcaattggcatacttatatcaattgatctctctatcatcttcaaagcatctaaagctacactaaattcttttttattttcctctctaatactgcttaatttaggattaacaatttttttatttctccttattctatctattgaattactaatatgaactgctaacccataacttatttttttgtctagctttattcctagttcttcttcacagaataaaataatctcctcgattatatccataacatctttctctacgatgttttttatattggtcatatcaactttagtactaaaatcattaatatattttttaaaatagtcttcaatatctttctctatttcttcctctagatgttctccttttattccctttgctttaagttcatttgtccttaaatctaacatctcatagatattgctatcattagtaccttcttcaaatatctccctatcttcatccttatcaaatattagatacctcttatttatatcaatcaatttgttccataactgtctatgttctatctctttatataaaccttcccttatatatagtggtaaatctatactatttacctttattacatcttttctatttgatagaaaatcagcatatgctttagcacaagctaattgtatatcagatcttaactgccctacattgttctcacaattatatgataaaaaagcttttattgagtttactgacaccttaatactttttccaagtcttcctgactcttcaatcataaattgttttattagattgaatcgttcttccattcctctattctttaatgatggtattgttataaccataggaattcttcgagtaaatgtctttagcaatgtagtatttggatcctctgtagtagccgttattataagaacacttgcacttctttcactttctgtttctccaagccttctatatacccctctatccataaatgtaaagaacatctcttgcccttctgccggcaatctatgaacctcatcaagaaataaaattcctccattagctttctctagcaaaccaaccttgtcaaaatccgccccagtataagcacctttttttactccgaataattgcccaagtaataactgaggattatttgcataatctgcacaattaaatgttataaaaggactatctttaggtttcacattcatttcaatggcatatttatagattagtcctgcaaaggtcgatttaccaactcctgtttccccaagtaataatatattcattccatttggcggatacaatattgcggtttttgcttgctctactgctgaatatagactagggttagcttccgaaaacttatttatgactgataaatttgaggtaacgttttcctcatctattgcaataaatagtgtcggctttccctttatctttactgctttcccatcacttactaatttatttaaatcattgcttacatttgctctgctaaggtttaactcctccgcaatttctaatgcagaaattccgtttggaaacaaatcttttatttctcttaactttgcaagaattaattcaattcttttcatctcattaatcccccctattaacttaaaatatttttgcatacactacttaacttaaaatatataaagcgagactctatacatagtaatataataacatactatttattagcctcgcctgctttatcaatgacaataataatatttgtttgtaatagtccaattacaaattatcttatagcctttttactttattgtaaatacctaccttaagcaattaaattaagctcatacatttacataaaatgaacataatttgattagcgtttatcttcactctcctactaatccgctttccctcatcctattaacaaatttttctgacttcttattcatcttttcttttaaaaatacagcaataattattgatatgaaaaaatatatagataaaattccaatattgtaatataaggaactccaaataattccacccactgcctctctcattcctcctatggcatatgtaaaaggaagcattgggcttatattttgaaaaaatttaggtgtaagctgtattggaaaagttcctcctgatgctgaaacttgaagtaccattataattaaagctaaagccttacccacattcccaaatacggataccaaagtgtatataatcattataaaaattatacttacatacatagaaaatattaaaagtattactggacttacagaataagttttaataaaaaacaaattccctaaaacaatgataatagcttggagtagtgaaagcgttccaagagttaggaacctgccaaaaaacatttttgtggttcctaaattcttcacatcatccaatggctctacatggacagatagtatagaaagtaatgtaaatccacctacccatatagcaagagtactgtaaaatggagccatagctgatccataattaggtataggaaataccctattttgaactggctcaattggatttgccagaaaatcacttacatccttagtatttttctgtagaaaacctgtgagttcgttgaatttttcatcattactcaaacttttaaatttttcaacattactgtggatagtctcctcagtttttggaaatttatctttaatatttttaatctgttctgctcctaaatcagtaccaatattagcatcttttagcagactatttattaaaggtatattattttttgcactttctaaaagtgttaatgagttgtttgccatatttgttgtattgttcacaagactatttattgctggcgaaatagcgctgtcaaaattatttattgaatcatcaataagttgtgatgttttatctatcccttgtattagagattctactgcatcggaagaaattttattaccattacttaatgtagttatcaaagcatctaaatttaatttattttgaactaattgatccctaatattttgcattttatttataaaattagatattgcactactatgtaaaatattatttacagattgaagtatatttatatcattattaacagcagatagtgcattattcattttagttgaagctaatcttagaatatcctgctgccccttaacatctgtatcaacggaattattaatactgttaagtgcatctcttgttgcagtagaattagcctttactgtagctaaatctgttctaacatacggagatatattttttattgtgtcattaaccttaataaaaaagtcattactggattgaacagcattttgagcgttgttcagtgaatttgttatattaggtatattcccttgaatattttgtataaagttatttagatctactgccccattataagcattatttattccttcaccaatttgaggtaggttattatctatgtcatttataatattcataagttcttctagctgaggcttaattttctcaagttcaataccataagcattcatataattaagcacagtactacttacttcttctgtaacagaactagttatttcattttgtaaactcgttaatccactttttgttattttaggtgctatagcattaattttttcgttaacagaataaataagtttagcttttttaggttcaccatttgctgcaactgagagaagattacttgaaaaatcttcaggtatagttatactagcataatacttaccatattttactccactttctgcttcatcctcattaacaaaagtccatccaatactttcattaccttttagcttatctattacctctctacctatattaatttctaggttttgaaattgagcgccttcatcattatttactactgctactaaaagtcctttggtgttcccatatggatcccaagaagctattatattaatccatgcatataaagcaggtacgaaaagtaaccctactattataatcatgagaggaatattagttgttatttttcttatatcccttttgtaaattttaaatattgtactcataacttttgcataccttccttcttgaacttaatgttaaggcacaattaaacaatataagtataataatgctaagtttatgttctccattaaagtattaaataattcaaaagtacttttatgattttactacgataactcaacaatagattccaatcaaaaatactactaattattatttctctatctacaaaattatctattcgcaaaaaagctacactaaataattctagtgtagcttttgattttaactattttgaatgtttttggacatgttatctaaatttactttcaacttcctgaaaaatatctttatcatagtaggtaaaaatagtacaaattatgcccggtacaaaaattagacatatgatagaaaccgattttaataaataatacattaaaactaggacaacaattttcaatatggttgttggaaccttttttatcataaaatatagtgataatatcaataaatcttttaatttaatctcaaatctagagtttatagaaaaagcgtatacccctataacaatagatatcgccataagtaaagcaatgactaggtgtatgccaatttgaggcatatttacataaaaatatttaaagtcgataaagaatattgttataacaataagctcagtgagccaaagcctaagattagataagaaattcttcctatacgaattccaaaaagttgaagaaaaatatatatctctttcgcgaattatcttacctatggtactatacaaagctcctaaagatggtcctaatgggattaagcagataaataaaagacataaactaaaattgtcaggggatagtgcagtcaaaattaaaaataatataaggagtatattacaaatacccatataaatactacttagacatagaccaataatataatttgtaattgcgtaaattggtttatcataaaattccttcattgtatttcctcctatttttatacctcatctgctctataatacatagaacttttattctattatttatctacaaagaaactctcttctggtccaaaaaatgaagtaggaagttttccttttgataataccagcttttgcaatactaatcctgcatccaatccatagaatcgaagtgtgtgtaatcccttagttaatttatgaatagtcgtagttatatgaatattttccaaaactgcattgcaccaaatgtcattatcgtaatctccagcaataaaatcctttggaagagcatctgctataattggtgtttcatcatcaaatgctacagtgtattttaatctgctctttttagataaattatttgttggtgaaacgtaggtagttaaagtatattctgcatcttcatttaaccttaatctatattctaaatatggtgcatcttctggtttttcaaatgacacagttgtaggaaacatcttcactgaagacaaagtacgtccgtaatttttaagtactttccattccacattggattttttagctttgcctgctatatgctctgcttcaatagaaaccacatcatgtgcctcaacaaaggtcatactctgtaaaccagcaatatctataacttcggctgtaacgtttatccttactgttttccctgctcctgatatagttatgaaacctcttgatgtctctgatactttattccaatctattgaaacattaatttttattccatcagagacggttccttgtttactatttaattttatccaatcttcacttatttccattttataatcaaattctgttcttcctccattgctgataacaatagagtagttttctttgctcaagtttgtaaaggatggtaaaaccgctgtgccagaacagtatgcttcttcagttccttgtacatctacaatcataatactcccatcttttagtgatatattataaatctctggatatgtccaactatcaggattccattccatatatcctatatgaggagaactcatcattcccttccactttccattagacatattgtcattataataagactgcatttcagtatcctttactttacactcttctaccaattcagtatataaatttgcaagagcactatttcgtttataatacaaattatttaatcctgcatatacctgcattttaataatatttgctgatgctacagcaggataatacaccaactggtaatattcatccttataaacttctggcatctcatcgtaatatttcttagttttgtgttctaaataaattgctttttccagtactctttgtgcttcattataatttatatagctatacgtatcaggaaaagtaacctcaggctttctccatccgctcattttagtatagcttgttaatatactctcaattccatttaatacatcttcgcctccagcatttccaaattgctgcacattccacttctttgtatattccctagtcttatttcttccattagcaccccaagtttcaaaatcataggctaaatctaagaagtatgaaacgggaaattcatttggttttaaatctccaatattcactatccatatatcacgtacaccataatcataagccatagtcatctgttcccatactttttcaagaggagttgtatttatccattcataagaacgtggacctccatgataatcaaaatgataatacattccccagccagccttacgatttcgttctgcttcttctggaagggtacgtacattagcaaaattatcatccgccagcataattgttacatcatctagcacatcccaagttcttaatccctctgccttatctgttccataccaatatttttctacttccttatatatagtaagcacctgaggcgccttctcaagaccttgctcttttaataaacgcttttgagttcttataatatcctttaaaagttcgatgttttcttcttcagaaccttttaatgcagagtcttgctctcctctcatacctatagtgattagactttcaagacccttgttacgcttaagcccatcttcccaaaactttgttatagcagctgcattgctggaaaaatcccatgttggatttgtaccatattgaccattaatattcttccattcttcacctgctctaaacattggctcatgatgagatgtacccattacaataccatatgcatcagcaagctccgcattagctaaggggtagcttttaccattttcactaaatacagcactccacatagctggccacataaagtttccttttaatctcaagatcaactggaataccttatcataaaattcttcattaaaatctccaaatgcattagttacccatgaccctagagatggccattcatcatttaagaaaaagcctctatattttacagatggttctcttgaagtaacatttaactcattttctgaaaagattaattcaggtttctttgctggcataacatctgcaaaataaacccatggacttactccaattaattctgaaatacgataaataccataaattgttcctctcttatcacttcctacgataacaatagctgtattaacaccttcaattggttcttcaacaacttgtatcttaaagcattcatgcttgtcctttactgaagatacatctagtatttctttagtaattaacgaatcaattatttcattatttcctattgagcctgcaataactactgttttctttaattctctgatatctgttactacctttggagtcactccagcaactaaattaacatcttctgcaaaggaatttgcaacaagctttaaacctttataatcttttccttttgaatctatatatagggcagctgcttttcctgctgccgcaattgttacatttttcatacttcttatcttgccccctcatatattgaaaaatctattaatattctttatatttttaatctaaaaatggtgtatatctaacctaatttaaactataatataatcctttgagcttcataagctcttcatgagtcccttcttcagcgattgtattattgtcgatatataaaatcctatcagcatttcttatggtagataacctatgtgccactataaatgctgttttatccttaagaattacgtccattgcctctttaattaaattctctgtctctgtatctatagaacttgttgcttcatctagtataataactgaaggatttttaagaataatacgagcaaagcttatgagttgtttttcccctgctgaaagccctgcaccacgttcctcaagctcttgattaaagccattcttcattttatctatacatctatctgcgaagatagttttagccgccttaatacattcttcatctgttgcatctggtcttccatatcgtatattatctattacagttcctttgaatataaaaggatcctgcatcaatactccaacctctcttcgaagtgactcaagagtaaccgctcttacatcaattccatctatcttaacactacctttatttacctcataaaatcttgtaatagtattaattactgttgttttacccgcccctgtaggtcctactaacgcaatagtttctcctggcttcacatggagattaaagtcctttagaacatctactccatcttcatatgcaaaagttacattatcaaaatcaacctgaccttttacatttttgagttcaattccgctatatttactttcaatctcaacacgataatcaattgtatcaaatacctgctctaagttagaacttacctgcgccaattgttgtataatgatagcaacctgtgtaagaggcccactgaaaaggcccatatagctgatgaaagcgactattgtaccagcatcaatattgctatttccttgaagtatcaaatataatgctgttccatacaaacaaagagtaccaagattccaaaatatttcaacagttggtgtattaagttcatttctcataactatctgcatccacgttctagcactgatatcgtgaacttccatatatattttttcattcatatcaattctattatagttcttaactattttttcacccataattgattccacaagaaacgctgttctatttgaaagccttgctctgtgatatgcaaacagcttccttattgaatacctaagtccgaagacacatatcatcattggaataactgctccaaaaactatagccgtaagctgaggacttattgcaagcatgaatatagtaacaactactatttttactatataaataagaaataacagcaaattgttagtaaaaaagttagctagatcattaatataatcagtaacacgtacaactatctttccatcaggtcttgaatcaaagtagtcaaatgacagttgttgaagtttataaaatatgtccttccttattttcgcaattatgttatgccccgtcttacccataagtctttgatggacaaacgtaattcctatttcaatagctgcgagtaccagaaacccagcaactataagcaccagttccccatactccttagctataacagtatgattaataatatatctgagtaataatggcgctatcattgatactgccgctgaaataagcatcaaaaaacctactagtataaaaatatttttatacggaaagatataccgtataactcttccaaactgcttgatatccaatttcttttctataatttcatcctgaaaatacgtatttctctgtgccatcttatcttcccacctcacctgctgctagagcgtcaaagtcgataactgattttctctgagcttcttgaattttatatacctttgcaaaatgacctccaagcctcataagctcctcaaaggttcctctctctgcaatcataccatctttcatataaattatttcgtcacaatcaatcactgaagacatcctatgggcagaaataagaatagttttatttggataatgttttttaatatctgaaagaagtctcttctctgtatcgacatctagggcacttgttgaatcgtcaagtataagtacaggggaatctttgagaagtgctctagctatagaaaccctctgcttttgtcctcctgagatacccattcccttctctccaacaattgtttcatagcctactggaagctttttaacaaaactgtgtgcttgagcatgttttgctgcttttattactctttccttttcaatttcaggctcagcatatgctatattagaatcaatagtgttagagaaaagaaatacttcttgaaatacatacgaaaagttacttctaatagatttaagtgaatagtctcttatatcgtttccatttatctcgatggctccatcttttaggtcatggatacgcactaaggactctaaaagtacacttttaccgcttcctgttcctcctacaataccaaccttttttccatatggaatatcaaggctgacgcctttaagtacctcatttccctccatggtaaggtatgcattcttgatatagatgttaggtacgctacttatttttaaatttgccttaccatctgttattttagatccgcagttaatgaaattcatcattttttgtcctgaaacaaactgctgctgcatttggaacaaggtgctattgatttgcgatatatgatccattattttaagtacatagttagaacatgcaacaaggtatcctaccatcatataaccttttataacaagaattgtgctgactgtaatggtcccgatataggatatctgcttaattgaactaaatataacttcaaacttagcagataaattaatttgactgatataagaatttttcattttctcgttggacttatcaaattttctcttttcaagctcctcattagtaaaagaacgaaccaaacgtaccgcctcaatattctcctgaacattcaaactcatctcgctattactctttcttatattgctgtaattagcctttgctgcctttttaaaattctgcaatgcaataacaaaaatcggcatcataattaacggaatagcaataaggcttatgttaatacttgataacaaaaatgtacaagtaatgagtacaaatatgctatctagtatattagggatcattctacaaaaaagctccttatacatgatggtatcaaaattcatagtcgttaataattcgccagtgttatacttggaaatagattcactatccaactccatgagtttacgaaaagtaatcactcttaagtccctctccaaattaagaccaagacgttgattagtggtattcttaatataaataagaattatccttgcaagaataaagactataaacacagttgctaaactaaaaaaaagctttattgaatgaacctcaccatattttccattaagtacaaatgaaaataccccattatttgtaggcttattatcacatataacataatcaataaacatttctgaaaatataggaatcattagatctgcaactatagctgcataactgataagctgtataataatagctcctaccaagtttcttttccaatatctaaaaccaaactttaatacttccataaaatcactcttttctttatgaatatgcttcttatttactataatgtttaaatgaagtatggtctctctctgttttatcaatattctctataattgcttttgctttaaatttaacagtaggagcattaatttcgtttgataaattcgcacttcatctctattaatttcttttaatcgagtcttttctaatattcaggcagaaggcttatcgttaataaattttctcaaagttaattgtactttcaccttttaataataattaacatctcttcttaaaatctatcatcgggttttatacgccactattctgataaaatgaatatagttccaatagattttactgcttcacatcaaattgttattttactaaaaacatgtctccttaaaatttaccactaattagaaattaaaaaacctaacaaattatataaaaaacattaataattatactttttcaatcattagtccattctcaactcataaatttatacttaaaaagagctgagcactaattcagcgcaacagctcttttaatttatattggaatctcccaacttctttaagaaaattaaaataatctaattatatccaaagccaagaatagtaaaatatttatcaaaactatcttctgccatctttatttctatcttgtgttccatactactttcctcttggtacaaaataacagcattgcagtgtgtccatcctactgctttgggatctgccgttaaaacaaacttaccatcaacatagacatttgccttaccaaaatccattcttccagaatccttgaatactaatagtaaacttctgctactaactattaaactgaagctttcatttccagattcaggtgtatgcatccaattgtatgggaatacaggtgttgcgaatggattatcatccatttccacatattgaagatcttcatctgtttctttaaaacttccctgttctattactgcactacattcattatccttcttatcaataaggtgcatccctacaaagtagttgcctatagctggctccttatctaatgagacatccttctcatctaaagtgctatttgcagtttgttcaaataagtatgcaagacaatctgccattattgaatgcccgtcacttgtaggatgatagatgtcatagaaaaactgtctcttggtgataatatttccttcttctttagttaatttgaattgttcaactacagcatcagatatacttaccataggcaaatcgtaaagctttccaacaggtgaaagtctttcttgtagattccagtcattagcaaatacactaaataacaaaattactgccgggttattttcacttgaaagtatgttcagtatcaaactctcgtaacatatacctcttgtctcatcaccttcatcatttactgcaaattcaacaactacaatgtctggcttcacctttccgtctctaagaacatctctatcatatcttatcaaccctagctcagaaggtgtcccacctacccctgcctttataaaattaatgttaccgccttcattgcttccaaaaagctctttaaatttcacataggatttataagcataacatgctgtattaattggtttggctccagctccttgagtgatagacccaccaatatatgcaatagttatatcttctcctcttttcaccttatctatagctgctttaagcctcctgttattaccaatacttaaaagggattttgaaatcattgaattatacttatcacttttaaattccactggtggatctatttcgatttccggtaccttataaccttcattcaaataaacttttactgttgcctctgctattagtcctggtttttcaaattcaaaggctattttccctactacatcatcatcctttgaccactcgtaatcttcaaccttaagcattacctcagatccatccttcttacaaggcagtttaatttgagttccacctccatatctgtccacttttccatagttatgaaatacaaaatcaatatttcctacatcttcagatgcttttacagacactccaatgctgtgaaccagtttattaaatccattatattgatttaataatgttagaatatttttatcctcaactccccccacaaattgagcattaaaggctagtcttccttcgtccaaataaatttcctgtgaaggttttccatctaatcgcgcggtagcctctataatcttatctatcattatataaaaaccactacgctttttttgtggatctttgggagctttaggccctgactgtgaattattaatcatatttttctatccctcctcttgagataatgtaaaacagactggaaattttctcagtagtgtgttattgtgttttagtttacgtttacaataaaaagtataattatgatacatcataatattaaaaataatctatacttatgtggtcacactacataagtatatttcactaaattaattctaaaaccatcttactaaaatcactgtcaatttaaaacctataaaattatagattttatccaagtttttatatataattgattttccctactaaccatcacccttctttcacttctaaattaatttctttcattacgaaattggtatggtgtaagctgtgtattttttttaaagcacttactaaaataattaccacaagaaaatccacattttaaagctatttcatttatagacaactctgtgttgtgaagcaatttcattgcatgttgcatcctaatatttgtaagatattttagtggatttactcctgtttccttagtaaattctctagtgaagtgactaagagaaattcctaatccatcagctaatgtgttaattccttcaagttttgaaaactcattttccattctttctatagctatccttgttctcatagaataatcatcttgattataagcaactttactacataacaagcataaaaaatgaaaaactgtttcacttcctacaaatggctgaatatgcattccattccttaagttttcatgaaactttaataaatactgtattacgctactattttcagaaagtgttataatctttcctgtcttgttcactatcttatcataatagggctttacagcaatcccttcaaaatgaatatataatatttgccatccatcctcatctaaatcatctggacagtaatatttttcgtcatctggaatttctacaaaaaatgcttgtcctgcctcaatattatatttttcatctcctgtttcaaaaattccataaccctttaaagtatattgaaacaaatatccctttatatccctaagattattatcaaaataataatcagaagtattcctcttttcaattcccatatccttcaattcaaatggcggatttggaatttcatcaaaaaatacaaaaccataagatccaaatttatatgacatcaaaaattcacctcttttatcattttatcactcttgcagcttcaagaaatgctgtaataaacttaatataaagtatcatattaatataaaaatgtacagtatgattacatcaaaaaaatactttattcatacaagaatttaataggatgcttaagttaatttctaaatttttcatagaaaggatttttattatgctattaaaaaacaattttgcaaaaactccgccaatgggttggaatagttatgattattatgatactacagtaaatgaagccgaagtaaaagctaatgcagaatatatggcaaaatatttaaaacctcatggttatgactatgtcgttgttgatattcaatggtctgatcctgatgcaggcactgatagaacaaactaccaatatattaattttagccattttaatatggatgagtattctaggcagcttcctactgaaaacagatttccatcttctaaaaatggtgctggtttccgtcctcttgcagactatatccatagcttaggtttaaaattcggtattcatattatgagaggtattcctagatatgctgctcatacacatatgaaaattaaaggtactgatataactgctgataaaattgcaaacccttattctgtgtgtaaatggaatcctgatatgtatggagttgattaccataagcctggtgctcaagaatactataattccatttttgaactatatgcgcagtggggtgttgattttgtaaaggtcgatgatatatgcaacactaatttctatatagataatccatattcagctgaaaaagaaatcgaaatgattcataaggctatcttaaattctggaagagatatggttttaagtctttctccaggaccagctgttatagaaaaggcttggcatttaaaaaattatgcaaatatgtggcgtattactgatgacttctgggataattgggacttgttaaaagatatgtttaggcgttgtgagatttggcaaaaccatgtatcaactggctgctatcctgactgcgatatgattccagttgggtggttaggtaaaggctttggtcatgagcgctatactaattttacaatcgatgaacagattacattaatgaccctttggtccatattccgttcccctctaatgattggagctgaattgaccaaattagattcgcaaactttagaacttttgataaatgatgaagtgctccatttaatagcaaattcacatggagcaattcaaatacaacgtgataataaacatgcaatatggtttagcagagatattaatgataatagttgttatttagctctattcaatttatcagaagaaagccaaattttagagttctctttaaaagatattggaattagtactgaagtttctcctcgtgatttatggaaacatgaaaatttatctccagttgagaatgtacttatttctaatattcctccgcatggcgcatcattatataaattgaataaacaactgtagactaaaaaactcaatcgctccctgctaagtagacattgaaaaaatgaaaacattttattatttattgtgtctgccataagggagcatattattttatactaattttctatttctattatttctcctgcatctatttcaatgatcttttcatcatattcaaaccatatttttatacttgatggattctttatcttcttgccataagaactaaatattaatctattataggcctcaatatactcataaatttctatgtttgttgcataccaaatatcttctcttttacctacatatttacaaaagtcctcaataatattccaattaccatccgcttcaaattcatagctatgtccccacagataaaataaataaggtgaatgagtcacctcatcttcaacaaacttttttgaaaggctttctagttctggtgacttatgatggcaggttgcggttaatctcatccaatcccttggaatcctaaagtcattagttgaaattacagtccttgcatatacaatcccacatgctttaattgctgcaacaactttatcatcaaaggtaccataaggataggccattccacgtactattgtattgaattgcctttcaagattttctctatctttcattacttccttaataacaagattacttggtaattgttcaagaaatggatgtgttaacgaatgaactgccacttcctgaccagaatttttataaacttccgtaacctgcttttcagtcattctacgatgaatctgcccttctggataaattgtgccttcttctgcatatactccactattcaaattaaaagtcccttttaatccatacttattcataatttcaattagacgaatatcctgttctacaccatcatcataacttagtgtaagagccttagctttgccttcaggaaaccttaaaaatatacttgccataatatccactcctgttaaattgttttaccttgatacttatatgttcactaaatattagtggacatcttacctagaaattaccactaatcatctgcagcaaaattgttttctgtattgcaaaggtgtcttttctttcagctgaacgaatttattgatgaaataatcagtattgttatatccaactttctctgcaattttataaattttatcatcactacgttttagtagttctgctgctttttcaattctatatgcatttaagtaatccttaaatgatgtactatactgctttttaaatatttgacctaaatatgcactattaatatagtatttttcacttaaatattttaaacttaatttctccatgtagtgttctgaaatctctttatcaatttgattcaaaatcccttgaaatgagttttgtcttaattgacttaaatattctgcaaattctaaagaaaatgtctttagatggtttgcacttcctctgcttatcatttgttcaaaagaaacagaactaatatactgcattacttcctcttgatttatttctgaatctaattcttttgcaatattaataagattacataataaataatttatatttatttttataatatctaaatttattttatattctctaaaactcgtataaatcctatcaacacactttactatttcttccttattattatcctcaatttcatgaattaggtaatccatgtactgttttcccgcattacagcttaactcttttctctttgccatttcatcataatatgtgatattgctttcaattgaaaaatcagaaaatagcttagccacagtcgcagatttatatgataatgatatttcttcaatactatttactttctcacctatataaataaagaaatcatgtttttgaatttgttgcataccagatttaaagtttaaaatatattcactctcgttcattcctttttcttttgctaatcttttatcataaataaatccaatatcatagcattcttttgattgtcccatatcaataatcacattataataattttcacccaaccaactaatcatgttttgatagaaaatttgctgctgttccattttttcattctctgatatgttaatttcatcattattgcaataattaatttcaatgatcatatatctgagctcagaagaaaatatttgacgctttttaatatatttaagattggaatcattgcatttaccatatataatctcatttaaaaatctatcatatacaactttgtcttttattttctgtacggtattttgttttttctgcttcatatattcttctttaaatgaatttagcactttaactagttcatctctttgaattggctttagaatataatcagttacattacactttatagctttctttgcatactcaaactcataatatccactcaatacgattatttttacttccgtcaatatattttcacgcacatactcaattaattcaattccattcatttctggcatttttatatctacaatgagtaagtccacatcttttgtttctaattcctttattgcttcaatgccgttagcagcctctccaacaatttcataaccatattgttcccaattaattaaaatttttaacccttgcctaataaatggttcatcatctactattaacacccttatcataatgtcctcccaaattagaaattattattctgattctctttaacaaaagaattgcttacccctggctcatcaagaaaaatctgtattgtaacatccgttccttcctttggtttactgtcaatttcgaactgcatattattattacaatacatttgcaaacgcatataagtattaagtacacctgtacttttactgttattaagcatatctatttctgcatttctcagcttgtctctaattaaattcaactgatcttcctccataccacttcctgtatctgaaatctctatgaataatctactatcatacttaaatatggaaacattaatactagcattatgggatacttcttcaataccatgaacacaagcattttcaacaaaacttaaaattgatagtttcggaatccttattcccttacaatctcccataacataaaaactaaaagttaatttttccccaaacctatatttttgtatttgaagataattttccacaaagagcatctcgtcttcaattgtaatataatcttctccccaatttattgtctttcttagcaatgctgataaattttcaattatttctgctgtttcactttcacctttaattaaacttctcattcgaatactttcaagagtattaaacataaaatgagggtttacttgactttgaagcgcttttaattcagcctgcttttttgcaagttcaagcctttgcttttctgcatctcttttaaacactacttctattaattccttaattctcaataccattaaattatagctacgaattaattttcctatttcatcttgtccatcattatactctattgttgaaaattcctcattttctacctttcctaaatatataccaagcagtgttaccctatacccaatagaatgagataccaaaataataataattgtaggcaacaataaattaaatattgctagtccaaataatatttctttcctctctacaatttttgataaaggactgacctcatttgctgtaataataatattccaggcttcatttgctaccttaaatctaaaaaagtcgtttaacttaacatctttttcttctatagaatctattgtgtcaaatttttctgtaccaacattggattttttgttagaaaataatatataactcttattacatacatataaattatcttccattttttcatttaaaatatcatttaatataacattataatcaacgtcaatttttaaaatattctcatgcgttttgtcgaagttatctaactttcttgtaatgctaattgttcgtgcagtattatttattccataatttttcctattatcatcataatataccgatatagtcatatcttcattattgttatagaattgcctataccactcactttggcgtgtttctgatgttaattttctaaaattactactattactaatagtatcattatcggtatatatagtaacttgatatacatgttgagaattatagtagtaattgattacattattttgtaataaataattatatctttcatagtaatcaagaagattatcataccttcttgtaataaaatcgtttaaagttatgtcattatgcaaatgatttgataccaatacacaatcatctaaaactgaacttaaattatatttaaccctttctattgcatgctccattgttattctttgctctcttacctcgttactttttatagttatatacactatagagttagtaactatcataggaattagaacacagaataaatatattattattaattttgatctaatactataattattcagtattttaaagttcttcattttattaccctcttaaaaaataatacgcacttgtattctatgaatataatataacatcatagtaaaataatcaaataactgatattatttccaattagtatactctcttgttacaaaaactttttatttaactaccttaaaatatttataattattattatctattttgattttatatttaatttatcataacaatgcttttatatatctaaatcaaaatataaataactttatattataatattaattgaaacatttgctaattggggattcaagtctttgtcctctgttaaatctagtactggataaccatctatatcaaaatgtactcgacggataccactacttctaggtgcatcaactccaggtcttgcatgataaagattccatacaattccatcatcgtcagttacatatgagttgtgtcctgttccatattctccgggaacacttctagcagttaaaagtggatagttcccctttgtccaactgtttggatttaataaatctgcatctttttcagcagttaaaagtcctataacataagtcgaatctatagctgcacttgaaacgcttaaaaatatcttttcatctttaataagagcaaatggcccttcatcaacaaaggtatggttatttgcccaaccatattctggcttagaaataattactggatcacttatcaatttccatggttctttgggatcaatctttgcaatataaagccatgctcctagatctataggcaagaactggcgttgagaccaacaaacatagtactcactgccccattcaaatacagtcatatcaagagatatagtttttcccgcttcacataattctgtgccatctttctttacaattcgctgtggtcttgaccaatctgttgcacacattggattaccaccttttttgagcttcataaaatgagattctacgcaaaaaaattcgcctgttgttgcagcatgaaaaatatataattcgccttctatgacatgaaattctggtgcccataataaatttttaatatcatcatatgtgtctgaatctagtattaatacttcttctgctgttacaagctcaggtatactgtctgcttctctcatatataaggtatgattttcgtcagcatcattagttgcaataaaatagtactttccgttccattttattgcacatggatctgcacgattaatagcaattggaaattcataatgatcttgatgtatagttcctgtaatcctatatgtcccttctttattccaatctatttcacctgtattccaatcaatattctttaaagaagttgttccgtcactataaatagcagtcgcttttacatgttttaactccttttcagatgtaactcttatactggttggggtttcaattttgacatttgttggaacagtaagtttgcaaataattctatgagctatttctgtagatacatttataacattacgtggtactatcccctctatatcactctttacaatatctatatcaaaagcttctgctttttctggcattgaagcatcctctagatttgtaatattagtgattgaattcttataatagtttccgctttcatcactccaatgaataaaataaattttcagttcttcattatattcacatgctacgtcatttacatatgcatcactctttaaattaattaaacctatttctttatattgcaataaatctgatgatgtacataataaaacggagcctttactttgactatcgttttctccatctggttctgtgcgtacagctataactccaaaagtattatctttcatatgaaaaatataaggatttttcaaactctttgcattaagagatccgtcctcattttcagttgctttagcaaataaaacacctgaattatgatttaaatcttcaaactttattccatcatcgctatatgcaaggtgcatactatatgctaacttagtggaatatatagcatcttcttgtggcgctctagtatagcaaagtatatagttagcagcttttttcatttctgatatcatttttaatccatctccttaatttataatttccaaatagcattgtatagttattatctcttactttaaaatgctatacttaaacttagaaaactcagcagttccaccaatttccttcgtggaaaataagaataaaccaaagcgacaccctacaaactgatccattttccataccatattatgtgtgatacctaatttaatccattcttctccatcttgataataaaactcacactcatctttattgtctacgaaacagccgtgtgccttaagtataactttgttttcctttataggaaccctagcatattcaactccaggctcattatctatcaaatttccaaagatggatttatcatcagtttcccttgctaacattaccaaataatatttgccttcttctttagtgagtgcaattaatccgtaggaactgatcaggaagcataaaccagcataatcaccatttttaagttcactaccatctaaatttacagtggcttcacatgcaggtcccatggcccgttgtgtaagtgtatttactgcatgatttaaattcgaacttatttttcctgaatggatacgatatgttcctggcttttctgttactgaccataaattatttgacggtgtatgattccactgccagatatcttttaggtgaaccttatgattttcatccggtttataaataaaatcatcatctccaacaagcggcttatattcataattcgggtgtgtacttggaatcctaatatattcaggagcctttttatcaaatgtcggaaagtccttttcaaagcgtagtggtacaagaacaggtatacgaccaacagcaccatgatcttgaaataacattgaataccagtcgccatctggagtatccacgattcctccttgtgctatacctgaattaaaatatcccatatcatcatcaaaaacctctcccccaacaaattctccctctaaagagtctgctacaaagcaagcttgagttcttcgatgatgtccagacttcggtatatgaatgaaaaatgcataatacttaccattaattttatagaaatgagcaccttcatacccaaggtaaaactcttgtgtctctctctcaattattctatttatcccacttggcttagggcccgaaagatcctcatttaattcagtgagataaatttcagtgttaccgtaaataatataaattctgtcatcatcatcaaatagcaatgaacaatcatgatagaatccttctattatttgtctttcccaaggtccagctatatctgtagctgtaaacagatatgtcttttgcgtatcatttgctacaaaacatacataaaatctgctcttatggtagcgaagggaggctgcccacataccctttccatagatatgtttttcaccttctagtttctgatctggtgtatcatctaaggcttcatatacataagttgctacttcccagtttataagatcataggatcgcataataatgcaacctggcataaaatgcattgttgtagtaaccatatagtaagtatcatctactcgtattatatccggatctggatagtcagcccaaataatgggattatttctcatattagagcctcctctcttattttgaatatatatatcctctatcacttttttgatctatttgaaatacttcaaaatatatcaaagcattcttgcttaaattcagcttaattgtagtcccttccttctctgcagccactctctccgtagtaactaatggcattgagcttccacgaagtaatgcattctgtgctggtgtcggatatgctggttctccaatatcatgccaaatcttaagaggattacaacacacttcatcaacagtttttactaatagacatgcctctttgctcattggcagtgtaaaattcaactccaagtcttggtctgcctcagcattctttattaaattccatgcaactcctttataacttccatcttgtgcctgcactataactgcttcttcagagcggtgtacacactcaccttgcagttccttaaaaaatgcaaatgtccaaaaggtcggttttggaattacaccattagcaacaagaccaaaacctccatggaatggagtaaatggaactccattttcttcaaaaatatctccaaacgtccaataagaatatgaggcattgcaatcccctaagctagaaagaagcttagcaatataggcagcatttacattttggtcgtgcagcggacaatttggaatgtaagaagtattaaattccgttatgtggatatccatacctttatattcttcataactatctacaatatccctagttatctgcaattccttgagtaaatcttctggctcacgcaattcttgatatccataatgtccaatgtgtttaggagcttctgttgcataagcatgtcttgttatgaaatctattggagcagaactttcatggcaaaagttcataaaatccttcatccagttcacatcatcaacaccgcaaattgcaggccctccgattttaaatcttttatcaagctctttaatagcttttgctgtgaattcatacaatttaaagtactcttgcttgtctgcatttttccaaaaaacgcttaaatttggttcattccatacctcaatcggccattttaccacttcatctttaccatagcgttccattaaatggcttagtgttgcctgaataagagccttccatccttcataatttctcggtggtgtcacatttcctttccaataaaatactgtttgatctccagaagccagcttctgtggcataaatcctaattctaaaaatggacgtatcccaagttcaagataagaatccataaccatatcaagatacgtaaagttatactctgcagtaatattgccaaagtcatccttatactcctgataaattgccatgtcatcagaaaacaatccatgcccgcgaatatgagaaaaatgtatgttctcttgaacatatttcaattgttcttgataagctttatgaagtgcaagccccattcttccagtcccaatgcagaacaatgcattattgttaaatgtaattttctttccctttattatagaataatgtttaatcatatattatcttcttaccttccttacttacatactcctaataaatttctaaaacttagtacacttgaaggagtcgctgatatacaaccactcctacctgttaattcttcttatgttataatccatcaaagctataattttgctttgcataaaacttaatcatctattgattagaataacaatttattttctctttatatctcatactactatttacattcagtatctaaatttagtcaacaagttttaaattacccacattgctcatagtagaccaagtttgacctgttgaatctgaccatatatttactccgtttcttacacctccagcagcgtcatttacttgggcatcaaatcctataatttgattagctacagcctcattgtgtaaaggtatagccatttctactatatatccattatcagttacttttgtggctgatttgaatttatcagtaatcctgcttcctcctccactttgctcattatcataattaactctatattgagcatcatcattatcataagctgaagttcttgcattgttttcatctataaatgcctcaactgaatcctgctcatacgcattcttactagacttatccaatttgctatctgttacttcatataatatataaatataatccttatcccataaagttctgactttagccttagctgcatttgtaccttgtaaacttatatctgtgcttataacattagcagtactccatatatcatctatattaccatcaataacaggagttcctcttttagcttctactgattttgactctggattacataccaatgccccaccattttctggtttcattgttccaccacttgcataatcattccatactactgatgaatttaatattccataattatcgtaatcattaactttcatatcaaatttaagttcagttccaacttttgcctgaatagttcctaatggcaatttggcttgtatttgatacccctttgatgttgaaataactttaactatatcagtatcagtattgcgtttaaccgaatattttacatatttacctgtaccgtcatctataaatatatctactccatcattatttgaaattgttgcatcatttacgtctgcaaaaacatatatattctttaaatcccacatggttttcactttagctgtagccccatcaattccgcttatatatgagttaacatcaaaaggcttaaccatcatccattttggatccaaagtatttccaataacaggtgttccatttgaggcgcttgttttttgcttaaaaacattagcctttgaaggatccacaagtgcccaataagctggcttagcctgtaagcttctatcgaaaagtaatggagaatctggtctgttctttactgggaaattatctaaccatgtatcatcatctgatccaccccagaacataactaaccctaaattaccctttttagcttcctctttgtaaacatcaaatattgctttatattggcttgcttcctgtgctaaaacatcatctgtaattgtctttgtaccttcattgctaccgttataaatagacatatccagttctgtaacttgaacagtaaactttggattatatttctttaagcttgcaaatttctcaatatcatccttgatttgtccagccgatggattgtacatagaaatgtgactttgaagacccacaccacctactggaataccttttttaagcattctctcaattaaattgtataaatcctctctctttctagtacttccttcagttccgtaatcgtttataatcaatgtagcatcaggatcagcttcatgagcatatttgaaagctaactcaatataatcatcatcataaccgtcgccatcaatatctcctattatagatttccattttgatttttcatcatcacctcttaaaccacttttgtctgaaataacttcatttacaacatcccaatactttatctttcctttataacgcccaactacagtttttatatgcttttccattctgcttcttaattgctcgcttgtagccggcttagctttatcagttggatcttgaaagaaccaatcgggtatttgactatgccaaactaaagtatgtccccttaatatcatgttgttttcttcaccaaactttacatacttatctgcatcatcccaatgaaaattgccttcagttggctgtagtgcatccggcttcataaagttacctggtactagtgcattatattgatattttataaacccagaatgtagattactactatccatcatacttggattaagttctgttccaacagggaaataatctttaaatacatcttttaatgctggaatatccttttgataatcttgtttaactacttgagtttgagctaatatatttcctgtatctgcgaatacaggcttacagctaacggtagcatatattccactaagtaaagagcctgtaataattaaactcatcaattttaatctttttttcttactaaacaacctatatctctccttattacaatattcatataaatagtttcaattgaaaattaactcctcttatgtttaatgtaatatctaactttatattttgagaaatagttatatattgaagtatattatctatactcaaaccagtagaaatccgtataattatcagtggtttttccattactacttgcatacattccaattgtgcatcctacaaagccacctgctacttctgtacttaaatttttagtgctaacatccttttgtaataacttatagctagtactatctgttccataatataaatccaatttttgccctttgcttaccattttcaagcaaagtttatttgaatttatttcaacttcattaattaaaatatctttccccttattacactctataatttgtaatacttctcttccatttctcttcgtacattcatacctaatatgatattcattactctgaactatagctattcctgcactttcgttttcattattcggtttaaattccatcatagtagatacaatataatgatattctttttgcctaatccctatataagcaggattatctaaatcttttaaagactgctcttttaaatgtaggcgtaagcaaccttctttttctgttagagaatataaattttcacttggatttcttaaaaacacccaagtattatctaattcttttccatagaaatggtgacaagcttccttaggctctacttcatattctggtagttcatgctcttgttctaattctaatattccaaagcctgggttagctactggccatccatcttcccagataactttagctaaaaaggtctctcttccagtgttacaatatccatcgcaggttctacttgccaacattaccataaaccatttatcatcttgcgttttaactaagtctccatgtccaacatgctttattggatagctttttcctaaatgtctatgagtaattatagggttacgtggacacccttcatactttccgtaaatagatgtacttcttgcaatagtaacgcagtgttcaggacctgttcccccttctgctatcattaaataataataaccatctttcttatataaatgaggaccttcaggccatatcacctccctaagtgcacctttccatattttatggctatcacctataagacacatatcattcaaatctaattcttgaatccatacttcccaatctccattgtagcgcacaccttctggatttggtcttgttcctatataatatgcttttccatcatcatcaaagaataggcttggatcaattccaattgctccttctaaccaatacggatcagaccatggcccctcaggcttttctgctgttacaataaagtttcctccatgagagatatttgtggttattaaataatagattccattattataacgtaaggtaggtgcaaatattccctgcgaatgacctgcaccctctaaatttaattgtgattctctagtaagtacattcccaatttgctcccagttaactaaatccttgctatgaaaaattggaactcctggaaaatacgcaaacgtagatgtgaccaaataaaagtcctctcctaccgcacatactgatggatctggataaaatccagataaaattggattttttattttattcatttctgcttccctctacttccaaattctataatttccacttaacgccaagaaggcgaataaatataaacagttatcataatatcttctttcacctgtcctaagaggtgtattccaaaataaatcaacacattcttttctatacatccctttacttgctaaagaagccattgcgttagttgctataattgctgctggatgaagggctttttcttcaataattgtgccatctatttcatatattaaatccgctttacctttaactgtttcacagaaaaaagtttgaattttatctgcacactcacattcccactctgaactttcaaaccattcgtaagataagcctaaattagctgctactctataagcatcactatagaatctttcatgatgtcctttatcccaaggtgaatcacatggtactccatcatacttcgaatactctggtgcgagtcctgtaataggatgacaagctttttttagatactctctgctacactgcgctgcctctttccaaaattcatgatcttcttcattacaccaaagagaaaataattcataaaaatgtggtaaatgatatgatggatcagtaaaatgaagatttggaacaaactttattaatttattacttggctcccacattggatctcctggctctttttctcctttgtggatacattcatgaagaagatctcttgcctcttttgaataattaaaaattccctctccatctccccatctatttgccgcaaaaaataacgccattgcaaaatattcttctccatcaggtgcaggtccataagcattcttctctccacttagcttaacagaccatgcaaaatatcctttatttagaccttcgtccatatacatataagtttttgcccatttccatagccgatcgaattctcctttcatattcctttgaacacacatcatcatggcataagacatgccctctgttctggcatcattattacctgtatcaacaaagtaggccatatcatccccaacgggatgatataacctttctgattcatttccataaaaaattgttctataaatatcttctaatctttcttctatctctctgtctgaatgaccatattctttaaagacattatgataattatccgttttataagcactcatttgcattgctccttgtatagtatagtctgtaaattaaattttttatctcacttattatcttctattcctttacccctccaatagtaagtccagatacaaaatatctttgtaagaatggatataaacatactattggtaaagcagttacgatggtaatagctgctcgaagcgattttggtgtaaccatattacctgcgttcttaaccatatctattgttcctgagctaccttgttgtgttgatgctgataatactttcataagctcatattgtaatgttgttaatgatggacttgctgaattataaagcattgcatcaaaccacgcattccattggtctacagccacgaatagtgcaacagttgcaagtactggtttacacaaaggtaatatgatttgaataaaaatcctaaaatctcctgctccatcaattttcgctgattcaactaagctatctggaagcccgttcatgaaagttctaataacaatcatattaaaagcactaattaaacctggtaaaatatatactaaaaaattatttgttaagtgaagatatttcatcaatacataaactggaatcatacctccgccgacatacattgttagcacatagaaaaatgaaagttgctttttaaataagtagtcttttctactaagaacatacgcaagcattgctgttaaaaacacttgcagtgctgtaccaattacagttcttgaaactgatataaatgcagcttgtatcaagttctgattatgaaatactgtttgataattttttaatgtaaacattcttggcaacagatatatgccaccacgcacagaatcaattccatcattaaacgaaacagctagtgtatttaaaattggatacaatgttacaattacaaatatcaccataaacatacctataagactgtcgaaaaaaatatcacttttacttcttctcctaaaacctaccatttgatgctcctcctttagaataacctttcttcaccagctgattttgcgaatcgatttgctatatatattaacgttacactgattacgcttttaaatatacctgctgctgtagctaatgaatagttatttaagctaataccatattttagtacaaaaatatctattgtttgtgatacgtcctgaacaagaccatttccaagtaggtattgcacttcgaaacctgcgttaacgatatttccaatgttcattattagtaatataaatattgttgattttatgcctggtaatgtaacatgaagcatctttttaaatcttcccgctccatctatttcagccgcttcatataaatctggattaatggaagtaatagctgcaaggtatataatgcttccccatcctacttctttccaaacatttgttaatcctactattccccagaaatattttgtatcagcaaaaaaatttataggttgacttatgatatgtaatccaactaaaatttgattaataatacctgtttctggtgagagaacatctgcaacaattcctgttacaattatccacgaaagaaaatgaggtaagtaagaaattgtttgtacaaattttttagcaaacattaacctaacttcattcaataataaagcaaagccaatggaacatataaaacctaatgttaaattaattaaactcatgcataaagtatttcttataacctttataaaatttggatcagaaaataatattttgaattgatcaagaccacaccaagtttggtcaaataaactttttgcaggtttaaatttctgaaatgccataagccaaccgacaagaggtgtataattaaatatgaatgtatatattacaaatggaacagacattaaaattaacgttttttgttttttcatattcttcattaaattattttttgtttttatttctggatttggattgatactttttacttctaattccatgttcagcctccctttatatctttttaacaagtttttaagaatagggatctaaaaagatccctattttatatatcagttgcctttaccgaatttctccactcttctttttacttctttagtaagagcatcttcataagcctttacatctgcttgagttgtaagtgtagtttgatattggttccaagtagaatcgaattcatttggcttaaccataataaccttaggaagccattgctttttgatgtcatccatcttttgcattgccatttgttctggttgatcagccgaccatgtactacatgctgagtaaattggataccaaggttcattttcttctggaacctgattaaggaattctgtccaattcttaaagccatatgcatttaagaccttcttatccgaatctgttaatgttgcttcaaattcagtctgctgttgctctggtagtatagtattaattccatcatctaagtaacctgctgtatattgaggtaggtatgtgtacatacacatgttagcatttacccaatcttggtttcttgcgttttctctttgctcatctgttctgtagaataaacctttatcatccactttatagtccttatctttttctccccagtatctcaatgttagaacatctggagataataaatcattaatggcctttaatgcaccatctacatctttacagctttttgaaattcctatacctccacctgcattaaatgctggcttagctctgtattgagccttaacattaggatctattgttaaacctaatggaacccaagttctctcatctaagtgttgttgctttaatgaattttctgcagttaagaactcccaatgctgatctaccattccaagaactctgcctgtagaaagtttcgatgtatattgatcataagatgctgtaaatgtttctggatctatgattcctttattatattcatcatttaattttttaaagtatttttgcgcttctggaattgtattataattcttagctgtcaatgtagacttatctataatagcttttccgtcattaggataccctgctaaaaattgaggtgggttttccaaacagaagtatctccaatcatcacttagaacttcaaatcctatggtcggttgtccatttacttgtggatttgcagctttatatttctcgattaaatcaaaatattggtctattgttgtgatcttaggatagttagcccattctaatactgctttttgaatccaaaacgcttcatcattatgttgcacttgtgtatctttatttcgaatctgtccaaattgttgtataaaataaatatgtccatcttcttttcttaatttttcccactgagtaggtgttaaaaagtttttaatattaggatacttatcaattttatcttccaatggaatgagcgcaccagcatctactaatgcttgtgtcccatctcctccatctataatatccggatactcaccacccgcaatcattacgccaattctttctttggcagtttgaccagtaagccattgctcatttatttttgctccaatcttttcagctataacatttttaagtctgttattatcaggaatctcttttcctgctgttgcaaaaaaggctgaaaattcttttatttttccatcacttgatgtacttgtttcttggctgctaccaccacaacctgtgagtaagctcacggctaaagttcctgctaaaagcatacttacaattaacttgctctttctcatttattttccccctatttttattttagttaaacatttaatttcttgtaaacgtttctccttacaatgtaaagtttatcatcattatatttagccaacaacctaacaaactatataaaaaataccaaaaattatagattccaaatttgtaaaaaatgaacttcttactttagccaaagtaatccatgtatatctcactctaattcttttatgtatttattataaattcaagaaaattttccaacctcttaacttttaatatagattttcttcattcttgaaatactctcttattagaaatttcattagattgcttggttgttcctttacaaattcagctttaccgccaaatgtcattccatacggctctttaggtgtgtatttttcccagcgcggcatctcatctccagtggaatccttaccatttggatctccatagcttatgaagttagcccaataattacacatttgacgagcaagatcataatgcttgccaataaacggtcgccaacatttagcaagtgtctcaaaaaagaaccaaagatctacagagtgaaatgttcccgggttatcccaacctggtatttctgcatcaaaattataataatataaaggcgtgttcgcttttgtatcagcatttgcttgcccaataatacgaatagcgtattcaatacttctcactgaagctttttttcgcatttcatcaatatcgcctaacttagcttgacaaagttcaagatactcatctgcatcatctccaaacatttcaatagccatatctttaaattcgtcaatatttctaacctttggaacgttaagaaactcagaagaagtatgacctaaaagtactggcaccattaaacgtttattttgaagaaaaaggttgaatgcatctcctacacaaaatacattatcctcaacagttccccagtatttcttatattcaagtgatttatcacggatatattctgcatcgagcttacgtgcttcagcaagtgatgaaactcctaaaaatctaaaaaattttattccctcttgttcagcttgtactaagttatgcttttctaaaggcaacggatttccttcataaagcgtagtaataataccactttgaataatagccttctgacaaaggcattcattttgaggtgaagtaagttgatttaatacgcttccacctccagcagactgtcctccaattgtaatgttattaggatcaccaccgaaagcttcaatattccttttgacccataatgtgcctgcctgctgatctaaatttccgaaattagctggagcttctggagcttctgctgttatttcaggatgacataaaaaaccaaaaacattcagacgatagttaatcgttacaaccacaatacctctacgagcaatacgctcaccatcaaattccatctcagctgtatttccaaactgaagtactcctccaaagtaccatataaacacaggtaatttctcattagtactacatgctggagtccatacatttaggtatagacaatcctcatgcatagggatgtctggatccacagcccattcccttgtatatatattcttctcatctataactgtttttgcctgcattgatattggtgcaaatttaaatgcttttaaaacaccattccaattctttgcagattgcggagcacgccaccgattttcacctactggaggtgcagcaaatggaatacctttaaaacttgttatacgcggatcagctgctggcaacccctctatagtaccattttcaacttttactatccttaacatacttaactactccctttattaatataaattgaatatgatgtaaaataaaaaattgcaggcgactgtggttaggttctgtattgttcttcacactcttttcataagtgtagattttttcacgcatctgccttttcgaacgcatgtaagaaaaattcggcaggcgaataagatttcttttttattctttttaaaatatcgaattattcaatcaacctttttaagtcacctaaaaattttgctattatataaattactaaagcataaaaaatataaactatcaatatgagttaagtgccattctaacaatacttgattctaagcattccttccttttcccaaaagataaacggataaaattatatgcaccattgttccatacattaaaatcatgtacaccaccttctataagtatttgataataattgtccagattatctcccccagtctctataagatcttcaatcgctttttcatagccttctcgacttgctatttcatctgcattgccacaagtaatataaagtaagttcatcctatagccacataatgctatactagaaccaagaactttaccgctgctagatgtaggcgcatttgaaaaagcaccaacataagtgaacaaatcctccatcccttttgctaaaacagtcttatcaagcccattgctccatcccgtgtttgtccctgtatgtgttttagaatcgcatctatatcctccaataattaagtttaaagattgcattccccccatagacaaaccagcaatggctctatgaattcgattataattaattccttcaggtgaagtatcttttatatctgcatacacattataattggattctataaacggaatcaaatcatatctcagttcataatcaaaatagtaaaagccaagcatattagttccctctatgttaaatgaattatctctccaatcgtgtgcacttctcccctccggaaatacgacaatcaaaggatcgatatcaccctttgcaataagattatccaatatgttacatataacaaaatttccttgatcattactgcttccacttagccattcataacgatttccaccaactccatgaagtaaatataatacattatatctagtatccttatcatattcgttgtagcctgttggcaaataaacgttacatttctttataatatctgatccatcaaccgtttctcttcctgcttcttgaaaactgatgttttgatttgtcaccagttgtcgtgctttatttatataatttttcacactgtatgagacttcaacaatattcccctgaatatacttattagctgcctttttatattcattaggtacagctgtcactttaatattattcatagcttattcctcatcctttctctttaaaaatagtttgttattaacatctaatttgtcataaaaaaatattcttctatttaattttaataacaacacattacacttcattacataagtgatatattggtcatttactctgcgcgaatgaatttaagtagatactattgcaaagtctttgccattttcgcctactctagctgcttctatgtctcattcatcagcacaacgttttcactacaatattaaggcttcatgcaaataatttaaacatgtataattatagtatttatacaaaaaactatagaatttaaatattttcattcctttacacttaataatatccaatgatatacataattagcaagaaaccacttataaagttgtagacaaaatttatcattctaaaactaaacaatattattttattacaataaaaataaccagataagaacattctcatctgattatttacacattttgatacaattaattttcttcaaaaatacaataattatttttacctttgctttttgctaagtaaactgctttgtccgcatttataaaaagttccttaaaactcttaccatgctctggatatcttgctattcctatgcttccggaaactttttggcttaaaacttcatcagtattattactcctaaatccattcattagagcttttgctttttcgattaacaactcttctgatgtaatatttttaaggaatattacaaattcatctccacctattcgtcctacgatagaatcttctttgaatatctctgaaaacattaatgaaatgtcggttaaaacaaaatctcctgctagatgacctagattatcatttacagctttaaaattatcaagatctacaacaaatagcgctccactatcgcctttcttagcacttttcatatattcttcaatcatattttgtactgttcctttattatataagctagttaaactatctctttgtgctttaaataaaagtttttcattctctctcttttcttcatcaatatcaataattatccctatagccttaaatatatctccgttttcatcaaacatagcagttattcttattttacaccaaatatattcattagtgtttttctttattctaatttcagcttctttatatgtatctccatatataatatcattaagcaattttccaaaattctttatatcatcactataaatataatctgttttatatataatctcactaacattctctacaactgatttatagctaaacttattttcccaatttccagaaaaacaaacggtatcttttggaatattccattcaaaaattacatcttctgtttgagacataattatacgatagcgctcctcactcattctaagctcttcttgagttattttggattcagttatatttattactacgctgtaactaaataatttaccatatctattttctactatttgaccgttatctaatagccatacattaactccatcactccttttaaccctatattctacagtgtacttaccatatttacttatttgttctcttatctccctcattactctttctctatcagcttcgcagattaattcaattaattttttacgtctttcattttcagtaaattcatcttctttgtaacctaaaatgcttagacatccactacttacaaaatctaaaatatattctccattttctattctacacgtatatacccctcctggtatatttgctgttagagattgtagccttctatttttttcttctatatgctttttattcttttctatagtatccatcaacccattaaatgctgttgctatttctccaaattcatcctcattgttatatataaatcgatcatccatattaccttgttttatttttctaattacctccaataatttatatataggcttagagaaataattaactataaataaatatgatactgttattaacagtgagataattataaaaaatgccacagtattctttatagttctctcagttggtgtcttaaattccgataattcaattgcacttaatactatccagccagtattactaattcttgaataatatcctatcttttctgtgttattaattttatattcgattattccattaggtgtactatcgaaatctattttttcccactgctcgtacaaattattagcaacacttatcttttttatattttcttttatattactactagttccagctgcaacagcgccattttgatccattattagtattcttccagtatcaaaaaaactaacatcgtttacaagtttttcaaaataattcatatttattatattagctataaaaccttggtattttccttctaaaaatattggacttgcaattaccgcacttttagttccattattaaaatcttctctttctataatgtttgttacaacaacttcgttttgcttaagcttctcaacttcactattagaaatcataaccttcttatttacgaactcactactatcacatgaaataattacaccctccttgtcaacaagtacttctctgcttaaaaagaattcttcttgctttcttccagctaggagttcatttaaaacttgtatatcatgccttttatcttctatatcttctttatcatttaatgcagttaataattctttgactattggtatattggtatcattattaagattactaatattctcatcaaaaaaagcttttaagtgtatagattgatccttagaaaaagtttctacattctgcttagttaattctaagtttctagtattaaaatttgaaatacatatgcttgtcgaaataattgcaggaattattccccatagtatagagaaaactataaactttcttcttatattcatctttcacctcattaatatatcattaatagacaaattatatattaattttatcagattttataattattttatatatattatattaattattatgtttttttgtagttataaccaaattaatatcaatatttcattcttcttcatcatttaatcattatttcgaaacgttctatatcggaattttacaacttaaactattattctataacaaaaaataatacacaactcacattgcatgattagagattttggtcttaataaaccttagacacaataaaagtttatgtgccttattctaaccattcaatatgaattatgcattttacatattcgaactcaaaaatatattatattttattctatgattacaccactattattcattttttccttgaaaaaacatatagtcattaatctctaatatatttattaattgtagctgctccttcttcatttgcatgataataaactcttagttttcctgctttatccatatcaaaccttgtttcttctaaaagtccattagcttctgctgtcatcagcgctgaaattacagcatctcttttaagggctttaaatttaccatactcaccttttaaagcttcaataacgtcttctgcacaagcttcaggtacttttgtaaagtattttaaaatagcataattaagtggtttcatactatcttacctccttttttctgaataaatcaagtggattcattgcaattactaatataccaactatcattagcactgctgctccccaagcgattggaggtagagaccatccatctattccaaagattacaccaagtaatatccaacagcaaaatggtccccaaaatgaatatgtaccattacaagccataccaagcgcagcaccacacatactatttcctttataccatgtcataaatgaaataaatgcacaaagtccacttgcagcaaaccaaatcatagcagaaccacttgtaaatgcttgagccacaagtcctgctgaaatattaactccacctgctattatccctaaaataggaatgaatataattaaatttgaaagacctgctgttgcctgacgaatggtaatacctatctctgaatcaatcatagatgtaccatagccagctacacaaccttcaaagccccatccaagagccgcgatgaaagcaatgcaaatacctaatagcatacctttgggtgcatcccctgtaatacctgtacttccaatcataaagcttgcacaaacgcaaatagcaatcccaaacatcatacgtttatttaattcctgcttaaataaaattctacctaaaatagcaccaatagctggacaaagggcagtaataggaataactattgaccctgccatctgaagcccaataacataagcagtgctagcaataggtcctcctataagagctgctaacatcattacacgacctggagtagtattaatacatcttaggaaatctccaaacttgcctttaataattgcataaatcactgcccatacagcgctgcaaacatcatttactgcacttccaagtgcccctaataaatacgtaataacaaaagctgataaaccagctgaatttactcctgtccaatctccccaaactcctttagtcatacccaaagttagaaatgctgagtaaaatccatacatgagacctgaaaataaagctattgtaataccctttttaaaaaattgtgccgataatttcctttttgcaataaccgcagcttcattaactgtggtgttttttataatattttgcatcaaaaatctcccccttaaatataacttcttattcgtataattttaacttttccaccttgcaataatcttcttaaactaaattattttcttatactatataataaacaaaatgaatatatattaaacttaattatgccttagtcttgagttcattttgtgaacaaaattatattatcattgttcaccgttcaaatcaacatgttcatacaaaaaaatattataaaatttcataaaaagctttaaattaatttattcccgttcatatttaaatacttaataaaaaatcatgcctttgaaagcgctatatctttaacattttacatgttaattcccaacagcactaacaaacgcatgattctaacttaagagctatataataaataatatcctcttgatgctttattcaattcttaattatcttttaagcttgaatttcataagcaacttgtctgccagctcaaaaaacacctgatctttagtgaatataagaattccagcatatatcaagccacatgctaatacctcaactacgcatccaaaaagtatgttatgtataacaagctttattccaaacgttataggaataaatatcaaagaataatagaaatactttatattctcgtaagcgaacaaatgtatatctaattttataactttcttaaccagcctatattctaaacctattacaataagatttgccaaaagagtcgtaattatagcagtaaccatattaaatgttcctgttagaaataatgttgtattaaaaattaaattaagtattcctccaattaatactaacattgcatcatacttttcttttccgtgaagatatattatttgattcgctattacaccttcaaccccaacacttaacatatggattgaaaacacaatcataactggaactgctgctaaaaattctggtcctccaaaaatatatatggcttccttagaaaggcataaaagacctatagatgccggaaataaaatcagaaaatatatctttataaccctttttagtaaaaccaaatactcacctttagattcatttcccaagtagttagatagccttggcatagtaacttggataactgttaatagtagtgtacttactatagtagttaccctctgagccatataataatatccaacatcggtagttcctccaatactgtcttttagcataatcttatcaagctgagtatataaaactcctgtattagatagaattacaacgtaaaacataggttttaaatgtctaaaaaattcaagattcgaaaaatcaaactttacttttctttttacgtatacaaaacttattatattatttataaaattaaatcctataactaaatataaataaaacaaataatcttcttgttttctaacaaatagcaaaatcaatgcagaatatactattctaactatcattgttttaatagcaatgaaatcataattttctaatgcttcattaacccattccacgtaaaaaagattaaatactaaattaaatcccataactatacatgtataaaaatacggttcatttttataaaaaatagctacaaatatcatgtatgcagctgaagctaggatattagtaacacttgcaaaaagaaacaaacttgtgaacgtttgtctaagtttagctttatcatcacgaactttacttatttctcttagtccatactggtaaattccaaagcttgcgaatattaaaaaatatgcagttagagaatctccatatcccatataaccgtataattctttaccaactgatctagtaaccaatggaattaccaaaatcggcaatattatgttaaataagttaagcattgctttgaatatcgcattttttgaaatagatttagccatttgtttgccctccatatacgtattctaatcaacaatgcacatttaatgacctttgagcgcactgtgataaattagaaattattttattaaaatgcacagttccaattgaatttatttctacttaacaagttattgaattcgtttcgcgctttttttatataagtttttagcgctcaccgcttttttataagttcttggttacgcttcgcgctttttttatatgtgtatatttttcgctttttcaattgtacattctagtttattcattgtcaattcatatacaaattatatggaaagtgttgaaaatttatggacttttttcttattttgagttataattaaactaacaaatgttagtttgaaattataagataataatagtggaatattatgcgtatttttcaaactctaattattatttatatgtatttgtgtttgatatatattaatataaattaagcactttaaagttatgcaataatatttttgtgaggagtttttatgaatacaagagaaaaaattatatctgaatcattaaatcttttttcaaggaaaggttttgatgcaatatctgttagagatatcgctaaagcagttggcataaaagcaagttctctttataatcacttcaaaaataagcaagatatttttgatactataatccaaaaatattcagatctagtaaataaatttttgaatagtataaaaattagggataattctgatgagaatctttctaataaagcaaattggttatctggcgaatactttttcaaaaaaagttcatacatttttagtttttacttagaagacgaaaatatgattaaatttagaaaattgctgacaatagagcaatgcaacgactctaaactttcagatttatataataaaatatttattgatgatatattagattttcaagctgacgtattttcaaaattaataagttcaaacgtatttattaaaaaagatccttatacattagcacttcaattctactccccagttttcttactattttataagcacgagaacttaactgataaagaacgtagattcttagaaaatcatatttcagaattcaaagacacatatatagtgaaaggatgatcccttgtgaatgtaattgtcatttatgataactcaagcgagacaaatacatataattgtgtgcaactcttgctaaatactcttaaacttaatattgaattaaaagtcacggaatttttcttatcaaaagattatatttacaatggacgtctttcttatcccgatattgattcaaaaactattaatggtatggagtacataataaattcattagatagctctgatttacttataatagcttctccagtatcaaaatgtgatattagcaatgaaatgaaactgtttttgcacagactatcttgttgttacctattaagtagctcaagatcccaaatggatgataaaataggattgtccatatcaacagcttctggtgctggacttttttatacctctaaaattctaaagagaaatcttaattcattaggaataaaaaacactttaaagttttgtagaactctttatgagataagttgggaagatgtgagtttaaaaactaaaatgagaataaataaggatattttcaaactttcctacaaaatattaggtctacataatcgtacatacaataagaaaagattaattttaagaaaagtaattttttcgaaagataataacacacttatagatagcagcccaaatattatacaattaagttcctggaaatatcaatctcacttgcataatagacatattcagtagccttttaaacatatattttttacataaaaaaactacacaaaaatatacctttatcaaaataagtatattttagtgtagtttttcatatttccatattatattttgcttttatatcattaaattataatttaagtgcgtgtttcagatatgctagatcctctaatgaatctatttcaaatatatcatttgattgtatcttttcgatatgcacttccatgtccttaagattatctacagcaatactatcccaatataaatctctaaagtctcctttgtttattgcttcttcaactttattagaaataaattcaccatctttagcagtccaaaaagatgctcccgacattataaaatcaggtttatctccttcttttccaatttcaacactatgtattctgccatcttcatcatatttcaaaatccactcacctattatattttctttagaagctgaataatataatgatgttttcggtttactcttaggcaaaaaattccttgtaatatagttatctgcatcaattacgaatgcatccctaaggtattgcctaactaaatacatagtatatatattattatagatatcatatttatcattaactactttgattaaattatatttcttaactatatcatcaaacttttcatggagatatccagttaatactataatctcgttaatcccaatctcctttaaatttattatttgcctttcaagtaaagacatcccattgacttctattaaagattttggagtattttcagttaatggtcttaatctagttcccatgcccgctgccattaaaattgctctcatatctaccttctcctcagctaattaaaaatatataaatcatcttaattttcaatacatataaataaacaagttatatcctagacttatgtgatatctaaccagaattataaatttgatttataattaaagtttatttaaatattccttagctctattatatctatctattccataagtaccaaaatcgtctccttctgcttccttgatcaatgtccaaacagcccataagaaatcttggcatatttgatgaattaataatcttcttcttgaatctttatcagcatcttttcctttaaaatataatctaaacattaactctatatcatcttctgaaaattcattttctaaagaaagagctgccaaatcccacatatcatcgttaatcccactgtattcccagtcgattaaataaattctgcctgcagtatccttaacaaagttctccgaaaccaaatcattatgagatggaacatatactctgttgcatctatttagctcttcttcaagagccataaccttttctcttacttcagcataatcctcaaaaaagtctccattatcttttcttaaaatcccttcatatttttcaagttctctaaacatactgaactcattatccatatgaaaatcagtacattcatgaaggtctcttaagatagctgtaacttgttttaagttttcttctttcttaatacttctatgagttaaagtttctgcattttctataaacctagatattttaactccagtttcaagattgaaataaggtacttctacattatagcctttctcagaagcaatcgccgaattaaacatttctgtgtttctattaatcatttgctctgttccaacacctgctactcttaatatgtatctatcacctttaatacatattttataatttttatttgtcataccacctgctggctcaacttctgtaacatcttcatctgttacctttaaagattctctaacaatagattttatgttgcttatctcataacttaactctcttcttcttatagttggataaagataattcttgattttttcatattctttagaactatctgcatccccccatgcaagatcatctattttaacaaaaccgatattataatttctagcaacatctaaaagtacatattcataatttaaatacggatttacattccccttaaattcttcaagcatcattgtatataatttatatgatatcttagtaagtcctatcatttctccatcaattctattaaattgatgaatatctttggacatcttgaacaagtgattatcccttatttcaacaaatgcttcatcacctgatccactttcatttgtaaaaagaatacaatcacgatttggactttccgctaattccttaatagctcttttttcgaaaattaaatcattttcaataagtaaaaaatcatcatctatataatctttagctaaagataatgaatgcattgttcctgtccacttataagtgtcgctttttactaatattatatttttactatttttaaaagcttcttcatagtactgactttcatatccagttactatgacagtcttagttattccattttcctttaaaatatttagtgttctatcaataagcctaaagtcttcaatatctaacattcctacaggtttcccaaattcctctgccttccccgctgcaagtattacagcttgtttaactatttttttctcttcttcatgaatttttaatctagtgctttttgcagaagcaatattttcttctaaaaacttcatgcccttttcagttactttatatagagttcctctattattagttattctgtcaataaatccatccatagtaaattcttttaaaactgcattaaccttcccaagggatatattagttcttttagccaattctctttgattaatattaaaattatcattcaacgtttttaaaatttctatcctatcttctaacatattacacctaactcccctttaattaaacatagccttcattgttcgaattttgaactataattattatattccctaaaattccaattgtcaataaaaactaccttgtagatttctcctctaaagttcgcttctatgtgatacttgtttaaaatcaaatacatttgttttaattggaactattaatatttcaaaaaacactaagaggaaggctaaactcacttttcgcttgcctaaatctttaatcagacaagcgaaagttgaaaaacctccctcttagtgcctttgtatagaaatttctaaattcctactatacacgtacgtatttaatttacaaatataatcctacatccatcaatcataattcctttataactgtagaaatagcataatctttatttcgatgagctatatgtacacttagaagtcatagcttaacaaaactataaacatttttagtacatagctccatcttgtccaaatttatatacaccatcatcaatatacatactttgatttacaaccatttgtccattaggagtgaagtaataccattttccatttaaatttaaccagccttttttcattactccatttagtcctaagtaataccaactattatttaaattcatccatccttttctcatctctccagttgttggatctaaataatatgtttgaccagtcttatcatcaactttccaccctgatgctctgtatcctaaattatttaagtaatagtactttccaccagtagatatccatgcatttttaacttgtctgctctttttatcaaagtatgctggctttccatttactgttccccattcatcatacttagttaaatctacccaacaatcattgtaattatcataaaattgatcatcatcaccgctactattattgttatcatcgttattccaatcagaagggtcaactctataaacttctaaagtataagttttactttcagtaccatcttccgatttaacttctatgctgatctcagttttttgagctccttttaagctcacgtttattgcgctatctgaatattcttctccatttacactagctgtagccttagagtcttctgtaattggagttaccttgatgctatttacattttgatcaacacgcactttagtcacatcttctttaggatcaaagttgtaatctcctacattaagaattatattttttaaatttgcattagcacctttagaattattaacaattacaatattatacgttttagtagtagttccatcttgggctgtgacaactatcttaatagttgtagttccatttgaatttaacggaatatcagttgcttgccccgaaactaaattataagtcgaatcacttccattaatatttgcaacaattgatttaacattatcatcttgtgctgtagcagttattttttcagttgtatcttctttagcaactgtaactgtataatccgatttatcactagaaaagcttgcattcccatcactatctgttaacgtatatcctttgatctttaatgaatttaacagagcattattcgaattttgccctggtgttggagaacctgaaccattatcattttccggcaagtagaatacatagctatttcctactggataacttccagataaaactttctttgtagttccatccgcttgcttttcatctttaaattcatcataatatgcctgaacaaccatttttcgagctgtccctatactaacgtcaatgctagtgtttctttttaaataatctgcgctagttggatcattattatattcattagccaacgattctgtcgcttccttaagattagtactatctgctgaatctgcaaaaaaaacttttatatattcatttttgttacttctagatccagagaaagctacacttactggatcaatacttccataataaagatcgtatgtacgtctagctgaattaaaatctaagacgcttccttttacacctggttgtgtcaatgtaacaccatttccaaatgtcaagcccatattaaagttccctccacttgtatcaggagctacaacatctagacagtatctagccaatatgtgagatgaatctgttacacttccattagatcccggataaacatctacttgtatctggttgctggtcgagctagcaagaaaatctacaaattgctttccgtttttgagtacagatttttccgtaacagtttttccagcggaatctttatagttatttgttataacatatcctacagaaccttttccacatattaacgtaggatcaacactcaccattcttgctcgcggatctagtactattttgccattatagacagcaaaaccttgagcatctttagtaacattaaaagtttttcctatataagcggctactgtattatcatcattgtaatcaagttttgttattcctgcctcctttatactaaaatccttacttgcatctaatgcactgtattttatttttatcgcatacgattttgcaataatactatcatcaactcctgtaacctttagtacaataagagccgattcccctatacttcccaaactaccttgcaacgaattactgctggtgtctataccactatcctttacaccgtttttatatacttccgcactacttaagtcttttctaaaatttattatatattttaacatatcggtagaatctggtacataaaaactatatctaagtggcatatctgcatctggttctccaacttgtgtatataaaaatggagctttgttatttttatcatttgagatctcatcattggaaccaaaatccgacgctttacctacgtaagatttatacaataatgattgtatctgctgagtaacaaatgtagttgcttgttcaattgtcatctttgaattactagtacttgcatgttctatctctttgccatcgtcaaatgttccagttcctgttggcttttgatttaaatccaatgtaggagtataacttactgttcgcgttctatatattatcttatatgatatttcattaataccaagcgctaatcctactattctcttaccaataatattttgtccatttaatcctattcctgaaatatcagcataacttatacctaaatcttttagtgatactgtatcagttataggtacatcgtttattgatatcagttgaatttcttgatatgtaactcctgtagcagtaccactttgcatgccattaccttttgcttggctttccaaatctgatacgcttttgctaacattcttaactgtaatgtcaaatcctttatctggctgtgagccgtcttgatttaataactgtgtcgttgaatatataacgtccttggttgtaggatctactctagaagcaagtgctgtattttctcctgttatatttaccgttactgcttgagcatctgcaatatcatctgctttagctacttgtcctaaaaaacctaatgagaaaaatgatactatacttgtgaatacaaccaacaatgctataaatctgttttcgattttacccattttgtcatcctcctatattgtattgaaaattaaaaacttcagttaatgatcacttcattatgtttatataatcatattagtttataatcttattggtttgtcaataccaaattattatcaaattaatatgctaaaatattttgctattattaaatctgaaatttaagtatatctactatataattatcgaattatatatttctatctttaggaatttatatgatattcatgaacttaatgaatttcattccatgatatttcaaatgttaatatgttcttaagtaaatgatataatttcattttcatccaaaagataaaagtctcccataatataatacaaaacaaatatattatggaagaccctttatataaattttaacacaaaattttttcacgactttcctttaaatgaacttttgcattttgggcacgtgatagacatttttccttttcctcttggtactcttaatttttgtttacaatttgaacatgtgtaatatttatagttttttaatgtcttgattctatttaaattatttttaaaccaaactactactctattcttaatttttaaatacttataattctcatttcttctcttatatatatttcttgaaaatatcctaaacatacatatgattgcaggaatatatggtaatatcactagaaattttaaattctttggtacaaaattcattaccatcaataatataaaagataaaacaagtaatgctttagataattcatctccaccatatcttccaaacataaatcttcttaacttatccatggacttcacctctcttgaattctattaatataaaatatagtataattaataagatctatcaatatttatattattaataatccattaacttttactaattatatatattcataatgaaatcgcgcaaaattatataactcattagtacaaatataaattcacttcttctataaaaaatatcatcaattcattaaatcatagattatttcatctataacatataaaataaagtactaatcaaaaagcaaatatttctcataaaacaaaatactgttacatcaggcatatcacaaacattttactagaacaagataatgaaaaatatgcttacgaacattttttattctttactgttagtattattataaaaaaataatacaatataccgattattattttcaaatattatatcagtatattgtattaaaattttaagtattacatctttataatcattaattttcctctttatttagaggaaaaccaattaaattattgttgagactgcattagcaattgctgttgcttctacatcttgatatgatgagtctgcacattttctagcttcatctgtatttgttataaatcctaattctaccaaaacagccggcattgtagtatttctacatacaaataaattaccatctttagctcctctatttatagcacccgtgctatttgtaagagaggatgctatagatgaagccatattcatacttttagaaagcctatcataactatatccaccaccgaaactttcatcttgtgatcttgagctgtaataaacttcaactcctcttgctgattctgcatcagctgaattgtgatgcaaacttataaatatatcggcccttgaattatttgctatattaactctattcgtaagactttgagtaactcctaagacttctctatcagatgatttcctagtcatgattactgtatatccatttgcttcaagcttttcttttagcttatccgctacttgcatatttaaatctctttcagaatatgtaataccaccattggttgaatatgcaccatcatctccgccaaagttatgccctggatctataactatgactttaccgtttgtacttccaggcattctatctcctctttttccgtcttcacctatctgccatccatttataactgtatttttagccatggctcctgaaacaggtagtaaataatagtaggcatttccagataaaatccagcctgttgccatagtgccattacttcttaaatagtaccatgttccattaagctgaagccaatttgtcgccataactccattggaatacaaatagtaccaacttccatctggtttaatccatccagtaagcatacttccatcagtattgaaataataccattgtccactagttgaaacccatccagtcttcattgctccacttgaatctaaaaaatatttcctaccatcaatcaagttaaatccagtaatcatacttccatctccttgaagatagtaccacttattgctatcttttatccatccaagctgcattgctccacttgatttaaagtaataccattttcctcttaaaagactccatccttttgccatacttccatcactatataagtaataccagttaccatcaggcttaatccacccagtaactttagacccatctgagttgtagtagtaccaatttccattttcaaatctccaacctattgatgaagaaatacctttactaccatccggcgatgctgggattggcttggttgcttccattccagttggaactgttgtatttgtttgaggcttatcagttcctacagttttgcctgagtcgttatcactaccagaatttttagaagcgtcattatctgattttgatacaattcctgctgagactaataaatcattatataattgattaacctcttctccatatgtaagacttggagcccattttccccctaacgcatttaccgttactactgtaccttttatggtaataaaatctcttgggtcatatgaatcactccttggataaccagctgcgcctgcgtaaagtgctagatggtctaaatgtgcttgcacaccctcatcccatgtattgaatttttgatgtacattaggatcgttatctgatccaccagttctcgttttcaatccacatggattatgatagctttcatttatgactcctccaaatttaccataacctgtttcctttgcagcttgcacatacgccacagctgggttaacatttccatgctctggcgaatacttccaatataagtttgccagattaataaacgcatctgttgcaccttttgatttagcccattgttcagcctgttttgctgttactttcgtctctgatactatcttaatatcagtgatagcagcttttacgctagtaataggaattaatattaaaactatcacaaaagcaaaaaataatgtagtcgatctcttaatagccttcaaaacagctttcccccgttctatttagttctaaagaacaaaaattatatagacaaaatttccctaaaagtagtttgtctattatatagtacaagcttttattctattttaggtactaatatatccaaatatatggtactatcttaaggaaaattatcgaatataatcataaacttagcaacaagactacttaaatttatattttttatattccttaattatacaattcaccaaatattagtattactaataataaatgtttttactagaaccaacgactttgctaatatatactctgataaatagataaaagccttgaaatgttattgaatagcacttcaaagcttttatttaatacttatctactgtaaattttgtaattatactatacatattaatggtatgaaatcaactatatccaactttagttttctccctggatcttagttaatttaatataattacattttaaatattaccagcgataacttctgctattgcttgagctacctttttttgactagctggatcagcgcatcttgctgcttcttctttattggttataaatccaacttcaactaaaactgctggtatattggtatttctacatacaaataaattttgttcctgtccacctctattatttaagccaagcttattagcaatattattatttataagagttgccatttgcttacttctttctattctattgctatctagttttcccccaaacttagagtcttgggcttctgaactataaagagtcagaacgcctttcgctgtctccccagctgaattgtgatgtacgcttataaagaaatctgcattagcattatttgcaacatcaaccctatgagtaagactcgcaactaatgagccatatgaaggctcctcaccaagatttctagtcattatcacattatatcctctattttgaagttctgtcttcaacttatctgcaactttcatatttaaaactgtttcactgtaagtaactccatcaatagtactttcagcaccgtaatctttaccataatcatgtcctggatctattactatggtctttttaccatttgaagtattacttcctgttgaaggactatttcccgaattatcttcatcttcttgatctgttggagtattatttcctgacccaacctcatcattttgattagatgaagattgctttttcccatcagaaccaatcttgaatccatctattgtggtattagtaaccattcttccagttgaagtatctaggtaatacgaatctccattagatgtaacccatcctttcgccattgtaccactgtcttttaaataataccatgatccaccaagattgatccaccctttagccatagctccggtttcatataaataatagtaagttccattatcaataatccatcctgttgccatactaccatctgtattaaagtaataccagtaattgttcaatttcatccaaccagtagtcatggttccgttatcattaaacatatacttcttattgtctatatttttaagaccagttaccatgcttccatcgccttgaagataataccacttagcattttccttgaaccatccagtttttatctttccacttttctcaaagtaataccacttattatctatctttgcccaaccattataagtagccatagctccagaatcgtttagataatataatcctgatccatcaaattgaaatccagtttccatggcacctgaatcctttagtaaataccagttattatctacttgtctccaaccttttgccatagcacctgatttatccaaatagtaccatgttccattatcttttatccagccagttgtcattttaccatcttcatcatttaagtaataccaatttttatctggtttaatccaaccaactgctttggtagtatctgatttgtagtaataccaagctccattctcatacttccaaccaatatttgatgttatactaacactattgtcgacggtatcatttgaactttgaggtttattccctgtaataacatcagatgcatttggcgcgctaggcttactttcaggagttgctggatttggtgacgcatttgatggcttcttatctggagttttaccattatcttttggataatctattccagcataatccattaaattcttgtataatgcattaacttcttctccatatgtagcactaggtgcccactttccacccaaagaatttaccgtagtagctttccccttaattgttacaaaatgccttggatcataagtatcctttcttggatatccatccgctcctgcatataaagccaaatgatccaaatgtgcttgtacaccttcatcccaactttcaaatttttgatgtgcatttttatcagcgtctcctccaccagatggatttttaagtccacatggattgtgataactttcatctaaaacaccaccaaaattaccatatccagtctcttttgctgcttgtacatatgcaattgctggatttacatcaccatgttctgatgcgtatttgaagtagagatctgctaaatccgcaaaagtatctgttgctcctttagatttagcccaactttttgcttgctttgcagtaaccttactttctgaaattattttaaaatcagtagttgccgcttgtgcacttaatcctggaattaaacttaatacaactgcaaatgccaaagcaaatgttgtaaatttctttttaatattcaaaacagtgtgccacctccttatatttgattttaacaaaaaacgtcatggcattaaaggtaaatttcaaaaaatgtggacttttttagacaaaataacacctgctgcttttttatcaacacatttcataactttaattaattactaatatgtaaatatgttaatttattacaacaattatatatgtgtcgcaattcacaatgcacatttcacaattacagctaaaattcttgtaatatttttagaattataattaagaattattttttcaatatatatattataatattaaatttatatcttgaattctaataaaccaagcattcagacataaccagaatataaaaagtcatttacaatatatatttatcttcactcaaaaatattttaatacgcataattaaaagagagcctgttttagtgctctcttttagtgactatggtgtctcctacaacctgcaagatcactcttacagtcatttaggttgtctattaaattgtctactaatttatctgtaagacacatttggttacataacagcttttcgttagtattgattaaatgacaaataaaattttggttagtaaatgcatatagaaataatagtaccgttactagacgacttaacacggcttcttgatttcctacaaccattgtagacaaagttaggtcactaattggttcattacaatttgctccaagagtgtttgctccgggactttcaaagccaggatcacaatagttacagttactcattctcttcctctccatgtacaaagattttatataataataatatgaataatcttgtcgttttgttacttgataaataaaagtattattatttaataaatacataataataatttgaacaatatattttatcagaagtatagattataactgctagatatgtcagatcgaaaggagaatttatgcttaaactattattcgctaacgctgcaatgcttatatcttttttatatttaggaagccaaatgctaaatgatgaatttataaaatcaaattctaaaataaaagttaaattatgctttggtatactatctggtttatctggatgtgtacttatattttatggaattaatttaactcaaaatacaataatagattttagaattattcccgttataatcgcttcaatttatgggggatttataccaactttcataagtgtattcataataatactatttagacttattttttttgaaataagtttttcttctttaattacttctgcaaatttattcatattactaataatttttactattatatcaagatacaagataaatttttcaaagaaatattttttaatgactatagttaacataatatccacaataatttggatttcattagttttaaaagatatgaatcttatactccctgctctaggaaactttgttatttctataataatggtttctactgtagtttattacgaattaaactacatttccaaaactaataaaatgtataaaaaactcaaagtagactcgagaaaagattttcttacagggcttaataacgtaagagcatttaatggaatattagataaaacaattagaaataccttacaaaagaaagaaaacttatcaattctcatgatagatattgatttttttaaacatattaatgatacctacggacatcattctggagatttagtattaaaacaacttagcaaaattttaattaattcttgtagaactttcgatattatatcaagaaatggtggcgaagaattcactgcagttttactagattgtaattacaaacatgcagttgatattgcagaaaagataagaaaaaatgtagaaagtaataccttcaaacttgacaataatgctacagcaaaaataacagtttccatcggaattagttcttatcctgatataacaaaaagtataaacaacctcgtaagtaaggctgataatgccttatatttagcaaaacgcacaggaagaaataaagtatgttaaaatgaaactgagatccatgtggagatataattccacctggatctcagttttatttgagtaataaagctgctgttagatttaaaagcatcatctatattctaaatattttaaaagtagtatttgatttattaggaaaaattgtgtagtagaataaagttttgttttattttcccctaccgaaattggatgtgtatagaattgaaggctaatatcactgatagaagctaattcattatttccaacctgagtaatagaaataattttcacacctttttccttcaaattttgcgcaaactcattcataaataaattgtttccagataaagataataagaaaaaaatatcttttgaagataaagcatctaaaataatgttagtttcttcccttccctctatgacatatattaacttattgccaaaaatcatactccgctttaaatcttttgctgcatttttttgcactgctccagatccataaacataaattttatctgccctctcaactaattcaaatacatcatagaaatctctttctttcataatttccatggtcttctcaatatctttatatgttttttcgatttctttattatcgaatgaattttgctgcttgtcttcccattttaaatgaattttcatttcactatacccttgtaatcctaatttatgtgtaaaacgtaaaatagttgtatgagaaacattacatttagaagctaattcttgtattgacatagtttggcactcttttttatggcgtaaaatatacttccatatatacaaatcactttcatttagtttttcataattttcatcaatcaacgtttccaatttcatgcttttcttccttcttatttttttgtgttttatattccatatatttcaaaaataatatttcaattaaaataaagtatgacgttaaagattcaaaatctatgtcattatatatacttggtataagagctgtagatgtatatagattataatcacttaatttagctaaggaattatcctttaactttgttatagatataatagggatatttttaattttcaagtttttagcaaaatccataataaattgattctcacctgatactgaaataattacgaaaacatcttcatccgtagccaaatctactatagcatttgcttcagtataaccacttaagtcataaaatatttttccagcagttaaaaaagtacgcttaaattctttctttatcgacgactgtaccattcctattccatatacatagagtgttctggatttatcaatcaattcaaaaatatctgtgcaatccttttcctttatattttttattacttcattatatgcatcacaaacagcctctacattattaacattctcttttgacttttcattgtcaagctttaaataaacctttaattccccatatccctttagagataatttttgtgaaaatctaagaatagtcgttctagaaacattacatttatgtgctaattgatctatagcaagagtttcacactcttttcggtgcttagaaatataattccaaatatataaatcattctcatttaattgcttatggtatttgtttataagttcatctagtttcataatattccccaccactattttctactttgtttcatgtttctttaaattctactctataatttatcttttgtctattattgtaaatactcaatgaattaattctcgaatttagttagaataaaaactaaaagttgatatatcttttctaaaaaaaagagaaacaagtcctcttgaactcatttctcttctttacataatataaataaagttttataagctattgttttttattgatatctataatatattttaattattttaattctggccaataacctttatttgcctcaattaaatcatccaatattaattttgcaactcttgcacttggtactgtctttgaaagagtaagtgattgccataacttttgataacttccttctatccatgcttctactgctaatttctctacacttacttgttgttccatcaatcccttttggaattgaggaatattcccttgacatatcctttcataaccattgcttccaactatacatggtatttcaaccattgcagttctatcaaagttttctacggccccttcatttggaactataagcaagaatctttcccttgtattttcagctattgcacatgctaaatctacaatatatgttgcatgggcatccacttcaaaacctccgtctttgcttgtaccactttcaataatttttttacatgttccaaatacatgtttttctcttccatccattacttcatttgcacgagtatattctggattcgaagtttcgaccacataatctgggaataaataatattttaaatatgtgtttggaattgttgttggatctactgcaaatatatctcttgccttttgaaaagtgtgtacccagctttcatctacatgttgatttgtatctgataatgcatctgcaaatccatttgctgccatatgttctttaatttgcggcattaaatcatttccatctttatcataaatctttgaccaccatccaaaatgatttaatccataataagatacttgcatttcttttcttgatttaaggccacacatacttgccattttttcttctaaatcaattggcatatcacaaatatttaatatttttgagtttggtcttaatcttcttgttgcttctgctactatagctgctggatttgaataatttaacatccatgcatttggtgaatacttttccatataatctagtatttcaataactcctccaatagaacgcataccatatgcaatccctcctggtccacaagtttcttgccctaccactccatattttaatggaattttttcatctttctcacgcattgcatattttccaacacggatatgagctagtacgaaatctatatcactaaatgctgtttctggatcagttgtatatgcaaattcaatttctggagcatgttcttttaagtggatttcacatgcctttgctacaatttcttgtctctttgcatcattgtcataaaatttaatagatctaattggaaatctgtccatgtgttctaacagcataagtacaattcctggtgtaaatgtacttcctccacctgctactgtaattgaatacttcttctttgccatttttcttcctccaaaacctgcttattttttgctttgttatcttttctgagtacataatacacccgagaaagtcaccttacaatatatctgaaccctttagggaaataagcatttcaagtgtatttcttaacattttctgtgacttttcacaggaaatttttgttatgaaattatatatattttttcatctagttaaaatttaaaactagattttacataactctaaatccttcaatgatatatgatttataaaataaaaagccaatctctgctacgcagaaatcagcttttaatttatttaaaaatattgtttgttgtatgttaattctaaagctagcagataagcaaatgcattttgatctataaccataattccacctgaaatagtactaaaaaactttattccgtttagttttaaaacattctttaaccaagaattatatactttcaatgtttaatcaataaaaatacaagtgaaattatataacatacatttttaagcttaactttctctaactatctttacagtaacgcttcaaagtcttctcttactcgcgcaaccttcaatccaacaataacttgataggattttccatttgcagaacatccatgagctccaatggatttaaaataaggatcatccttacaaagagctggatcctttacatttactcttaaacgagttgcacaatttgtaacatcaacaatgttatctcttccacctaatccaactaagatattttccacaaatactgccttactactatcttttgaatcactttgtttctctctataatctgcttttgaatgaaattttatatcttcttcttcatcttctctaccaggggttttaaagttaagtttcaaaattaaggtcctaaatactataaaccaaattcctgtaaaacaaagtcctatagcaaactgtagtaaatattgaacccaatgatttcccattagtggaatccaatttaaagaagccatttcaatagctccaccagaaaatattcctacaatgcccacaagatacatagttgttgaaattgttgctgcaagtagtgcatgtactacaaatagcactggtgaaataaataaaaatgtaaattcaattggttctgtaacaccacaaaaaattgcagttaatgtaataggaattaacaacgctaatactttttttctcttttctggttttgctgttgcataaaatgctagtgcaatccctggacatccaaaaattttagagtatcctgtagctgtgaatcctgcttctggtaataacgatttcaaagaggctttagaagctgctatttctggtaactttgttgcccaataagaataaagacctcctggtactacaacattatcataataaaacggagaatacagtatatgatgtaatccaaatggaattaaagcacgttctaagaaaatgaacacccatacacctaatgcccctgcaccttttacaaacccttgaaaactatgcattccgagttgaattttaggccatataaatgctgcaagaactgcaactggaatcataacaaagaatccaatcataaatacaaatgtagatccgctaaacgttcctaaccattctggtaattcagtatcaaaaaaacggttatgtaaataaattacaagtcctgaaatgagtaatgcgccaatcattcccatgtccaatgtcttaatattggctatcatggtaagaccgctagttcctcctacttgagcagagaaatcaactccaaaaaattcgccccattgtgaaatgatagtacttagaaaataatgaaatgttaaatataatacgaatgcctccatgcaacatcttgcattttgcttttttgccattccgattggaagtcctactacaaataataatggcaattgattaaatacagtccagccaccctgcaaaactacattccagcatttaaaccacaaattacttggatctgctaatcctcccataattgtctgtgtagtaaataatgtgcctataccaattataatacctgcaaatgaaaaaagtagaacaggtgtaaacatcgctccaccgaatttttgaattttctgcatcatttttttcttcatcctttctctgttttctacaatttcatgttaacattatcatttttcattatcaatattctgtagcactttaggaattaaactaatctttatgaaatttttcactttttacgtgaattttcacactattatgtaatactattgcttttaagtaaaatataagtaaaattaacctatatcacgtttaatatagcttagttggatcttgtaattttattttacgtattctacttaaagaatacacatattaataagaacgttgactagtataattcattgtaattatgttaacgttatataattatataataatttgaatacacgaaagagaggtgaatgactttttgaagattatcatttagaaacatgttctccttatatatcctaataaagtagaatatatctaaaagcatctttaatatagtcatatatttatgtttaatttttttaagaaaccattaactataattgctcctatttcaggaagaactatagatctaagcgaagttcctgatccagtatttgcagaaaaaatggcaggtgatggaattgcaattaattcaactggagatatagttgttgcaccttgtgatggtactatatcattaataatggatagtggacacgcttttgcaataactactaataatggaatcgaattattagttcatgtaggattagaaactgtttcactaaatggtgaaggatttgaagttctaaaatctgttaatactaaagtaactgctggcacacctattttaaaactgaacagatcatctattgagtcaaaaggtatatcattaataacaccagtcttaatagctaaccctgataaattaaaagaattaaatccaattcttaataaagaagtttgtcatggtaaagatatagttatggaatgcaaattataaaaaacatcaaattaaaacactttatattatggttataaatcagctataaataaaaaaaatccctattgggatttttttatttataatttattttttattagattctattcatataattattattcttcactttttcctacaccagataagattattcccttattatgttctagcgcccagcttataccccagtcattttggaatataagaagatttctatccttaaaatctttaaccttcttagtatcggaagttaagtttaatgaatccatgttaacatctttattttcaatccaccttacatatctgtaatctaatctatccattttaacatcaacattatattcactatttaatctgtattccaatacttcaaattgaagcacaccaacaacaccaactattatttcttccataccaatgtgaatttccttaaatacttggattgctccttcttgggcgatttgagaaacaccttttataaattgttttctcttcatagtatctactggccttactcttgcaaaatgttctggtgcaaaggttggaattccttcaaatttaaatttctttgatggtgcgcatagtgtatctccaattgagaatatacctggatcaaatacaccgattatatctcctgcataagcctcttcaacaatttctctatcttgagccataaattgttgtggttgagctaatttaattttctttccaccttgcatgtggtatacatcttcacctttattaaatttacctgaacaaattctcataaatgcgattctatctctatgagccttattcatatttgcttgaattttaaatacaaaagcagagaacttatcgtcaaatggatcaatggttccaacacttgaatttctagcaagtggggatgtagtcatttctaagaaatgttccaagaatggctctacaccaaagttagttaatgctgatccaaaaaatactggagttaattctccacgacgtacagcatctaaatctaattcatctccagcaatatctaaaagctcaatatcttccattaatttatcatgaagagcatctcctaatatttctctaaacttaggatcatctggcgaaccctctattgcttcaacttcattttgaccgtgatttccaccattaaaagctataattctattattgtctctttcgtatactcctttgaattccttaccagaaccaattggccaattcattggataagttttaattccaagttcattttcaatatcatctaataattggaatggatccttagcttctctatccatcttatttataaatgtaaagattggcatttctcttaaagaagcaacatggaataactttcttgtttgatcttctatacctttagcagcatctacaaccataactgctgaatctgcagccataagagttctatatgtatcttctgagaagtcttggtgacctggagtatctaatatgttaatacagtgattattatagttaaattgcataactgaagaagtaactgagatacctctttgcttttcgatttccatccagtcagaaactgcatgcttagatgcctttctggctttaacggaacctgcaagtctaatagctcctccatataataaaaacttttctgtaagtgtagttttacctgcatcagggtgagatataatcgcaaaggttcttcttttctctatttcttttatataatcagccaacgctaaatcctcctaaatttataatcaattaattcataaaatttctacgaaaattattaaaagtactttatctacattggacaagtcctcctaaattttatatatcattattttaaaatgataaagcctatatggttttatttaaaatttataacttcatttatatatacttatgtgacttaattattaactaaattattatatcatatgaaatatattatgtatactttacatatattgaaacaaattttttattccttcatttataaagcaatttatattatttcaataagatatatgctgaaaatacttgactaaaatatttatatttcgcttatattttaaaaaagtaccttattttacttaatgagatgtattttatattaaagaacaaaacataattctacatcaattttatactatttttgatatttttatcaaaaaggtaccaaaatatttatattagctttgtattatattacgaaagagtaaaatattacttttatttaaagcaaaaatttaattaatcactaattttatataaaaaacggaggaatgtacaaatgataaaaagattaacaaaagcaacatctttattagtagcagcagcagcagttatttcaataatacctgcaagcgcagctacagctactactagcctagaaacaaaagaaggaactattgaaaaagctatagcttttgatggtggaaaatatctttttgaaggatacagaagtgatgatgatcaaagtggactctactattatggtggagataaagacaagctaatagaagacataaacgtagatagcatggataaatatggtgataaatatgctagcgttaaagacggaaacgatgaatacttagttgacttatcaacaggtaaagaagtagatgatactgtatcagataatacagattatgtaaagactagactaaaaacaactttaagtaaaactgatagatattctagtattaatgcatttggaaataatgatcttactcaaatttcttcaaaccaatttggagaaacttggtatacatatgaagcaactacaagtggatcagcaaaattacatggttatgtaaataattctggaaagtatattgatacagatgttacagcaaacatctatgttaacaacggaacaaaaacagtaaaggttgaaaagtttggtgaatcagattcaggaaataatatcattgtaaatatagatcagtctaagactcaagagataggtcaagataaagattatatctacagattaattatagttaatattacaggaactggaaatggtgctagtgcaacttatatccaaaaaatatctaaagcacaaggagacaaggaaggtaaagcatatattccaaaagatgtaacatcatacgaagtaacatctttatacaaatcagaagatgctgatgatgctgattcagctataataaacgctgccgatacatcatttagagtagtaaatggagttatttatgctattaaaaatgatggtgaaaaggttactgtaaatactattaaactaaaaaaagataaagttacattagataatccaattattatagataataaaggtactaaattcgatgtttacttagcagaaaaaagttctaaagatgatcaagatatcgcttcaagcgctgctgtatcagtagacgttgaaggaaatgtttgggcattaaataacggaaaaatttataaatttgatggttcagacttccaagttgtttatactgttgatagatcatttgatactttagaagtatataattcagataacttaatcgcttggaaagatggagatgacggttatgctacagttagcaaagctactacaactccagttgatccaactccagttacaaataaaggatgggttaatacagcttcaggttggacattctacaatactgatggaactcaagtaaaaggaaaatgggttcaagatggatcaacttggtactacctaaaagctgatggaactatggctactggttggattcaagatggatcgacttggtactacttacaatcatggggcggaatgcaaactggttggttaaatgctaatggaacttggtactacttaaatggatcaggagctatggctactggttggttaaatgacaatggaacttggtactacttaaatggatcaggagctatgttatctaatacaattgttgatggatacaaattaggtgcatcaggagcttggatcagataatttctaacttaaagaatgcagttcataagattaagttttatatcaatacttttaattattagctgctaataaaatttgtatatttaaacttttattaaataatagtacgttcttttaaatattttcctagatttattaataataaggctatcttataattataagatagcctctttttttagcaaagtatttagcttctctacttcattagtaattattccatccacacctgcacttataacttttttcatatccgctacactattcactgtataagtattaatttttattcctgactcttttatttctttcatgtactcttgatttagcacactaggaaagtatggatgataacactctactgaaatactccttaaatatttaggaacattaacaagtattgtttctgtcagagcgcctaggactatcctattactgccttgaagttcctttacttttagcaggctactatggttgaaactcgaaattataattctatctcttaaattaaattcatctatcatatctaaaactttcttttctagtccattatattcaatcacactatttttaagttctaaatttaatactttcaaatctgaattagcaactaactctaataattcccttagagccggtatttcttcaccacatctattttttagatattcaacttcacttgccgaatattctcctatcctagactcgccaaatttcctatcattctccccctctaaacgcactctctcttctagggcatcatcttttaaagcttgaactcttggtacactcttagttctaaatattctaagttcatcaaaagtatagtcctttacaaacccgtgtccattagttgttctatccaaagtttcatcatgaattataactggtattccatctttagaaagttgaacatcagcttcaatgccatccgcattatactcgatagcctttttaaaagccaaaatcgtattttcatcaaactttccactataacctctgtgagcaatatttaaagttcccaaaattaattcccccttaaaaagctaatcaaatcatcaacgtttacataaaattcgcaactctttacttatatacacattttacactaacttcaattatattactataataaatgaagtatttattagtagttgcattatttttttactcaaaattatgaaagaaaaccctctagaagataacttaatacttctagaaggtttcttagcacttcattttattgtccacttatagttattacagcactaccaaatacacctgatccgtcattagcagttgctttaacagtaactgttccgttagctactgcagtaagctttccattagaacttatagttgcttcacctgtaatcccatttacaactgaccatgtcacagtttgagtcgttgcagtatttggcactactaatttagtcatttgcaaagttccatcttttgtttttatttcgcttaaaccattcgctcctgttactataatagattttacttttacggaatcatcagtacttgagctattattcttttcccattgtgcatataaagttatattttcttttacctttattctatcatcatattcataacttgtaccatcgccatcactcttagtattccattctacaaagctatatccgctcttagtcggtttgtataaagtaatcatagtatcttcatccacagtttttgtcttaagtaattcatcatcagagttttcagcatctggatctttaaacttaactttgtactgttttttagctggattcaaaccatctgtaggaatactatttgacatatttccatcttcatttactatttgactaggaacataagggatagaattattaccataataatcaaatcctttatcaggaaccggataatcacttcctatacaggcaccatcatctccaaagttgaaaatctttccatttataatattagttcctttctgtagtgccccgtttgatgaaaacaaataaatcttgccttcaatttgaattactccagtttgcattgccccactcaagtctgcataataccattcaccattgctagatatccatcctgttctcattaatccataaggatcaaaaaagtaccaagtacctccaatttgcctccatcctgttgcataggtatatccctctatatatctccaatttccatcataatttttaagccattcagctgacacacgcattggcttaaatgtaactaaagttgaaacagcaatacttagagcaattagtcctctcgaaaacttattcttcattccaagccctccctatctgttaatctatctgaggtttagctattataattttccatacctttatacggaaaatatatatagttatatattcaacatccataattatatttttacacccaattttataagttcgaccaatggtatagttataaccttaaaatccaactcacattttttaacttagatggtcaacctataaaaatatagtttgaccatcttccttaaaattcagtaatgatcaattaaattctatgttattgttatatatgcagttccatattgtccagatccatcatttgctgttgctgttactataacagttcctgctgatactgccgttaacttaccagtgttatcaattcccgcatgaataggttctgtcgaattaaaattcgttactgaccaagttactgttttattagttgctgtagttggcgatatactagcattcatttgcaatgtattacctgatgctatcttactactagaagaagtcactgtaattcctgttacatttacaatttgtccacttattgttataatctctgatccgctaattgaatttccatcagaagtgactccatttacctttactttgactgttccattagccatcgcatgtaatgttccgtctgtatcaattgttgcctttcctgtcattgttgtccctgtatcccctgcctgttcaacggaccacattactgctgaaggcgttgtagttgcattacttggtgtaactgttgctttcatctgaaggattcctttatccgtagttatttggttagtttcaattgctccattaccataaaaagcttttactgtatatcctgttgcctgaacaacttgaccacttatcgttataacatctgttccaacaacacctgatccatcattggcagttgcttttaccctaactgttccattttctactgctgttagtagtccgctagagctaattgttgcctttcctgtcatatctgttccaacatcacctgcttgttcaacagaccaagttatattcttgttagttgcttcatttgcgtttgctataattgcattcatttgtagagttcctgcattagaagttatcttatcattactacccactggtgaacttacagtaattcctgtaattttaactggtggaataattgttatcttcttacttccaacaattccagttccatctgttgcagtagctattacattaacatctcccaatgattttcccactaaaattcctgaagaatttattgtcgctgttccgctgcttccaggtatactatcaaccgaccatttcactgtcttaaaagttgcattatctggcaatatatgtgcactcatctgtaaagatccatcaactactaattgagagacattaccatcagaattcacttctaatccagttgcttctacgaattgtccacttaagtttatagtcttagttccaattatttttgggtaatctacagaagttgctttcactgtaactgttccatttgtaaccgcatgtaaagttccatcagaatcaattgtcgcagtccctgttccactactaactgaccatgttactttttgagatgttgcattacttggtactacagttgcaatcatctttagagttccattatctgttgttattgaagagacatcatcctctccacttactgttatactcgaaattggtattacagtattttgattacttaaagttatagtttcacttcctacaattccagatccatcttttgctgttgctattacattaacctcaccatttgatactgctgttagtagcccagtgctgtcaattgttgcacttcctgttttattttcaacagaccatacaactgatttattactagcattgactggtaatatatctgcattcatttgcaaagttccaccattgacttctattgtcttagacatatttgctccactgactgtaattcctgtgactttaatactttgattacttatagttataactttagttccagtaactgtggatccatctctggattttgctttcactgtaactgttccatccgcaactgctgtcaaaagtcctgttgaattaattgttgcttttcctgtcattgctgttcctgtatcaccagcctgttcaacagaccataccactgatttattgcttgcagtggttggaagcactgttgcactcatttgtagagttccaccatcagccgttattatatcagcattattttttccagctatggaaatattagatactggtattgaagtggattgtcctgttattgttatagttgtacttccaactatactcgatccatcttttgctgttgctttaactgttactatcccattagatactgccgttagtagtcctgaatcacttatttttgcacttccagttttatcttcaactgaccaggttacatcttgattactagcatcagatggcaacaccttagttgtcatttgtaacgtaccgctattagttgttatttgagaaagtcctgttgtagttcctactgtaatttgacttacaggtactgctacttctgttgtgccaactgtcacctcttttgttccagttacttttgaaccatcttttgcagtagctttcactgttactgtcccatttgaaactccagtcaatactccgttactatcaattgtcgcttttcctgttccattgataacagaccatgttacacttgtatcagtggcatcacttggtgatatttctgctgtcatttgagtagttttatttacaacaacatttgagtttccctttacatttattctatctacatatattgaattatcatctttccactgagcatataatataatatcgtcttttacttttattgtatcatctgcactataacttttacctaacccattgctcttagtgttccacccatagaatttgtaaccttctttggttggtttatctaagtcaactgatttcccatattttatagtctttgttttaatctcttctccattagaatctttgaattgaactttaaaacttcttccttcatttggatcatcattagattcagttttatctactacaacttcattaaattttgaatctgttggagaaaccacgttattatcagtatctttcaggacttgaatacattgccctgatccatcgaattctttatcaggtgttggtaccttatttcctactactaccccatctggtccaattgtataaaactcaccgtcaatgactgtattactagttttcatgattccattattatctaatatgtatatattccccgatacatttattatccctgtttgtataacaccattcgagtcggcataataccaattcttattataattaatccatcctgtctttaacgctccattaccttgtaagaaataccacgaatctcccgctttaatccatcctgtttgcattcttccattttcatcaaagtaatatagttgtccatcaattcttttccatccagtcatcttttgattatcctgcatataataaacatttccttgataatcatttgcccactcagctgaggctttagatgaatttaatgtgaataatgttgttgcaaccatcactccagaaattatcttatttataaatttacgtttcatcaaatgtccccctatagaatattctcttaaccttgttttccattaatagagttgctaactcaatattttcctctttaatattatcgttatatacttcatcaactatatagatatggtaccatattctcctaaaataatcatctcaatatacctataaaagtaaattaacctaataaaatgcttgtgtaaattattaagtattagcatcttattaggttacattataatattacattaaattaagaatttagtaccccatctgaaccaaacacatattttgttccatctatatatcttaatcctgttaccatttctccattaatattaaaataatagtttttaccatcaacagctacccattcattttttttcattgcacccgtaccatcatctaaataataccaattattcttagaataaatccatcctgttttcattgagccatcatcatttgaataataccaatttccattagctctaaaccaacctgtctgcatttctcctgatgtattcttaaaatagtaccagttactacccaagttaagccaatcactagctgcctgtccactatcttttaaataataccattttccattagaagatttccaagttgaagttgacattgatccatcactattaaaataataccagtaatcatcgactttaaaccagtcctttaccatctttccatcagcttttaagtaataatatttaccattgtaattaacccactccatttttttaacggctccatcttcacgaacataataccaatcatcactatcttgtatccattggttaaatatttcatagccttttttcttatcaaagtaacacttcttaccatctacaatctgccaacctgtttccattgctccatcaattctattaaaataatatgtttttccatttatcttttgtacaccttttaagctaactccgtctttatcataatagtatatatatccatcatgttttccccagcctttatcattatcgtacctgtcaaacactttatcccaagcatcatcaacatcattattcttatctttaagcgcatcagtaagatcatctaaggagtcatttatgtcatttatcccatcacttattccatctatagttttatcaaattcatttttacctttatctatcaagccaccaatttgagtatttatatctggaatcatattgtatgtcccactttttatcattccctttatcttatccccaacattacctagattaactccatcaatcatcttatctaataaattcttttcgtaatctccaactacaacagcatatttataacttttatttgctgtgatatctccgtttttagttaatgataagcttaaaatagagaatttagttccatctatatccaaaggaaaacttaagctgccactcaaattagtaacaccattaaaatcaataatatttaaatctttatttattttatctgaatccccctgttttgcctttaacatattataaattgggttattaattacatataccttgttgtttacggaatcaataacattgatactcatcccatcaccaataactttagaaccattatccaaattaattgcttttgaataagccgttgtacctactgttggatcaaatgtcaatgaaggaactatatcaaggctactgtaagatgcattcctcacattagcactataagtatttatgcaatatgcgccatttcctaccacagtattaactattgatcctactaacccctttactacaaaagcctgagctataacatcacctgaattatttttcccagtatactgatatatcgggatattctgaaatctactcttaatagcacttggtaatgctgcttgtaagtttttctctactataggttcgattaagtttttaagcgtttcctctggtatagtaccccctgtagctgattgtgcctttgatacaactgcatttgttattggatctttcaaaacctcataaacttgtgctgaaatttcatcaactaacgaaccagacagattgtacgataacttgccacattcctcattatcgattgactttgctcctttgttgctaaacatcaattttactccattttctaactgagggtttatagttgtgttttcagccattcctataagagtatctccatcaggaaccattgatcctatatcaattccagaaagagccatgttattagtttctggatttaaaattattttcgaaatatcattagtctccgctttaactggtgtactgaaaacactatttggtattgtagctataacacttgtcccaattaatataatcgccaatattttattaattcttcttatcatgccaatcgcctccaaaatatctatatatattataccatttatactagtaagttcaaatattctaacaatatacagttatttttaatatgtattatatgatgcaaaattcattggccaaatatctaattatataattaattatataattaatgatatgactatatttacgaattgagctataaatatccgcataaaaataaccatatcgtgatataaaaattatatctttgatatggttattctaaaactctctaatcaatttattccttaaatatttatttttattattttaatttaaatttttgtactaattcagttaaatgcattgctatttgggcttgctgggttgctgcattagccacttgtgatatagctgacgaactggtttctatttccgattgtattttctcactatttacagaagatttttggacatctgcagcagtactttgaagtgcttcatttatctgctcaactgtagcttcaacctcttgagccattgataccagttcctctgacattgagcttacaaagtctccatcattgctatacttttctccaatcttagcataatcctgtaactgcttatcaacttcactcgacatgaagttaagtatatcattactgttatctgaaagatttttaactgcgtcctgtatcttagatattgtatcttggattgtaaaaacagtttgggaagattcctctgcaagttttctaatttcttctgcaacaactgcaaatccttttcctgattctcctgctctagccgcttctattgctgcatttaatgccaaaagattagtttgctccgcaatatcagctatagctccagccataactttaacttcctcaacaactttcgcatcctcaattgcctttattatatctttttctttttgttctcttatttgtgttgtattttcaatagcaattttgctatcttccttaactttttcagctcttcttttaatcttctcagcatttgtacttccatcggccgccttatttgctaagttttccatactagaattaacttcttcgatagaagctgcaatttcttctgctgttgcacttgtttcagtcattgtaacatttatattttgggacgaattatcaacttcatcaagtttggctgagacctcttctacattagcagatagttcctggcttaagccactcatattgcaagcttcatttaaaatagttaaaataagttttttgacattctcctgagcaatattaagttctcttccagtagctccaatttcatcatatttagttatttcaataccttctgaaaaatcataacttgctaacttcatagcaaatttctgaagactgtttaatcttgagattatatttttatgcatgtaaaatccagcaagaattgcagcaattatacttatgatacataccactacagttgtcgtaatatctcttgccagcgtatctccattggcaataccattttttatatcactaagctgcttaaaattcactattcctgatataaacaccaaaatagacataattacatatgaaacctgaagtttaacccttaacgatatattttttttctctttattcattttgtctcctcctatatgtaccttccaatctaattgcattcacttatgaaatattttaataaatagattcatatttatagatcgtgattggctatcctacccaattttataatatcattattttttcctacattcaactaatacaaacataattctacaactataacattatttaggcaaagttatatatttatatgcctttaactcaccatttatataaaaatagaagtgataccttatcataagacatcacttctattcttaattatgcattattcaaatttatccattgcccatcaaggaacagcattccagtcttcataactccacctgcatcgaagtaataattctttccattaatattcttccatccacttatcattattccactgtcatctaaatagtaccacgattttccattatataaccatcctgtcctcatgctaccatcatcattcaaatagtatttatttctatcataagttacccaacctttttgcattaccccatgatcatccataaggtaccacttacctttatattgtgcccagcctgtttgcatttctccaaagttattaaagtaataccattttccatcgtaagtagcccatgtattgactctcatagcgccattagcttcaaggtaataccaatatcctttgtcataaaaccagcctgtttgcatgataccatctttatttaaatagtaccaattaccagaatcctgtatccatccattttgcatatacccgtttatgtctaggaaataccattgattgtcatacttaacccactggtttttaatttgcataccagccgcattatagaatgtccaatttcctccaacaagtacccactggttagttccttctatatctcctctaattacacttaacttataagtggtcgttgtttttccatcttcagcggttacttcaacaactacaagatttgctcctatatcaagttttatgtaatcagattgtccattggtatactctttaccatttatcttaatctttgctttgtcattttgtgaagagtataatactcttaccttttcaatatttcttgcaactttaacactatataggtaattttccggatcaaattttggtgacattgttccatcagttacagaaagactagctaaattaacattatccttagaatatcttctagtaacatttagtacataagtactactatttcccttagcatctgtaacttttacatttattacattcccaccttcatctaaacttatgtatggagaagttgctccacttggcaccttcttcccattaacagtaatagtggcattagcatcttcagctgttggagttattcctactgatgtaatattattattaactattgaagaatactcgtatatacctttattaaatgctggagtaagagttcccaaagtcagcgttaaagctgtaagattagaacttctaaatagtgccgttctagttacatttatagtatatgtatttgtatccccatttttagtagtaagaacaacattaatctcattttttccttcgtccaaacttatattttgactcttatttccactctttacagtaacaccattaactgtaatactagatgcattatcaacagtagtcggagtaaatgaaatatttgtctgagttgttggcaccgtcaatgtgtaatcataagtatcagaattgaatactggcgataacgtcccagctgatggaactaatgtctttaattttgcttcacccttcttactgataatcaatttatattgtttagatacattttgatttgttacagttatacctataacattatctcctccaactaaatttacagttcctgttgttgaagtactcccaccattaacagaaaaattcatcggtgtattgtttgtactaattaactgaattttagcagtcttaatagatgaatctacattaggaagtacataattaccatttgcatctgtttctgtgtattttaattcttgagtactttggttatcaagtgtaacttttaaagttccaaactcaagtgttgaatcagattcaaatctcatctttattgaatatgtcttagaatctcctttagcatccttcataataactgtaagaataaaatcactataatcagttatcgaactaatattataattcactccaccactagtattcgccctttgttgaactgtcatctttgttgagctacttttagcgtctgtaatactatatccagaatcagcagttaaagtaaaactctcacctataggaagaaattcacatacatatccgtcattatcatttccatcaatgtttttcgtagctccatctacgcctcctatatgaaactctagcccttttatttgagttgtatcggctgcaacagcttttttaaagtttccactttgcgcaaacgtaaaaagtacagtaaaaattagcagatatgaaataattttttgaaagttaatttttttagcgctcactatatgtccccctatcttatgtttgttataatatatttcaatcctttttaacaatttctacaaaccaagtatttttactcaagttatatagatttcttatcttaatatataaattatcgattattttttcaaatcctttaaatataaatgcttattcattgttttctaatatattatacaaatttccttggaaatattggttcctttttaagtttttttgaaacttattgtatacttagcactttttataaaatcccttatttttatgcatttattaaaaataattttatccaaagttaaccgaaccatcttcattgaaattatacatatacccatcaattattagagagccagtcctcattgttccatcttcattaagatagtaatacttatcatctttatagagccatccacatctcatattccccacataattcaagtaataccaattactattccaatatagccattctcctgatttcatactcccatcaggattcatgaaataccactgaccattatcacaaatccatccagtacacattagtccagaagaatccaagtagtaccatctctttccataatatatccacccggtttccatagcgccactagaatttaaaaaataccaatgatttttactaactatccatccagttgccattgtaccatcttttcttaagtaataccacttaccatctctttgcgcccatccaactctcatatctccatcattatccaagagataccaattatctttataatccaaccatcctgtatacatttctccatttggctttaaatagtaccatgtcccatcttcctctatccagccagtttgcatatttcctctactattaaaatggaaataacttttatatttatcatcataaaaccaagtatcttctaaatgatttccaagagaatcattatatctccatcttccatttactattatccattgattgggtttaataactgcattaattgaatccgatacatttggagtaacaggaatacctaggtaaatattcaatgtgtaggccccttctctttgagtatcttcatctttcaatcctatatttattgtgtatttaccaattccattaaattttgctttaatggaattggtctcatctaacttcttgccattagcagtaattgtataatttccttcatcagttattgcttgaagttctactatatctgttccatcatccaactctatatcatatgagttaatagctttgttaaatccaatgctactgtcatttatatttatatcctccaagtaaacagcatcttttccgcctctatatacataaacagtatatacagatttgcttttggttttatcatcagatacttctatttcaattttatttttaccttgatccaaacttatattttctttatagttatcatccttagttacaacttgaccatttattttcactttatcatctggatcatccggttttgctcttataaaagcatcttctgtattcttatcaacatctacaacataagtatatatgttatctttaaaatctatatcgtttccttcacttaaataaatattttttagcgaaggtttttcctcagcgtaaacttttgcatccattatatttaaacaatttggttttgcaactaaaaacgtattaataataaacaatgccgtaattatcttttttaatttcttactcattctactaccttacattatgcctaatagttgtactaaaacaattttgtaaaatcaaaattataataaaataagtacaactttagactacaaccccttttccaaaaatatcattattacaaattctattttcccttataccaataatgttatcattattaaactctactgtaaacttaagcaaactccaaaaaatcttaattttatattaattttccctgaataaaataataatattacataataaaaagtataataagcctcatatttagctttatcatcctaatttgacattcccaaatgaatataagacattccaaaaattttatgcgctggcatctccaacattcaaaagtttataatttccctgacaataaaaaaaggctacttataatgattcaaaaatcaattataagcaacctttttaattatttttagattttacaaaaccttaaaaattgtagttttactacttacatttatatactacaaataatattctatatataaatgtaagtttttatctttagtttagtatattattatctataactattacttaacccaagctcctgatgcacctaatttgtatccatcaacagttgtattagctaacatagctcctgatccatttaagtagtaccaagttccattgtcatttaaccaaccagtagccatagctcctgatccatttaagtagtaccaagttccgttgtcatttaaccaacctgttttcatcgctcctgatgattgtaagtagtaccaagttgatccatctttagtccaaccagtagccattacaccatcagctttgatgtagtaccaaactccaccatcttgaatccattgtccttttacttgagttccatcagtattgtagaatgtccaacctgaagctgtattaacccatcctttatttgtaactggagttggatcaactggagttgtagtagctttgctaactgtagcatatccatcttctccatctttccaagcaattaagttgtttgagttgtatacttctaaagtatcaaatgatctatcaacagtataaacaacttggaagtctgaaccatcaaatttatagatttttccgttatttaatgcccaaatatttccgtcagcatctactgatactgcttcttttgaagctatatcttgatcttctttaatgtctttttctgctaagtaaacatcgaatttagtgtctttattagctgcaacaattgcagtatctaatgtagctttatctttctttaatttaacagtatttacagtaactttttctccatcatttttaatagcataaacaaccccgtttactactctaaatgatgtgtcagcagcttttatagctccatctgcattatcagcatcttccgatttgtatgctgaagtaacttcatatgatgttacatcttttggaagatatgctttaccttcttgatctccttgtgctttagatatcttttggatataagttgcaccagtcttctctacagctcctgtaatattaacagttactaatctgtagatataatctttatcttgaccaatttctttaacaccagcagtacgatctatacttacaacaatattgtttcctgaatctgcttcatcaaatttttcaacctttattgtttttgttccgttgttaacataaatgtttgctgtaacatctgtatcaatatactttccagaattatttacataaccatgtaatttagctgatccacttgtagttgcttcatatgtataccaagtttctccgaattcatttgatttgatctcttgaatgtcgttatttccaaatgcacttatagtagaatatctatcagttttacttaaagttgttttaagtctagttttcacataatctgtattatctgatacagtatcatctacttccttacctgttgataaatctattaagtattcatcatttccatctttaacgctagcatatttatcaccatacttatccatgctgcttacgtttatgtcttctattagtttgtccttatctccatcgttgtaataaagaccactttgatcatcgtctgttctgtaaccttcataaagatattttccaccatcaaaagctatagctttttcaatagttccttcttttgtttctaagttagtagttgctgttgcagcacttgcaggtactattgaaataatagcagctgcagctactaataacgatgttgctttagtcattctttttatcatttgtatattcctcctagagtttcattttttggtttattaataatttattagtttaaaaataatatcttggttaaaaaatattattttggtttacgaatattattatagcaactttatttatgcttgtctacgtctttttgtatttatttggaggtttttgtcgataattttttaataaaatattagtattgcctgaattttattcttttaatgtcatatatcatacttaactgtaaaattaaggacttaaattttgcataatttctttaagaatataccaatattttaatattaatacattaacatcaactttattgtttccatatataaatggatttgttataatctacaaatccaataaattatatacctcaaaatatgatacaaagctgaattttaaggctttcttttaggatgctaaaaactttacccgtatctttattataattgaatttccttaacaattcctaaatgattttaaattataggctgaaaactcatggaattagtgtaatataaattcattaattccaccttcctataatgaaatgcaaaattcgacatatagttttctactttataatatcttacacttgtaaccgtccatgaatactaattcattaagaccttatataaaacatcctttaaagtatctaataaaaatactttcatcaataaaatcataattctaatttctaaatacaatactcatttgataaagaaaccttgtttaatgcaggaaagactatcttttaggcatgcgaataaaaaatataggttatgcgcctcccccatactaagtgcataacctatatttataatttttattaaagatatgatcttaaagttttagaaaatttgtaaatatacttatctaataagttaaccctttatctttaatatctatatatgtaactaaatttttgactttatttcattatcacctatcaaaaagtaaatgatccagctaccttcttattaataaatactactgatagcttcgagagtattttacttttattttctctactctctccttaatgattctactgggtccaaccttgctgctttatttgctggtaacaggcctgctaatgtgcttattacaatacttacgatcactccaagtattgcgtattctctttttattagaactacacttactccaaatagtttatttgacatgagatttattcctctcataattaaatatgctcctattaaacctattgcgccactaaaaaatcctattaaaaaagcttctgaaacaaaaattctacgtatgtcttttgctctggctccaattgcttttattattcctatttctttagttctttctacaacacttatgtacataacaactattatcataattgctgatacaattaaagatattgctgcaattcctgatagtacatatgttaatatatctatcatttgattaaacatagatgccatttgttcctgagatgattgtgaataaccaagttcattaatcttttgtttaatttgaggggtatatttgctatttgttgtgttaacataaaccacattaggtttcaatttatagccattatctgaatataatttttctaaatcagcataatttaaaaaagcggatttcatatttgcagttaaatctccacttgttgtagtataaacgccacttacaataaagtctctatttaaaatcttttgatttgcaagtatgcgtaaattcactttttggccgataatatctttacccaaattatcgtttaatgctttattaattaatacttccccaattttaggtaatgttccagtttcaacattagacgccgttatatttgaagatattgttgaaacgttcattaaattattagttttattattgtatactaacgaattcgccccaagagaaattatactatatcctctttccacagaagatacattttctatttttgataatgtatcaatatcactttcttcaaatggtttagtagaattaacatccggtttctggactgttgtaacatctaaatttatatcctcattttcttcactaggcatattaacttctattactaatgggtttacataattgttcatagtcttattaaaataagatttcactccatttcctaatgacagcattaaaattatactcattattcctatacttcctcccacagaaacaagtatattacgtggaagtttttctttcatattaacaagtgctagttttgcagatgatattaaactaagattttgcttttgctttctaatattatcttgtttttctatattaacttcattatctaattctatgaccttattatcatcaattatttctccatctgatattttaattattctacttgaagcggatgctactctttcagagtgagtaaccataatcactagctttccctttctagcaatatccttcattatttctaaaacttgaattgtagtttttgaatctagactacctgtaggttcatcagcaataattattttaggattatttattaaagctctagctattgcgactctttgcttctgaccacctgataattgattgggtttcttatttatatgattttctaaacctaaatctgttaatatttctcttgcacgtttcaatcgttctttttttctaacattagatagtgtcattgcaatcgtaacattatccaaaacagataggtgaccaattaaattaaaactttgaaaaataaatccaacttcattttttctatatttatcaagttcttttcttcttaactttttgatatctttttcatttacaagtaattcacctaaaaaatcagaatctaatccaccaattaaattcattagtgtagacttaccactacccgattctcctataatagaaactaactctccagcattaaaagatagattaatatcattcaatacatgaaatttatcattatcttttaatctataatacttattaatatttctcaactctaataaagccatttttcgtatactccttattgattttataactatagatacccaaatttaaaactaaatttatgtgataacttaccgaaatcataaatattttgattccgaaaagctatgaaaatatcgctgaagggtctaagccgcaggttgtatccaatttagcatgctccaactttcctagggaagctcgactcattacattcgctgaggaagttcgagaacccaaaataaaattttggactctcacttcacaagctaaattggaacaacttccagctaagcccctttaacagctcattttcaaatgttttcttcacaaatatatttatgatttctagtgaagatatgaactcaaagttttagcaattttgtaaatacgttcgtctaatatgtaaaattcttgtttgggaaatctatacaaatatctcaactaagacctgaatttatgcatatacctcgccgaaataaggattatgctgttgcttcagtttctaaggcaattataatagatgattctaagatcacaagttgtgtccaaaatgctagcctcaaagacaagcgctcacagagaaagttcgataaatctagcttataatcggtttatctaatatattatccccagtaaaatactgatttgaattctatcttctcaaaattatctttttcaatagtctatattcttttgttatgtataatcctatagcgtaagttatagttccaataataaatttaaatatcgcacttaatagcatattgtttattactactttgcttattaatatatatcctccaaccattaatacaccgataataagaatgttctttaattgcactaaaaaagaaataaagcttttttcaaatacatgcgttataagtacatagaaacattggataaagtttaatataaatgctataactaatcctaatgataatataattaaacttctattcattattcctgtaactattgcacttacagtgaatattgctgatactactcctgtagaaaataatttattaacatacccagtagcttgaaatattgatccaatacttgacaataccatttgtatcacaattgtcactgataatattctaaatattggtattgatgcatcccaattaggaccatacattatgcgtattatttcatttgcagaaaagaaacaatatacggttataaaaattcctaaataagcaagaacttttataacttttatatatgtttcataaattacgtccttttgattttgatattcagataatactggatgtaatacaggtgttattacattcgtcaaattttgtactggataaagcataagcttataggatttatcataataccctaaagttgatgcacctaagaacttaccaattaatatgttatctaaattcctggtgaaataatttataaaattaaataagaattgaaagcttgaataattttgtatcttttttatagaaccatatgaataacctctatttattttcaatttacatattctaaaacataatataaaaataaataaactttttaatattgaatcgaaaactaatgaataataagagaatcctttaaaggcaagagatattgtaaaaacaccaactattacatttacaattatatttattattcctacttgtttaaacttttgagctttatatagcaccgcatttggtactatattacatatagaaaataacacagaaaaagataataatcctcctagccttatatatatcttatcattataaaaataagctataaaataagaaaaaaagtagaatccaattgctatgactatagccccaattactgaaaacttaaatatatctgaaatctcatcttcatctaaagatttattttgtattatagcgggtcctatccccatatcaccaagcatattgaaaaatgatataaatacagttattactgcaattatgccaaaatctgctggcatcaacaacctagctaacactgaatttataattaactgcgcaaatatattactatatttagatatgaacgtaatcattattccactttttaaatttgaatactctctcatcattcctccggttataaatacctgcatcatgcatctattgtttttctataatttgaatccactgtttaataatattatctatcttaaaatcttgagctctttttacagcttctaacgacatacttgctcttttctcatcattttctattaaggatataatctcatcagcgaatttgttaatattataatcctcaactaaaactccatttatgttcggcctgcttattatttctttaggaccagaattatcaaatgccactactggcaatccgcattccattgcttctgtgatagctaatccaaagccttcccatcttgaagttgaaacaaaaattgaagattccaaataatgatctttaacattatcacattgaccaagcaatattacattattttttagattatacttttcaatatgatttatcagactttctctatccggaccttctccaactatttttaaaacccaatcacttttctttttgtgaattatattaaaaacttcaataagaaggtctaaccccttctgttgctctaataatcttccaacaaaaattatactttttttatcacaagaagattttttattgcattcaaaacttaaagggttataaatcaccttacaatctattcctaacttttctttatatttaatcttgtcatcataagttaaaactacattacaatttaatttaggtatgtatcttttaaacaactcctcttgcttccaataatatttacctctattgtttaagtacgcatcataagaattatgcatccatcctatagtcttaccatttagcttatcacttattttcccaagaactatactataataaccttctacacctatgataacatcataatttcttgtatttagatactttataaatctatcttgaacttcattagggcaatatccgtaaagtaataaatcactcataacagaattatttaaaattccagttatagaattcacctctctagaaatcttacatataactttattagtaaacttcttatgtaacagccccgaattaaactttatacttacattagaattcaaattatacatttctctattaactttaaaagttctatctgtacaaattacatctactttattatttttacttaattcactagctaaaacagatactactctttgaactcctcccaaattaaaaattgtggtagttataaaacatattttcatagtttctccttataaaggcacatgaaagaaaataatggaccaaaaatgcgctgaatatttcgtgtcagacaatgaagtaaattcagctcataacaaggcctactagctaaatttgctagcaaagtatgatgcgaaataagtaaatatactagtctattatctttttgattgtgcctgagtacatactaatattttcttaacaaatcccctataccttaaatatatcatctatttcttattttcttcaaaactggatataaaccacaattccataaaaatagctttaacttatcgtctttggttatctcctttaaaaataaaaaatccttatttttcacgcttaattcattatatttacttttcttaaaactttttagattattctcctcatgtgcattagtataatgggctataaaatgagatagcactttgattctaaaaatgtttaagcttttcttatccacttttatatttttatcttctatataatttataatactgctcatagcgaaataataatcttctgcgagcttagcatttttcttatgaactgttgatgttgctctttgtctatagtaatacaatggtttatctataaaagctattcccttgctagaatgtattgctttaaaaactggaaatgcatcctgaatatatctatgaggctcaaacttaaacttaatctgttttaataattcagttctaaaaaatttattccataattgaccttgcaattcataattcagcataagattcataacctcataattgttatatatttttcttggatctactctatatttctcaatatagtttctgctatctttttcatcataatatacgtaatattcacttattactatgtccacattaactttttctgctctattatacatattctcaagcatatctaattccaaaaaatcatctggatcaatatatatagtgtactcaccttttatataatcaaatgctgtatttctagcaacagatactccttgatttttttgatataatatagtgaaatcttcaaatttatcttcatagtctttaactatatccatagttttatccgttgagccatcatcaacaatcaatatttgcaaatctttatatgtctgcattaaaagactatctaaacattctttaatataatcttcaacattataaactggaataataatacttatcatatatttgttctccttgaaccactaagatattctatactaaattatttattaccacttttttgattattatcagcattcatatataagttctccaagtttcttgatattgctctagcgctaaaacctgactttataatatcttcagaagtatcctttctgctatatccatctttatatttcagaattatctttgcccattcctctggtggactatctaaagaaacagatttccaataatgagttatttttatttcattgcttatagcatcagaggctacagccatcaaagctgcggcctgaacttctattccaaccactggaagcccctcataatgagatggaaaaacaaatatatccgacgcttgtagaatgttatgaatttcattacaaagtccataaaatattactttatcctctaaattcagtgatctaaccttatcctcaatcttttcttttaattctccctctccaattagcaatagcactgaattactatattgcttattcacagaattaaaaatatctattaagaaatcatggtttttttgatagctaaagcgccctacatgagttaatacaaatttgtcttccaaatttaattttcttctatattcttttcttatcccttcattataaataaactttttttcatcgataccattatttataaccttagccttttcatctcttacatcttccttggaaaacatccattgcgccgcattagttgagcatgcaaattcataatcaactacatatttccaaagacttcttataatgttctgcattcctaaatgtaaatgataaaacctcttatctctgcttattctatcattatgtgaatgcataataatcgtaggtgttttacatatcttaaaaacagctgcttcaaaaaagctttttgcacgatccccgtgtatatgtactactgaatattttttatctttttgcaatctatataaatctataaaagatttcagccttttaatgccattatttttttctagacatattatttgttcacccattttctcaacactttcatcatagaattcagtttcttctttattcttatatactacataatcaaatttaactttatctaaatgcatatttctatttatatttaatataaaggcttgaattcctccagctcctaatgaatccacaacttggagaactcttaacgttttattttccataacaaccttccttcatctgatatcaagcactatagtcatcattcacatatatgaaatttcggtttctaagatttatgattaaattcttctcataaaatcactcttcacttatgaatagataattaatttttatcttattctatactagcagtagcacattcttgcgaatcactgtctataatgttgtttcctagataagtagcaatcacagcaaaagtaaagcagcctgttacatccgtaaatatagcttctgcagtagatgctattaaaatatataatagcagcaaaaatgccgctgattgaattcctctattatacttatatcttttctgtattgatttaaatatattcaatataatccataaaaatataattaaacccaaaaagccaaattggccatatacataaggccaaaaagtatcaccaatatacgaatgggcgttttcctctaatccactaactacatttattccatattcataatatataggcgaataataatctccggatatttctgatgcaaaggttccaaaaccgcttccaaaaggtatatatttgcaagctagtttatagcctacgataaatagcgctggccgagcagctgtaagataatatgatgcatattccattattttgttatatgccgagaagattcctattacagcaagtattaatatatatcttatttttatagacttagcatatttcatcactaatttcataaagaaatatcctaatataaatacaaacgctttatttcttaatgtaaaaaacaatatagctattgattcaaatataataagattatcaaacttttttctattatcacttaatattacacataacaatattacaattgctgaaaccaaatatgttggatgctgatatataaatttatagcttcttatcccataccttacatcagatgacattcctatatcatgaattatgtttataattaaaaatgtaaatattatatttacgtaaattcttgatctttttgctaccttttctaacaacaaatctttctctatattgtttgatacaattagcgtaaatgtgtaacagacaacaaatttacttatagctaaaatatctttatatatagcaatcttctctggttgaattttatgcattacgttccctgctactcctacaagcagcaaacaaaaaaataaaattatagatttgacttcactagaatacatgcttattttattttttccactaaatatataaaaaactgatagaattatcagcataaatgtgaatagctcatcaatataccccaattgtggaatatacgcaattagacaattttgaaagataaaaatatcaaataatacattcaaaacgaaaagcatctgttactcccttcttaggtataatcaaaaataacaaatccatctgctaagcctatttcccattatgctatgttagcagattatcctaatagcccgcgctatgagaccaatctgcttccttgcctaatgaaaaataatcatagcattttgtacttgttattttctttaatatgcctaaatttaaagttctatatatagattacccaaaagttgaaattatatattcatctttggataaatatatagaaaataacagattaaagagatgatatatatcatctaatagataagattttgattgtggttacagttctttaataagtttaacaggaactccaccgtaaacccctttactaacaatgtttttagttacaactgaattggcagcgacaatcactttgtcgcatatatttaccccacgtgtaatagtagaattgcatccaatccaaatattattacctatatttatttctttagtattatatccttgagatattattggcttatcactaatatcatagcgatgatcatgatcaaaaatccctatattaggtccaaatagacaatctgatccgatacttattttttctaaagatactactttattattagtattaaaaaatgtattctctccaacataaatacttccatttatacattcgaaactgcaataatcttcgatataaacattattgccaagagataatacatttcctttacttattcttatttttacacctttacctatataaagtgattttaaattcttaattttaaactcaattctattgctatatcttatttttaataaaacaattctcattaatgattttaaatacttaatgccttttccaatcatcctttatttcacctaacttaaataataatcaaaaaaataacaaatccatctaccaaggctgttttccattatagagggaactcgactctctatgcttcctgagtaagcgattcacaccaaatcatagattttggttctcttcttaccagcagattttactaatagactcgctatggtctcaatctgctttcccgcataatgaaaaataatcatgacattttggactcattattttctttcatggcttaaaatttctttatattctttaagatgcaacttaaaatatatctctttattgaatttagcattgaaaatttcaaagcaatttctcttcatataagaatatttttcttcatctttatataattcaagtattttttctttaaagccttcaatatctttagcctctactaaatatccattatatccgctttctatttcttcgtttgttccatctatattggtagctacaactggaaccccttgtgaaaatgcttcgagtggagttagtggtaatccttctatataagaacataataataatacatctatatattttagatattctataatgttatccttagctcctagcggataaatataatcttctagtttctctttctttacaagttccttaatattacttagctctggcccatcgcctattaatacaaactttattttttcattttttaatgcagtactttttgcgatagaaataaaatcatagactcctttataatctactattctacttacctgagctgctataaaatatccttttttctttagctctaaaagcttattatcaacttctctactatcatgatcagtttctacagtattatatatagtttttatgttcttttcttctaaaccagccttttcaattaaaattcttttagctgcttcacttacagttattgttttaataccttttaaagatacattcgttaacttaaacttatcttctatacataaatgttgagtatgtattactttaactttagtaattttcgatattaatttagctaacaatgttgtcattctatgatgactatgaattatatctatattttcctttttaactatcttatatatagtcattaagttatttaatataacatcaggattcttggaatctgtatttaaaatattatagtgtttaactcccattctttctaaatccttagttaattcaccacccatacttgcaactataaccttattatcaccattgaacaatttgcatagttgaataatacatttctcaactcctccaagacccatacctctgttaagatataatatattcatcaatgatctcctttaatttatgaatgctggtctacattatccggctgattacattgtcaaactttctaatgaagtcatttttattagaactatatgtattacattttacagataactgtttataattgcttattacgctgcctaaatcttctatatcatatactccaataatctttgaatttttatctaatcttttagtaaaaagtatttgatgatcatcaacatgttcatcaaactctggatctcttggcactacaattggaaccttattatattggagaggatgaaatatacttcctggtcctccgtgagttatgattatatcactttttctcacatattcatccatttcatcatatccaatcattttcttatattcataatttttaggctcataattacagtacccaacttgagcaaatacttcttctttaatatctccactttcaattaatttatccaattgaataaataatctttccatgccttgttcatgtgttcctactgttacaaatatcaaaataatccctccaatacttgtcctcttgggtaaaacttcttttgttcttcccattgtaatataaataaatcgcttataggataaactaccttccccgttatagttggtttttctatcctatcatacacttcaatataaacaacttttgcaccgaataatttcccaatatagaaaaatggaattgcaggcgctgcaccagtgctgacaataagatctggtttttctttaagtaatatttttattgataaaaacatatttttgattaaattttttatatttctattggtaggaaaatagcaccaatactttttttcatctttaagtattgatttagaatcttccttttcaaaagttacccagaatctctccttatctttccaccactcttttaattgaattaaatgagttaagtgaccaccacttgatgttataaaacataccttcataatcttctcctccttaaccatttaaaaatttaccataccatagttagcattctttaagctatgagtttaaatggagttaccatgcccatctgaaaagtttcatttcattacccttgctatattaccattgctgtttttactttacttaaagctttttcttctaaattcaatacagattttcttccaattgaataataatctatttgtctttccttagcctctttaactttataacaatttctaccgtcaaatataattggagtatacattagttcttcatatacagttagatctaaagatttaatttcattccattctgtaaatataaatgccatatctgcatcttttaaggtttcttctggagtatttacatacttaacatcagtgtatatctttttgaaattctcaactccaactggatcatatgcaattatttcagcaccttcatctaataatcttcttacatttggtatagatggagcttctcttaaatcatctgttccaggcttaaatgtcaatccaagtacagccacttttaatccttttaaacttccaaatttattcttagcttgtctaaacagcttatatttttgattttcattaacttcaattgttgcttttattgtttttaattcatatccattatcatttgcaagccaatgaagtgcttttgtatccttagggaaacatgatccgccatacccgattccagcatttaagaatttatcacctattcttggatcaaagctcattcctttagctacatcttcaacatctgctccaaccatttcgcagaagtttgctatttcattcataaatgatatcttaagtgctaaaaagtcgtttgatgcatatttaaccatttctgcacttcttctattcgtaacaacaattggttggttatagccttcataaacctcttttaaaagttcttccgctcttttagattcaactcctattacaattctctttgcatataaagtatcgacaactgcagttccttgtgctaaaaattctgggtttgaagctacttctatttgaatattatttttaacattttcctttaaaaactcttcaattctatcattagttcctattggtaccgttgatttaaccactattaaacaatctctttcagcatttccagcaatttgtctgcatacattaaacacataatctaagtttgctgatccatcttctctttctggagttccaacccctatgaatatcaaatcagcatctttataagcatttttataatctattgtaaaatctaatctaccttcatcgtgatttctttttaaaagctcatctaatcctggttcgtatattggcgaaattccttgtttcatcatttcaactttacttttatctatatcaacgcaagttacattatgcccaatttccgaaagacatgctccggtaactaaacctacgtatcctgttcctgctactactattttcatacttacctccatatattccgtaattctaattgactaaatttatttgctcccatattacccatagctttaggcacaatagatttaaatttattatttcctctaatgcgccttattaaggtataatcaaaaaacaacacgtacatatgcctaaagtcacttaacttgcatgcttgtctccaaacagcacaaaaaatgttttaaatattaacttaatatcaactaaagtatttctttcccttacatacttaatatctagtttcatccaatcttcaaaatcaatatcatttcttcctgatacctgccagtaacatgttaaaccaggttttacttcaagccttgtcatcatccaattatcaaatttttctacttcttttggaagagatggtctaggtccaactaaactcatatcaccttttagaacattaaacaattgtggaagttcatctatgcttgtctttcttatgaatttacctattttagttactcttgggtcatccttcatcttaaacataggtccgctcatctcatttttatgacatagcttaccttttaactcctcagcattagcaaccattgatctaaatttgtacattttaaatacattcccatctttaccaatcctctcctgagagaaaattatagatcccttagattcaagtctaattaaaattccaacaattaaaaataatggagtcaagattattaatccgattaatgaacaaagtatgtccataacccttttaaaaaagtaatattcaatcctgcgttctataccttcttgaaaaatgaattcccctttattaatctttacttgttgcattttatcaccacctcataagaattaatttttagctaaatactttagctttttaatttatatttactttgataaatgacaacattttttcatttgttgattttattttatagacttttataatcataatattttgtatttctgcacttcttactaaatatcttaccttgtatgtctactataattcaacgcacaataaacgctatattaagcaataaaaaggttagttgctaatatagcgttttatgacaattatttaatttattttcttttttatggtatctgtgagacaaaagaacgtcccccttgccttatctattacgttctaggcactttaaaatcttacttacttttacttatttttaaaaaacgagaatattgatttctttatcttaactttttttccaacgaaatttataacctcattattgatcagctttttagagctctcttcaaagatattttcatttattatttcattattattatcatttaatatatttatagcttttctaaatccagtagttctgttatctatgtcatgagcatcagaaccaataaaattatatatattattttccaaaaatatatgtgtagttttcctaatactttctccaaatctacccgttatgcttcctgcattcatttgaaataagtatccttgatctataaattcattaataagtgaaggctcttctctaaatggcttatacctttctggatgtgctattataggtgtgatatttctaacttggagttcataaagggtatcaaatatattatcatcaaacttgtgcattgaaaattcaactaacatatacctcgaatcatttattgtccctattttaccctccaaatagttattaattatattttcattaaaataaacttcctgtccactatatacttttatatttataccttccttatttataattgaattaacttcttgtaccagcgatttaacttcaccaatagtggcttccccgtactctaataaataatgaggtgtcgcaactatttctcttgttccatctttttcttcatttcttagcatctctaaagtcatttccatatccttagatccatcatcaattccaggtagtatatgagaatgaatatctatcataacctcacctcttttagtgtataatttattttattgataccaaactttgaacctaggcttatgtggtaatcagccgaaatcacataaattttattccttatattataaactaacatttgttcactataaattatccttgtcttcatcatttccataatagtaagaatattttcctcttgtattctccaccgcatgcaatactgttcctataatattagctcccactttatccaaaagattttttgcatccattactatatctcttttcgtttctcccgcccttataactaaaatagtcccatctacctttgttgatagtatttgtgcatctgtaactgctttaagcggtgctgtatctaaaaccactatattgaattctacttttaatctttctattaggttactcatagcaaaagatgatagcatttctgatggatttggtggaatcttccctgatgttaaaaaatagaaattatcattccttttttgtactgcttcttcaattgcagcctttccaagaagaacttcagaaaccccaatcaaatttgagactttaaaattcttatgaactgaaggttttcttaaatcgcaatctactagtataactttcttttcattttgagcaaaagatgcagcaatatttcctgcaactgttgattttccctctgccatttctgcactagtaacagctattgttcttatctccttatcaaaggaagaatattgtatattagttctcaatgttctataagcttctgcaactatagatttaggtttatcttctactatgaagccggcatgaattctattatcaactactcttttctctaatttataacttttcattctatctgctttataactcctcgcttcttctaatttatatcgtttcattatttctagtgtatagccttttattttctctagtaacgacattatttcacaccttcctaacatcagactaaatttgctacattaataatcacaaagtacaacttgcatttgtttacaaataatttattaacataaccttcattttttaagagtagatgatttattttaattatctagcgcattaattgataaaaaataggatttctatctccgcttttcctgttaattcacatcacttaccttctttaaataagtcaggaataacgcctagaactggtaatcctaaaatctcctctatttcttccctagttctaaaagtattattaaagaactctaataagaaacttgctccagcactgcctatcagaccaagcaaaaggccgactcctatatacatttttttatttggactgactggtttttgaggtaccttaacactttctacaacctttacgttaccatttggtataaactctctagatgatcttataaactcatttgtaactgaattcactacatccccagctaatgcttggtttgcactcacgtaactaatttccagtatttgtgtatctgttcttggcgtaactgataaattatcaagaacattttctgagtttaagtttatatcacttgagtctatggccctttgtactaaatcattggtctttattatttctgcataagtctttatcagtttttgatacatttgtacatcattagtgctatagttttgatcctgaccagtggcattttcttttcctataaaaactttagtatttgcttcatatttaggtggaattataaaatagcttataattaaagctaacaatgtcgttactaatgttactaagagtatcattttccatctttttattattggatttgctatttcatcaattcttataatatcgttattcatcatttaaacttctccatatacaataaatttttcaatagtcctaaatacaataattatatttttagtaatttccttctctttcattcatatttttaaaataaaaaaatcctaatggaaaatttccactagaattaaccttttatacatttgcattactgctttccgttattcttaatccactgagaccacgatgtttcatacccaccttggttatctttgcaatatttataaaacatatttaaaaactctactcttgatttatcttcatctttatttgtttcctttagtaaatctgatccaccaatcaatttttgacggttcattatatcttcaaaactcacattttttgcattgtgcatcatatcatacatagacataaatgttgtagtcctgcctgctcctcctctacaatggaaatgtatccatgtatcctttggcagattcttaattgattcaataaataaatctacctgatcatctaaaggtttctcatgatctgtaactgtgattcttaagtagctcatacccaagcctttagctaattcttcctctgtttctacactttcaggattatcaattgattttactgtgtttacggactttccctttggcagttcatcaaacttaacatgcttgtccttagatgttttatctaaattgctcttttcatctaatataatttgttctctgctaattcccttattagcttgattattctttccaaaccaacttattcccataccattaataaatccatgattctcttggcgcaagtcaatatctatgatagatttatcacctattttttcttttaccatcgccaaacttttctccgaaagcgctccactaccagaaatatttagatcactcaatcctgtaaggttaatatcttttgttttctcatccttaattttatccttagtagtcctaaagtttttcggtaatacgtccttattatctgtatctattacaagtttcgttttattagcttgtacactatttgtcttttcaattgctattttactgcttttataatgttgatttatactatacataatagttgcccctcctattataactaaagctactattatatatgcaactttattcctcttcataaaatatcacccttccccttgatatttgaatatttttcactcataaatcttagattcttttgtgcttcgctaatgattatagatatccaactataatctatacttattcatatatctcgccgaaatgagaattatgctgttgttccagtttctaaggaatttatgatggatgattctaagatcacaagttgcatccaagatgctagcctcaaaggcatgctttgaactagcatacttggaacaacttttaatctaagaatcaaaaccatcaaattcctaatgaaacattccacaaaagcataattcttatttctagttgagatatatttcataatataaatcttacttataattgatttatctacataatggaaaagcactcaccattggcccagtataaaatagttatgtgaaaattatgtgattattcaaatgaacaccaaataccttgattaataaatacttaaacatatacaaatatcactagacatttgccctttgtactgtactctaatttaagatataattcttgaataaaatcaaaagttaatcctaccctctaagtgaaattgcctactttaggctgataaattcacttagtggtagctttttaaacgttaaagtataaaattaaagctaggctaaaataggtaattttagcctagctaagatatttccttctaaaatttcatggaataattttactcatcaatgcgttttttcttaagtgtcacgagttttctatgctttctatttttagatcttggttttatattcaacaaatctaatacaaacattaaaagaggtactccaagtaataacccccagactcccataaaatgctctgatactaaaagtgtaataaatacgacaaagactggcaattcagttttatctgccataaacctagggttcaatacataactctcaagtgcatgtaaaaccgcgataattataagaatatataaaatcattttaaaaccaccaactgtgtatgctattatacttaaaggtattaatgatgcaatagttcctgcaactggcactaagctaaataagaaaatcataactccaaggcctaaaacttgcggaaatcccaatgcaaaaagagctataacagataaaatactattaacaaatgcaataattatttgggcttgaattactttgccaaaggaatttaaaaaatttattccaaaatcttttgtgtacctatataatatagcaatcttactttcttgaaactctgaaagaaattcttttattttatctctttcaaccataaagaaaagacttaatattaaagatacaaatatattaaaactccaagtacctatatttgaagcatatcttaaaaattgatcaaacttcagtaaatcatttatttcagaattcctaaaaaatgacataaaatcaacctttccaaagtatggtacaatgtatgtagataaaacttccccaccaatatctctaaaatcaaacctagatatcttcataccaatctctgtaagctgtctaataattattggtatatacctgtagctggcaaatccaataataaaagtcataaatatgtataagaataatgttactattattggtttcactcttataaacttatctaaccttttcgtaattcctacttgtagactgtatgcaatatatgtaaataaaaatgtaagtaaaaatagattaagcattgatcttaatatatacataaaaaatacaataataagaagaacgcaaattcttctgactatatcttttttaaatagttctcttaagaaattcacatcttattcccccttctagtaattattatatcctataaatcatatgcttaaaacaagaaattccaataaatttttctatattaatagattcaaataaaataattgcactctggaattaattctctcaatatcttaataaattcttaataaattacaattattttctaaactgtttgtagtataatataagttattggataatattaaataatctattctactttacaaaaaccatatctagagagtaggcataaaggaggataagatgaaaaaaaataataaaattgcggcaatagtggcttcagcattacttattacgtcgatgtgcaactcagtcccagcattcgccgagcctagcgatagtgatctaacacttgaacaagctatacaaaacatacaggaatacgataatgaaattgaatataacatgggtaagttaaatcaattaaaagagcaaattcttgaaaaagaaaatgatataaaagataaccaagttaagcttgatttaacccaaacacaatttactgaaagagaaaaccagttatctgaacgattaaagggcatccaatttaatggaggctttgaagctacaccattacaatatttagacgctttattttcttcaggtgatattttagatgcattaaaaagagtgtcattgatttctcaaatttgtacaagcgataaggatttaattttagaaaccaaaaaatcagaagacaagcttttagacattaaaaacaccatagaaaaagaaaatcaagaattgcaaactggtaaagatgatgttgaaaaacaaattaaggacttggaagataaaaaagatactctcctaaaatatgtgcaagataataacgcactattaactggagatataggcatcactattcctgtgacattaccttctgatattacagatcaggctaaaggggtcatagaagaagctgaaaaatatttaaaagttccatatttgtggggaggggaatctcctgaagggtttgattgctctgggcttatgcaatatgtttttaactctaaaggaatctctataccaagaacatcacaagagcaacaaagttttgccaagcctattagcatggcagaaattaaacctggagatttagtcttcaataaggtttcagattcaacgcatgtaggtatgtacataggatatgatatgtatattcaagctcctcatactggcgatgttgttaaaataagtaagttaagtacctcaaatatgaaatattttggtagagttctaaactaatattaacttaaaattttagtaatccaagtgctaaattaacgtgagttcgatggaaaaatttaagggataaaaaatcccatcaaaatgttttattatataaatgcgaccaaataaataaaacaaaggatgggattttatgcaaaacttattagtggaaatattttatgatgtagacaatttttgtattggatttgaaaattactgtaaaagtcatttcctaacggaaaatagcgaccacaaatttgcaatgattaaaagtaaaactttatcattaagcgaagttatgacaataactatctactttcatttgtcaaattacagaacttttaaatcatactatattgagcaggtgtctactgttctcaaaccgtattttcctaagcttgtgagctataataggtttgttgaattaatgcaacaatcattagttgcactactattatacatgatgaaatttagaactggcaagtgcacaggaatttcttttatcgattctacaactttgaacgtatgccataatagaagaatacactctcataaggtttttaaaggaattgcagaacgtggtaaaagttcaacgggctggttttatggttttaagcttcatcttgttgttaacgataaaggggatattctctctttttatctaactccgggaaatgtagatgatagagaaattaagactatagaaatattagcaaaagatttatttggaaaactttttggtgacaaaggttatttatctaaaaagatctccgatattttgtattccaaaggtattcagcttataacaaagataaagaaaaacatgaaaaataaattaatgttaatggaggataaaattcttcttaggaaaagagctatcattgaaacaataaatgaccaactaaaaaatatatgtcagatagagcataatcgacatagaagttttactaattttgcggttaatatagtttcaggattgatttcgtatagttttcttcctaagaaaccttctcttaagttggacaaatatctaactatggaataattggaatatcgaaccacaagattacaaggatacttttttgctttttttcataaccatatttacccataaaatattctagcttttcgaactcacgttaatataaattaaatattattttttttggaaaatgaaataattacaacccccataataattaaacctacacctaaatactgtattcccgaaacaacttcacctaataaaatatacgataatatcgatgtaattataaaagtaataccataagaaatggctgaaaaatacaccaagtttaatttttgcaaaataattaagcataaaagaaaactagctatataaaataaaaatccaactagcaaagtaatatttatgctcatattaatactactttgcttaaatgacaaactggatttactccctcctaatctaattaaaaccatacctagagagccgatcacagcatatattaacattaaaatacctttcattttacctccataatattattaaaatttaaatgatacgaacattactccaacaataatagtaataacacctacaatctcaattaagtttattttctcttttaagaaagtaaaagcaaaaatagctgtaaatattatatttattccataggcaatgggtgatatatacactaccgggaataattgtagcacaatagaccacaatccaaagctaataatatacaataatattcctagaaaaagcctataatcaaaactgatactaattctcttattaaatctattaatctcaaaccctttaccgccttttttcattaacaccatgcccaaagcagcaaaaatagcataggcaaacaatagtaaaagcattagcacaaagttacctccattttctatttcacttaaatctcaactataattatagctaaacttttgtgttattttctagttgcctaactcttttctcgagtaaagcaaactgttgtattaattgtttatttttttctttcattttcgatactattgcagtaattgacatcaaaataattaatacaaaaaatagcataagtgcaaataatccattagttacatctactattcctaaaagactagtaataattatcataatcttaggaaaaatagcaataatcaacattagtgttcctgatattatccacaataatgtatattttaaattcaagctttttattttaattaggtacagtaatatacagaaatacacaagtattccaccaataagaaacagctgtaaaactacattcattttatgtcctcctcttatcaaatgttatacgatacaaaattatagcaatagagacctttatcatatagtaaatagacttaattggagaaatcgaactttccccccctaatctctcaaacattacaactggatactccaaaattcttgcattatacatcgctgcatttactattgcttctggctctggataatcctgtgcatattcttgtgcatatatttctataaattttctgttaatagctctatatccacttgtaacatctttaactttcgttccagatactatactaattaaactacttaagaaattaattcctaacctacgtactatagtagattgaaacccttcattttgtataaaacgtgaacctatcactatatctgcatttcccttttcaattggttcaattacatccttgaaaaactttgggtcatgctgtccatccccatccatttgaatggcgatatcataaccatgctctaaagcatacttatatccagtttgaactccccctcctataccaagatttacaggaagatttatatagttatatttgttttcctccaatatctttcttgtattatcacttgaacaatcattaatcactatataatcaaattctgaataattatttataagattttctatcacttgctttatattttcttgctcattatacgctggaataactataagtgttttcaagtttctcacccactcttttctttttttatacaattattattcttaaccccagtaacgtaataatattgttaaacttgtgataatagcaaaaactatacttacaaaataagcgaattttgcatttgaattcataagtttgttgattacttcatattttaataaaaatttgtttgcaaatattccacatacaaaaggtgctattggaatgaaatagcgtccttgaattccactaacagtatccccatacaatggtgctactaaaggtgtccaattaacatacattgctctaaatgaaaaatatacaaatataactgcagccactaatccaaataatttaaaattaatggttactttcaaagctttgaagctatcaaccaacattacaaatattaggattagtccaaaaataattattaatggcataggtaaatttgtatccaattggcctagtgttcctacaaaaccagttatataaaatgttttatatgccacaaatgattttagtattaaaggaatcattattccaaagttcttctttaagtactcactttgtaaagctacatttgcatttacgttactatcactttgtaatgaaaataggtcacttttatttatttgactaaatattactgcaacaatgcatataacaagcgtagtcccaattattttataatatcttttattatctccaaatttctttttaggaattgacaagagaactaaagcaaaaggtgcatatgcttgttttaccgaaaataacataaacataatgaaacatataataataatatcttttaatactattttttctgattcttgcaactttaacgtatatgcaaaaagtaaaaacatagaaggtattattaatgcatcataggatattgatgcccccaaatatatgctcattggcattaatgccagtaagaacattgaatttttataataaggagatattttaattgcataagtcattgaaataacataaaatattaaattaaacattcttccaaataacaacaaattaaatggagtttcaacagatctagataataatatttttcctacaactattccgatcgatgaaaatatgtatgaaattggatttatatcttgactccaataactagtaaaaactttatcttcgttatctaccgttagataactattaaaatagtattctttaaagttgtattttttaccatccatgcctgcgaatttagatttgttcccatctacaaaatccaaaacacttttaggaatatactttccaagtttttcatcagatttttgaagaaatatttgtccatctgcaattgtatatgagtttaggaaatgtgtattctcatctggaactgtcattggtggactaaatacaattaatatcattcctaatattatagcaatattaaaaaaataataatgcagtttttctttaactatgttcattattaccctccctagaataatcacatcatttaactacaagatttttttagaactccatgttttgttttttattttgactttacttctaaaagttattgacttcgcctttgcgtattattaaaaatttctcatcatgtattttatgcatataaatctaaaatttcttgcttaatgctctcccaatctcttgatttagcagtttctaatccatttcttattaacctttcacgtaattcattgttttcgcaaactttattaataaactcaacagccatatcaatattaccttgttcatacaataagcaatttttctcatgaacaagatattcaacatttccttcattaggcgcaacaattgaaatcccaccagttgccatcatctctaaaggtggatacgaaaaactttctaagatacttgatttgattaatatatgacattgtttataaatattcggtactttctcattaggaaccctatgcaagaatttatcaacataataaaattcctttggttttccttgataagacatataccatatttcaaatttattcttatctaatttatcaatgattttgaaactttcatctacgtttttataataatcatcactatttccttctactaatattcttattttttctctagtaaaatctctttcaacactagtaaacctagataaatttataccattaggtgcaaatttacatgtcttttcataatctgattttaaccactcctcgcaccacttagaaatagttatatatttgatatcatgattatcgcaatatgttgaatttgcctttaatttgaaatattcaccatcttcataaaaatttgtttcaaaattttgtactatataatacttctccttaatattaggatacaacaataagaaatctactgtagcccaaagggtagcaacacacttatcaaggttaccatgaattaatacttcctgtttagaaaaacataatatttcttttccttcgtattttaaatttttattttcaaatccttcatttataatcaacacatcaaatccagcttcttttaaaataagacaatgttttaaaactactaatacaccgccactagtttgtacagatggtaatataaatgctatattaggtttcattttgctcctaatatattttgtaaaatgatgtgcagtatatgtggtaatacagtttttataagtatatttatgtgcattttctgcgatttgctttctataatctgaatcattaattaatttagttaacacttcataccattcttcattatcagaacataaaaatcctgtttctccatgagaaatcattttcttcatagcgccaacattacttgctactgtaacaaccttaactaaacttgcttcaacccatttattttcagatttcgcttcattaaatatgctttgctcaacaggtgcaatattaatatctacaccggcaatcaattggggcaatctttcccaattcacaaatggattagctattaccctgtccttaaatggttgtatttcatttggtatatctaattctccaacaatatgtaactccacattagaattttctttcataattctagttataacaggcaatatcattgtaaaatcatcattatgggttatgctaccactgaaatatccaatttttattttacttgaattagttagcttcttttgtgctaaaataattgcttttttttccttcttatttttagctaattcaatcttcttaaaaggcaatacatccctattgtaaacagccttattggaaagttcaaccatcctatttgatgcggtatttctattaatatatacttccggaacataattcctcaattcctcagctaatctttcagtagtagttattgcactatcacacatacaaagtgtctctctcatcctatttacaccactatcgtaatttgccttttcttctgatgttaaagtttttaagtattttatagaatctgtatacttagtatcaataaccaggtcatcaatatcaaatataacagttttattatgttctttagcaatcttgataaaatctctaatagtatcagtaataggacacctaaaaaatataaaaactctataatttcttattaaatttaaagaaacatcttcataaaaaatttcatcagacaatatccctccagctaacaactgctctctttgatgagaaaccctgtatctcgatggatgtggcaaaaaacatccattaataaacaacacatcaagaaattgtttgtccagttcactttttctttcgatatttttgcattttttaatataacttatagcctttttaattaataccactactccatcattttttaaagtatcaatactcttttgcataagcatctttaaacgttccatgaaacaccacctaaaaccctttttcttttaattttttatataatctaatacttctcttaatagttttgtaacttttaaaattccactgttatagctcaaaaaaatacaactttttgctaatttctctcatattgatcgcatatttccttagcatttccgcacattttaaccgtcccattttcaagccaaaccactttgctgcacatttcccgaatttggattaaactatgtgaaacgaaaagtacagttgtaccaccgctcataagttctaacattctgcccttgctcttttcctgaaacttatcatcccctactgctaaaatttcatcaacaatcaatatttccggatttactacagttgcaatagaaaaagctaacctcataagcataccagatgaataatttctaataggtacatcaataaactttcccaattcagaaaatgccactatttcatcatacttttctagcaaaaattcttttgaataccctaatattgctccatttaagaaaatattctccctaccagttaaatcatggtcaaacccagaacctagctcaagcattggtacaatatttccatctaccgtaatcgctccctttgtaggttttagtattccagatataacctttaatatagtgctttttccggcaccatttcttcctatgataccgacaacttcgcctttattaacttcaaagctcacattctttaaagcatgaaattcctcatatttcaactttccctttataaaggtcataagatattcttttatactttttattctatcatatgacattttatacgtcatacatacattatcaacttttatcattcttactacctctttataaatttaatacaaatttgtcttgggttttcttaaacactaatgctccaatgaaaagagttcccaacgaaaaaaccatacagtacaaatatgacattggttcaggtgatactccttgtaaaatagtaattctcacaaatctaataaaatgatacattggatttatttttaaaataaatccaaatttatctggaataatagtttcaggataaaataatggtgttgcatacatccataataaacttactacattccataaaaattgagtatctctaaaaaaaaccatagctgaagacaaaataaatgccatacctatacaaaataataaagtacaaataagtccaaatggcataaggagtattgaaaaagttatctttgtacctgtaatcaacattacaaataataaaggtattaaagataataataagttaattacagatgaaaacactctagatatcggataaatgtatttaggaacataaacttttgttattaaagatgcattgcctattatagacataagccccattccacaagcttccgaaaaaaagttaaatacaaccacaccagataataaatatactggaaagttaggtatatcgcttttaaatactgtagaaaaaactatgtattgtacaagcattgtgagaagtggattaaagaaactccataatattcctagtacagaacgcttatactttgttttaaaatctctttcaactagttggtgtaataaaaattcatattttacaaatgccgtaattatattaagacctaaactctgttttttatttttttgtttcaatattaaattaatcatatatgctattaataaaagaaatcctgctgcaaatataaaccaataatattctccaaaccataatttttcaccgcattcaactgaaaatgataaattattctgatttagctttccatttatataaagaggaaagttgttagtgtcttttgccgtatataatgtaacagagttatttctatcagatatatcagaagttataattaatgctaattcttttcctttaacaccatttatcttattttcaatgttaagaaagaaatcactattgtcttttagattagaaacatctattacttgattaaatagagtacttccactttgtttatctattaaattaacaaataaattccctttatttatacgagcataagtagctacttttaaactaattttatttataatatcagcatttactgaaaaatcctgctcaatcttagtattacttaatatttcacctactggagaatccacaacctgataagatagactactattacttttacctatatgcaattgttccccacctataaaatagaatagtgttcctgcaattaaataaaatgcgattaatataatactaattttttttatatttatcttcctattcatctctttctcctcttaattctatcaaatatctatctaatgcatccttccatattggcaaaatttcaaattctgcatcaataagactcttttttgaaagctttgaatttaaaggtcttatagcccttgttggatattcctctgttggaataggatttatcaaacaatttaaattcgcctttttcataatctcactagcaaactctgcccatgagcaaaatccttcattagttgcatgatatactccatatttttcacttaaagccatattacataatagtggtgctaaatctactgtatatgtaggacttcctatttgatcacatacaacacttaaactttctttttccttacctaatctaagcattgttttaacaaagttattcccatttactccgaaaacccatgatattctaactatgaagtatttatctaaaattccttttacttttaactctccttcatatttagacttcccataaaccgaaagtggtttcatgcttccgtctatttcaaatggaatatctccttgaccatcgaacacataatctgtagatatgtaaatcattttagaatttattttcttgcaagcatttgctatgttttctgttcccaatacattaacattataacaaattttcttttcgtcttctgccctatcaactgctgtatatgccgcacaatgtataatacattttggctttaaagctagaatatattcataaacagcgttactgtttgtaatatctaattcttctctcccaatccctaaacatttaatatttcgtttatttaattcttttatgacatcaaatcctagttgtccattgactccagtaactaaaatcatatttttccgctcctataatatcccttttttagtcaaagcaacaatatatttaaatataaactctggcaaaaaaggtagtataaactccactaaaatggagatcttatgaaatcttctgtactttatcattatttttagatcattaattgatggattattaaaatacctttttctggctctaatccatagtaagcacttatatatttcttccttaacttcttgttcgtctactaatcttttttgcaacgatgtaaaacactcaagaaacttttctatcctcatattataatatgtctttttatcacttattcccgctaagattccagtttggttaaaactatgttgcctatatcttaccagacttttatctataaaatctattttcccgtttaatgctgctataatagcaatccattgatcatgaattaaagtactttcaaatggtattgcttcatatgctatatctcttctaaccatcattgcacaaccagtaacaaaattagttattaatagttccttggcaagactatatcccgatttaaacttatgcctttttcttatttctgttatgctatccgccgtttttttactatattcatcgattatagaaagatcgctacacgcgagggttacatctttatctaaaaatctttctaccattatagttattttgtcattttcccaaatatcatcttgatcacaatacgcaaacaattctccattccccatttttgtaagttcttcaaaagccttattagatcccgtattttcaagacctttcactattgcatatggaaaacttgttatatgcttttttattaattcttcactagtaggaaactcagggcaatcatcataaactaatagttctatatttttataagtttgctcatttaaagaaatcagctgttcaataaaccatacttcattgggcttatagacagctaataatatagacactaaaggtttatctgtttccatacattttctcataatagtttttatattcaccactgattatattttcccaccaagacttattatctaaataccatttaatagtctttttaatcccttcgtcaaagtttgttgctggaaaccaaccaagttcattatgaattttggtagggtctattgcataacgcatatcatgccctttacgatctgttacatatttaattaactcttctgattttccaagttctcttatgattgtttttactacttctagattggtacgttcgttatgtccacctatattgtaaacttccccaactcttccattatgaattattaaatcaattgcactacagtgatcctctacatataaccaatctcttacattttcaccctttccatatacaggcaaatccctatcatttaatgcatttgctatcataagcggaataagtttttctggaaagtgatatggaccataattattagagcagcgtgaaattgtcactggcaaattatatgttctataataagctccaaccaaaaggtctgctgacgccttacttgctgagtatggacttgatgtgtgaagcggagtttcttcagtaaagaataaatctaacctatctaaaggtaaatctccataaacttcatctgtagatacctgatgatatctctttattccatattttctacaggcatccataaggacttgtgttcccataatattagttcttaaaaatatttcaggattctcgatagacctatccacatgactttctgctgcaaagtttactacagcatctggattttctttttcaaacatttcataaattgcttttctatcagctatatctattttataaaaactaaaattagaattacctttaaccgatgccaatgtttccatatttccggcataagttaaagcatcaatacaaattattttataatcattatatttattaagcatatagtgaacaaagtttccaccaataaaacccgcgccacctgtgacaacaattttcatcttctacactccttttcaatttacagtaaacaatagtcaattatatattattaattatttattatttttcatatataaaactacaatcactatctttaagtaatggtgcctttttatccttttctgaaagaactggattttctattccccaatcaacacctatttccggatcgcaatagcaaatacttctgtcactctcataattataatagttatcagttttatatacaaactctacatcactagtaagcgtcacaaatccatgtccaaatccccttggaataaataactgtcttttattttcagcggaaagctctacagctatccattctttatatgtcggtgacccttttctcaaatctactgccacatctagcactgcacctcttacacagcgtactaatttagcttgagcatgttccccattttgaaaatgaattcctctaattatccctttttctttagagtatgattgattatcttggcaaaagtcacaagcaatttctggagtttttattctagaataagtttccataaaccatcctctttcatccccaaaaacttgtggttctactatgtaaacaccttctagtttagtttctatcaaattcattgcaaatacctctctttaattttctgttaataattaataaataactttcccttcagcaacattttttaaatgttgcccataaggactcttcccatattgctctgcactttcaagtaatattttcttatctatccagccattcttgtaagaaatttcttccaaacaggctattttaagaccttgtctagtctcaattacttttacatattcagatgcctcagtcaaactatccaccgtaccagtatcaagccacccatatccacgtccaagtgttattacgtctaagtttccattttccaaataaattttatttaaatctgtaatttctaattcccccctatctgaaggctttaattttcttgcatactcacataccttattatcgtaaaagtaaagtccggtaactgcataattagatttaggaacttctggtttttcctctaaagaaatagcttttccattttcatcgaattctactacaccgaaacgttccggatcatctacataataaccaaaaactgttgcacgcccatcactttccacagctttttttaaatgcttagttaatccatttccatggaatatattatctccaagtatcatagcacaattatgatttccaacaaattcttctcctaatataaacgcctgtgccaacccatctggagatggctgctccttatagtataagtttattccatatctcgaaccattgcctagcagattttcgaaattcggcaaatcctttggagttgaaattattaatatatcccgaatccctgctaacataagagttgatagtgggtaataaatcattggtttatcatatactggtaataattgttttgaagttaccattgttaatggatacaatcttgtcccacttccacctgctaatattatacctttagtcaaaattatcacttctttcactgaaatttaattttttatttaaatcttaaccccatacgtctatatacaatctccataatatttgttctacagttctataacttaagaatttgttgtaaataatcaacttaaattaatacatttttcacactctactcccaattttatcacattctataatataaataaacgaattttacaatatttatgaattggtacttatttcagctaatacataattttaatacgtaaggcacaaagtaaaccgtatgttttattgcaaacttcctcacaaaatgatattatacagctaatagtaggatttaatgatattataaaaaggatggatagaaatgataaaggaaaatcaaaagtttctaaataaaattaatgcactttcagatattataattttatttatctcaatgactttagcatatttgattcgtttttatatattttcacccgatacagattacattaggttaattacatatatagagttttcagttgttataattcctataaaccttattatttttaatattttcaacttatatcattcttttagagcaacgtcatttataagagaatgtaaccaagtaataaaatcaaatactgtccttacagctatattattatcactattatttacattgaaattagtacacatttcaagactggttattgttattttttattttgtaaatataatcataattatagctaaaagatttcttttaagaagaattctatcaaaaatgagaactaggggtatgaacttaaaacatgttataatcgttggtgctggtgaagttgcaaatgaatatctgaatgttataaatagtaatagaagcttcggatataattattctggatatgtatccaacaattcaaattttgaaggcgaaaaacttggagaatatagcgatttatatgctgtattagatgagtataagcctgatgaggtagtttgtgccttagacatttctgatgcaaaatacttggaaggagtagtttcagattgcgaaaagagtggtactaaaatttccataattcccttttgttacaagtacattccaagtcagccatatatagatcaaattggaagtatcccgcttattaacattagaagaattcccttagacaattggggtaatgcttttatcaaaagaactttagatatagtaggatcatttattttaataatttgtacaagccctattatgatatttactgctataactataaaattgacttcagcaggacctgttatatttaagcaaaaacgtgtgggcctaaacaaaagcttatttactatgtataaatttagatctatgagagttaactctcaccaagaaacaggctggagcacaaactcggatcctagaaagactaaatttggatcttttattcgtaaattttctattgatgaattaccacaattctttaatgtattaaaaggtgatatgagtttagtaggtcctaggcctgagcttcctcactttgtcgaaaattttaaggatgagattgctctttatatggtcaagcatcaagtaaaacctggaataactggatgggcacaagtaaatggctataggggcgatacatcaataaaaaaacgtattgaatttgacatatattatattgaaaattggaacatattaatggatataagtatattatttaaaactgcgtttaaaggctttaagaataacgagcaaattattaaaaatagtaattctaaaaatattgaagataacggagttcaattatgaaaaagatactttttgtagcttcaactttatcacacattgaaaatttccatattccatacttagaacaatttaaagaatgtggctatactgtacatattatgggaaagactaataataagtgccatatctcatgtgctgataaaatcatccctattccttttgaaaaaaatatgttttcagtaaaaaactttgcctttgcttttaaaatatcaaaaattatgaaatccgaacaatatgatatcataagcattcatacatctctagctgcattctttgtaagagttggaataatgctatgttccaaaaaacccaaattagtcgttaataccgttcacggctatttatttgatattaatacttcctttttcaaaaaaaatattatgcttctagctgaaaaatttactaaatgtgtaactgatattgtaattgtaatgaactcagaagattataacatagcaaaagaaaataaattatataagaaaaatttatttttaattaatggaatgggaatagacttaacccgatttccttcagtttcatacagagataaattattacttaggcgagaacttaattataaaggaaatgactttattttgatttatgttgctgagttctctaagagaaaaaaccaaaaatttttattggattcagttaatcaattaagaaaaagcggttttaaaaatataaaattacttttattaggtaatggtaaattttttgatgaacttcaatcttatgctagagaattaaatataaatgataatatcatttttgccggatatacaaaagacacaaaaaaatattatcaaatgtctgatgtatgtgtttctgcaagcagaattgaaggattgccattcaatataatggaagctatgtcagtgggattacctattgttgcctcaaaagtgaaaggtcatacggatttgattattccaaacgaaaatggttttttattcaaatataacgacatagatgatttttgttcttatattaagacactatgcaaaaataaagaattaagagataaaatgagcataaaaagcaagaacttttcaaaaagatattctataaattcagttttaccaaatactgtagaaattattcttagggaatataataaaacattataataaatgaattactttaaattaattatatgttgcaataataaatttacatctgaaattccagcaaatcaagtactcattgaggctataatgcagaacttaattacaatatatataataaagttttagcaaaattgcaatgacttatgttgagtgttataatttaaataatttgtatcaataaaattacaaaaataaatatattaggatgtgtggaaattggagaacattaacacttttttcaagaaaaaaaatattgattttttcttcccaattgcatttgtactaaccataatacctttaattgttcgtttagcaacaactaatgcggatgaaaatactctgaatatttttggagaaaaagcccaaagagaattattctctcaagataaagccttcgttctaatgattttctgtatagcattagttattattagtattatcttttttaagataatatttcaaaagaaggatagaattgttaactccgttataattgcaggcagtatatttataattttcaccttgctttccgcaatattttcaaattataaacaagtatcattttatggtatctatgatagagctgaaggttttattacgattgcctgttattttattttatttatttattctgtttatacatttaaaactacaaatgattataaatatgtaatcacacctatttttatattgattgccatcaattcattcttaggtctttttcaatatgttggacaggatttgctaaaaagcaagttaggtatgtccattgctattcctagtgaatatcgaattcaaaatccaggaatagacttagcctatgaaaaaggaaaattatacggaactctatttcactataattatgttggaagttttgttgctattgttttgcctatattattttgtctgactttgcttgaagatgaagatattttccataagttaaatcttggattcttttcgctactttctatatggttattgttcggaagtacttctcgtgctgggattattggtattgtagttgcagctatttttgcattaattatattttggaaattagttatagaaaaatggaagcctcttttaatagtcttttcctctttattaattatagctattggaattaatttcgctactaaaggctctctttttcaaagggttcctagcttaataacagatactcttagtgtatttaaagatactagcgattttgattatagagaccacgtgcctattagagatgtaaatcacgtagataaagatgtacaagttatattacaaaacgatactttaaatatttcttatgagaataataattatgtattcaaaaattcaaaaaatgaaatcattagttatgtcaaagggaatgttaatggaaataaactttacacaactaatgatgaaaaatttaaaaatatctcttttaaatatggaaaattctatcctaattcaaatagagatgatgctttacttttaaatctagataaccaaccaatgtttatgtttaacttaaaaagtgataatagtattcatctaataaacttaaatagtaaaaaagatattgatgtggagttccctccaactgttggatttaaaggaaaagaaaaattaggatctatgagagcttatatttggtcaagatcaattcctatgcttaaggacaatttaatactaggcagcggtcctgacacttttgtttttagatttcctcaaaatgatttaataggtttatattatgcatacggttcgcctaatacaattgtggataaaccacacaatctttacctacaaattgcattaagtgatggaatcattgcactattggcatttttagctgtcatggtaatttatattattgatagtatgaagctttatgctttgaaaaaagattttactagatctcaaaaacttggtgctgtaacatgtttaggtgttataggatacttatttgcgggaatcttcaatgattcagttgtaagtgtagcccctgtattttggatagttttaggtgttggagttgctcttaactatatgaatcgaaaagaacttaataaaaagtcaaataaatagagacaacaaataagggactatctaagttgatggtcccttatttgtttcctatataaatcacttcaataaacaatatataattaactgagctaaacttctatcttaccaaagctccatccgctccgattttgtaatttccaatcatagtattcacagacattaccccagattcatttaagtaataccatttaccatttgtatctttaaaccaacctgtcttcattttcccttgagaatctaaatagtaccagtcagctccgagttgcttccaacctgttaccattgcaccattttgatccaaataataccaatccccattacttgccaaccatcctgtagccatatttccatcttggttgagaaaataatatttcccatagtttctatcaagataccaggtattttttatcggatttcctgtagaatcgttatattgccaatttccatttacatttatccattggtttagtttgtttgaaatagcagtgttctgtccgccgctatttgtatctgctttagtatctttgctattattagtactagtatttactgttgcactactcccttcactagttcctctatacacagttaaagtatagactctcttttcataatcatcatcatcatctttgtctgcatctgtattaacctgtatctcaatcacatttttaccttttactagagataccctttttctatttttagaatcagctgtcgtaccattaatttttactatacttgatccttcctctggttctgccttaactataacatcttctgatgattccggaacatttgcactataggaagttatcttcttattaaaacttggagtaaatttaacatctccgtcatccaaaactatatcatctagataaattgggtcctgatcattatcaaatttagcattagaatcagtatcatttatttttgaagaattttttcctctatatacatttaaggtatatgtttttgtattatcatcatcttcatcatcttcgatatctattgatattgaattttctcctttagaaagattaacttctcttctaaatttatcatcttcatctacttttattccatcaatcttaactatataattatcattttccggcttagcttgtactcttaattgacttacattatcgggtacatttaaactataagtagtagttttcttgtcaaaatctatatctccataatctacatttatattatctaaaaatactgaatctgaatcttcagactgttttccacctctatgtattttcaatgtatattctctttctttttctccatcttcgtcttccacttttatatcaaatgtattaacacctttatctaaacttacagtctttttgtattttgtatcaccttgcttatctggattactatctccatcaatcgtaactttatctgtctttttattagtcgtaacccttataaccacatctgtatcagtatttggtacattagttttataggtatttttcgaactattgagaactatatcatctccatcagtaacatttataccttttagataaatgccgtcatctgcataagcccttgtagtcattacatgagcatactttgcaggctctagtatagaaaatgtatttattgcaattaccatcgcaataattcgtttaagattattattcattttttctccccctattccttcttatatcatttatatttctatctaactctaagcaatccaacttccatcactacccaatttatacctgcctatcatcgtatcatgcatcatgactccgttagattcgtttaaataatagtatcttccatcactatctttaaaccaacctgtcttcattttcccatcgtaatctaagtaataccaatttccttctacctttttccaacctatctccatagctccactattatctaagtaataccaactattatttaatttcaaccaccctatgaccatattgccctcattatcaaagtaatacttttttccatatgtattatcataataccaagagtttcttataggattgccatagctatcgttatatctccacttatccgatacttttacccatttattatgagcagaagtattggtaatattattttcgttatcattagaattattcgaaccattcccattagtaacggttattggggatttattatcactactattcgcattattctgatcagttacattcgcagaatcttctctgtctatatttactatataacttctcttttcttcatcatattgagaaaggtctatttctattttgttattccctttatctaaatttactgttttcttataatcatcattttcatctacaattatattattaatcctcacttctattgaaccatcttcaggttcagctttaataggtatagatttaacatccttgctaacttttacactataagaagatttttctttatcaaaatttattggaatatcaccgtaatccaattgaatgttttttaaatagatattatcttgattatcacttttaattgcattttcttcttcacttgtgtatctcttcacaataactttatattcttttgtacaatcagttggtttatcttcatcatatttatcataaagccttatataaaaagttgtctttcctgttaggactggtatttcgtctcccttattatatatctttttactattactcttgaaaattttaatagtaccatcaaaaccacttgtatcaaaaaccacctttgatctgtcagatgatatcttagcataataagttctttcaaggcttttatcattattgagttctttggtataattatcattttcataaagatttatatcacctccgccagtattttctagcttcagatcagttaattcataactagatgcataaacagttttttccataacacttagagtatttgaaaattcaactgtcgaaaaaatactaaccaccatagagaatgaaattatatatttaatccctctattcataatattcccttcctttctatatattaataattttaacatttcaattatttatggtcaattatttaaaataaaaggtaaattaatatataaaaaaggatgaggcaagagcctcaccctttaacttggataaagtattaatttaaaatattaaatattatttaacccaagctccagatggtcctacatagtatccatcaggagttgtagtattagctaacatagcacctgatgcatttaagtaataccagtttccaccgtcatttatccaaccagtagccatagctcctgatcctgttaagtagtaccaaacaccaccaacttgttgccatccagtagccataacaccgtcagcttttaagaagtaccaagctccaccaacgttagcccagttattaacaactttagcaccagttgcatcgtagaagttccaagttccatcagctaacttgtcccaaccaactttagctggagccggttgaactattgcaccagcatcatcttgagcttgtttctttccttcattaactgttgtgtaagcgtctccgccttcttcccagataatcatgtctttatcgtcataaacgtcaatcttattgaatgatctatcaacagtgtaaactgttttaaaatctccacattttgatgattctaatacttgaccatctttaactgcccatacatttccttcaacgtctactgagaagctatcaacgttatattcatatttgttatcttcaatcttttgatctttatctgtgtctttaacaactacatgtccatcaacttttgcagcagttctatcgttttggaatttaagcttttgactagtttttaggttcatttttacagttttaactttttcacctgttctaaatgttacatataatgatccatctacaacatagtattgtgctctagcattagtgtattcagaatcagaatctgacatgatagtgttatatgcatctttagcatcaccatcacctaattgatcttctgttcctaattggaaagattctgtagactttggtaaataagcatctttttccttatctccaccttgagccttagaaatcttttggatgtagtatatatcttctgcaggtgtactagtcttagtacctactgctttagcaccatcaacatgtacttcaactaatctatatatatatttgtcgtcttgagctaaagttgcaagtggtgtaatactctttaaagttacagtgttattaccagttgtatcagtatcaccaagtgattctaatttaaccattttttcaccgttgaatacatatatatttgcttccttagaacaatcaatataagttcctgattgatttgtgtatccagtataaacttctgctgcaccatcagtagttgtttttactgtatctacatctactgttgcgccttctctagtagttgcagtatattcataccatacttcaccaaatctgttattcttgattttattgagagctagacctgctattgctttatttccatatctatctgtcttttttaatttattatttaacttagttgaagcagtttctgctaaatctgatgcagtatcatcatctgatatctttccatttgttaaatctacaatatagttattgcttccatctttaccttcaacaaatttgtcgtcatattttccataatcaagatcaatttctgatgcatcatcaagtctcttatctttgtctccaccgttatagtataatgccttatcatcatcatcagttctataaccttgataaagatatttcccatctttgaatgctacagcagtttcaattgtaccatccttagttcctaacttgtctgctgccattgctggtactattgccataactgatgcagcagctactaataaagctgtaattttgtttgctcttttaaacataatttttatttccctcctaaattttcgaattcagataaattatagcattattgtacaaccatgtaaagctataatgctttataatgtatatttttgtataaatatcattcttaacaattatattatatgtaatttattccaaaaatacatttatcattatattctatcatactttttaatacttgtacataaaatgcctttaaaataattaatttcattaactagaaagtctttcctaagacgtcaataaataatacaattcaaattttcattttaggtacctttttttaaataacttataaattattttttaataacctatgaaaatttttttaatacataatataatgcaataattactacattttatagttacatttcactatattacaaaaaatacatttaacatgaactataacctaatatcaccataaattcattatattatacaatcgtataaatatatttaggtacttttttacttcctcaaattaaaactttccatatttcatgtaagttttccatactctttattatatatatgttcctaactatgtattcttctcaaaaaaataatttaactccaaagcaaagcattatacattctcttatgaatttattttaaaaaagttattcaaaatagaactccattttgaataacttcttcattttattttatccaagccccatcatttccaagtttatacccataaacttctgtattcttagccatagtaccattctcttgaagataataatattttccattaacatccttaacccaaccaacttgcattatcccttccgagttaagataataccaatttccattagtatttgtccaccctctctgcattgctccagtgctatctaaataataccactttccattattaaaaatccatcccgttgccattgttccatctgactgcaagtaataactcttgcctatatttttatcatagaaccatgtattttttaaagaggttcctgttgaatcattatatttccattttccatcttctaatatccattggctacacttaacacttgcatgttcatctgtggactttcttatattcccaacatttatatttaatatatagaatctttgtttattgttttttaaatcttgaagttttataagaattctattttttcccttctttaaaattatcttatctttaaatttatcaatatcctccacaacttttccattaatctttactgtatactctgatttttcaggttcagccattacatccacttgtgaagtattatcttcaacatctaagtcatatacagttttatccttatccatgtttattcttttatcatctacttttatataatttaaatatatatcatcttgaacatgcttatcttccaatgaatcttgcctattaatatttaatgtatagcttctttgatcattatttttattgttttttacttttactattattggattttttcctttagttaaatctactgtctgcttatatccatcctctttatttgcttttgctccatctattgtaacgtcatacgcatcagaatctggtattgctcctatagttattctatctacagattcttctacattaatatcatagcttgtattctctttagaaaagttaatagtaccatcacttaaattgatattatctaaataaatgttatcttgttcctcttctcctcttacaatattcaacgtataaattttgtaatcttcatcgttagttacttttattctaactgtattattgcctttttctaagcttactatctttctataattatcatttttatctacgaaatcatcatcgattgacacagtagcatcatcacttttgggttttgcagtaatttttatttcatctacatcaccatctacttttacatcataataaaatttatcctggtggaaatcaatgtcatttttatttaaagataaattttttaaatagacgcttgtactctctgacgcatatgctttagttactattcctagtttgctaagtgcagcagaattatataatacatttattgaaatcatagttagcgtaatagctattactttcttaattctattattcatttttatcccccacttcattcatttgcatccttatattcttaattttatcatattttataaatcctacaatcagaatattatcctaaaataatacaatctacaaaaaaaagaacgccctgtaaatgagcgttcttataattatattaacgaatccaagcaccatcaaatcctaatttatattgtccgattgatgtgtttgaagccatagttccatcagaatataagaagtaatacttaccaccatctattatccaacctgtttgcattcctccatctgaacctaaatagtaccatttaccaccatagcttaaccaaccagtagccatgcttccatccgcttgtaggaaatagtttttagcataatttctatcgtagaaccaactattttttactggagttcctgtcgaatcattatattgccattttccattaacttgtatccattgattaggttttaaagttgatacagtatctgctgtacttggtgtagagtctgtagttgtagttccactgcttgtaccagttgaagatgtaccacctctagttatgtttaaagtatacactctttcttcatcatcatcattttcaatttttacttcaattttatttgttcctttatctaaagatacatcttttttgaacttatcatcatcttcatttacttcatcgccatcaatttcaactgtataatctttatcgtctggcactgctctaattgttactttatctacatcactagcaacattgtaactgtatgttgtttttgattttgataatgaaatactctctccctctatacttaatctatctaaatagatatcatcatagctttttgaatcatcactatcatcgctatcattattaccacttccagtatatttcaccttaattgtatattggttttcataatcatcactatacctcacatttgaatcaggtttatccttgtatactcttactataagagttgttgatcctgaagatacatcaatgtcgtcacttatgctctttcctttagtagaactagaatttcctttaaatactttaacatactttgacttaggtccatctatatctatattaatagtctttgatgatgtttttgcgtaatatttatcccccgctgatacatcatcactatctactttatcatcatttttatagctatccttactataaagctttatggaacttccacttgatgtttttaattctaagctttttaaagttgtctcatcattttcatcatcatctgttgatgcataagccttagtagttaataaatttatcttggtaattggtgatatagctgaaacagtgccaattgctaacactaaagcaattattctttttaaatttttattcataaatttattcctccatctttttatccttcatcgtctttaatatattaattttaccactttagtgataattgtccacattaatatcattaaattttccaattgttatttattttatatattgatacaacttatattaacaaattacatatatgttgtaataataacgttacatttagacctctagcaatgcaagctttcaattaaaactagaatttagaattctgattgcacgatatattacttatttttaatatttaaatttctaagatctagcaattacagtatctttaatcatctttccagctgaatctaaatagtaccatttcccatcggaatcctcaatccatccggttttcatagctccactactatcaagataataccaatttcctgaagcatcttctaaccagcccatttgcattactccacttttacccaagtaataccagttcttatctaggcatatccatccagtttgcatttctccgctttcacctaagtagtaccagttattattatcatttaaccaaccagtggctagataaccatcgtcttttaaataataatttttgcctgtattcttgtcaaaccaccatctgctttttacaggttgtccagttccatctatatactgccactttccattaactctttgccatgaattgaatttacccacgttactagaagtttcaaaagtctgattttcagaagttacatttgattgtgttgtagatgtagttgaagttcctgaatttcctctatatacatttagagtgtaagtctttttctcatcatcgctttcaacttctatatttattttattatttcctttatctaattttactgtttgttcataatctttatctttatctaccgaataatcgttgattgaaaccgaataatcatcatcttctggggttgctctaacaagtatttcttcaacattatcattaacatttacattataagaagctgtatctttcgaaaaattaatacttccattacttaaataaatacttttcaaatatgcatgttctgcaaatgattcttcatcagaaacaactgttggtttttttaagtgaaggatataagtcttttcacaatcagttacatcatcattactataagcttctttataggctgcttcacttttatatgttcttaaataaatatcttcatatgttgaatctacattaatgtattctccaacatcttcacctttttcggtcttacttcctgatgtaaattgtttaactacatatccatcgccttgcgcacttgcagatatttgaagtccatctgctcctgttagctcaacgtagtaatctttctttcctgttaataaactatcatcgctactgtaagtatcaccaaactttatctcacttccagtacttcttgttagggtcaatgaatttaactctccattacttgcctctttatatgttgctgcataaactctaatatttcctaataacaaattatttattggtaaaaatcccgatactgctccaattacaagggttccagcaattagacatttaatttttctatgcacactcttccctcctcacatttttctgattgtataatatttattatcttatcaattttctattaatcttgtttcaaatattgaatacaagtcaaccatgcttatataataccacaatattaattagttataagtatataactagtgtactatataaatctaatcataccacataattctaaaatttttgttatctaattattaatattttctaaacttccttaggtaaatataggagaagtgacttgtacatcttctaagtatcatgacaagtcactttttttaattatactttattgaaatattaactttataagatagaaaacacctcttataaataaacttttattaataaatttcttgttttcaattacctcaattaatattttaaacccaaaattaatttattattaaaacataatagattaatgctctatattatcaaagctccattggtattaaacttatattccttaccattaattgtctttgttcctatagccatagttccatcatcagtcaaataatattttgaattgtaatctatcaaccagcctctctgcattgtcccatttgcattaaagaaataccattttccatcatatgatagccaacctgttctcatagagccatctgaatttaaatagtaccagttttcagcatctttatcattattatttgaatttgctgcattactaccttgtgtagttgaggtttctttgtaccatcctgtaaacattgctccatctgaacctagcaagtaccatatgtcattaactttctgccagcctgtaagcattgcacccttttcattaagataataccatttgctattatctttaaaccatccagttactctaagaccgtttttatctaagtaacaatacaccttttgatctttatcaaaaaaccatgaattttttaacgcatttccattttcatcataatacttccacccatctgatgtttggacccattgtgattttggatttgttgtagtattatttgatgatcctgaattagaattttgtgtatcatcgttatctttagatttacctctttttactgttagtgtatatgttctctttttatcctttatctcatctttaactactactttaatagtattttcacctttgtctaatgatatcttctttttataatcatcattagattttacttcatctccattaatagttactagataatcttcatcttctggaggtgcttctaccgttatcttgtctacagattcatcaacatcaacgtcgtaattcgaatcatcttttgagaaatctatatctccttcacttaaagtaatattgtctaaatatatatcgtcataattgcttgaagaactgcctcttgttatgtttaaagtataagttctttgattatctttattgtctgtaacttttactttaatttcattctttccattatctaatgatacagtctttttataattatcgttagaatcaactaaatccccatctattctaactctgtcactttcatcttctggttttgctgtaatctttatttcatcaacagaagaatcaaccttaatgtcataagatgttctttgttttaagaatgttatatttcctttgctaagctgaatattatctagatatatagaatcctgagttccatcttcgttagaacttgccttagtttttcttatatttatcttatattcctctttgcaaattgttatatcctttttcttatctttagcttctctaaaatcagctaatgattcataagttcttacataaatagttgtatcaccttttccaagtgaaattatatctccaggtttataagctgttgcatcagacttatcagaagtgaatattctaactatgcaatcactgccttttacatctgaatcgattttgattccatcactatcgtctgtaagtttcgcgtaatattctttatcatcacttagttttactgtatctccattatacccatcacgtaaatctaatgtatctccacttgatgtttttatttttaatgttttcaactctcctgtacttggagaatatgaagaggcataagctgctgtagttaaaatattaaaatttttgttcgatgttatagctgaaaatgttgaaaatgcactaatagctaatgtgagtgcaataatacgtctaatatttttattcataaaattccccctaattccaatataaaataattctaccatgattatcacataaaatccaaattttcaatgaattaatacgactcttttttcagataataaaatataactaagttttatttactttagttatcgcaaaattttaaacattatgtactataaataagtttcaaaaattaatatgtgaggagtgattacaatgagcaaagaaagaacaccttatagtcctactccaggagattacgatgtcgataagttatctggtacaaggcctgaatcttctaataggcaagagggacgagataacatcgcaccaactagaagtctagattccctttcaactgacggccctaataaaaatataacgagttcaacatcttctaaaccacatccagtaacaggacctgttgctatgaatcacgaagatgcttttgaatacaaaaaccataatattttgagaagttaggagtgattattaatgagtgaagaaaaaatatcatctaatgaaaatgaaaaatattattctggagaagaattaactgattcccatccatcagacccaaatgattctgaactaaaaaaaataaaaagtatgtatcttccagattcgaaagctgaccatgctccaagcgaaaaaagcattgaagatgctaatggattggagcatcctgaaccagtcgaaccaaaatcactaatataaatagcatgaatataactttatctataacaagttaaggtctgttccaaatctatatttatattgtaaataatattaaacaaaagataggagtgatttttatgagtcaatcaaaaattccatttagtataaaccctggcgatgattatccaatggaagagtatagtaaggaaagttcaccaaaatcaaaggcttctgattctgaaaatgtaggaaagactactgattcaggtgaaagaaatgctaaaagtttaaataatgcaaatatatctagaactaatctagatacagagcttattgatttaaatgctgacggcgattctgatgaatctaaatatagcgatttaatataaataatttaagatgatatattttaatgagattaggagtgattctatatgagtaaaggtaaatatccatatgttccaactccagaagatgttcctgctccagatttaagttatattttttcaccagagtcaaaaaattctagtaataaaaatgataacaaaaatgctgattcacataaaagaaattcttaagcttaagatgaatttcgattgaattgaatctttaagaatatatatgattaaaaattaagttgggagtgattttttatgagtaaagaaaagaaagtatctcatacttctgatgtaagagatgataataaaaaagcctttactaattcctacttgccaaaaatgagaactaactatcatccaagtagagatgatgttgaaagtgcaactggtgtggattttcctgtaaacatgcctaatccagcagttgatcctattgttgtaaataatatagctaatcaagaattcgattacacacaagatatgctttctcctgataactatgaaatcgatgaagatgattagtttatatattgcaattcacaatgcacaattatgtctaaaattattgtaacatttttagaattgaagaattattttttcaatatatattaaaattataatagatttttaattcaatgttttataaatatttatagaaaacccagtagcaagtattataaaatatttaatatatttttgaataaatttcccgctgttggtaagaataatattcgtaccccataatactcaggcactaaagtttatcattttaatttagtgcttatttccaaaaagtccaccataaatttaaattttatggtggactttcatattatatatgttgcaattcacagtacatatttcacaattcacaattacggctaaaattcttgcaatatttttaaaatcattatgaatagttatttttgcaatatatataacacttaaaactggatcgtattttaaaatgtttatatattaaataaaaatttattttaaatcatacgtaaattcaacttattttaaattgtcaaaaagcccttacctctaacttcagatatatcaataattgttataaaagctcctggatctatctgatgcacaatgctctttaattcaaccatttggtgtgaacttacaatgcagtaaagcattttctttttatcatgagtatactcaccttccgcgaacaaagatgtaactccacggttaagatcttttattacataatcaataatttctttttcttttcttgttagaataagaagaagttttttgctgctaaatccttttaacactctgtcaagaactgtactttgaataaacaaagaaataagagtatacaatgcttgtggaataccaaatattaatgctcctataataactattattaagtttagagaaaatcccaaacttcctatattaaaatttgaatatttttttctaataagcatggttataatatctgttcctcccgtggaaccatgtcttaaaaataccattccataaccaataccacataaaaccccaccatatatacaaaagataagtaaatcaccattcatatcaattaggcgcgaaagtggttttgttataagcagagaagctgaaagactaagcatccctattgttgtataaattgtaaatgatctatcaagttttttataactcaatacaagtagtggtaaattaattattaaaattactactccagatggaactttaagagtgtactctaaaatcaatgcaataccagtggcaccaccacttaaaagttttgcatgtactaaaaatagatttacccctaaggatgcaatcatgcagcctaaaaatatgaaaaacacatcaactatattatgcttgaacttataatataaactcatttgtatactccttgcaaaatggttatttgggtttcatttcatttttcagatattattctatattcaatctttagtattttcaacagattttttacagtttctacaaaaagtttttactatttatcaagtaattattaataatttatgtgatatagcaaataaatatcaatattactatcagaatagtaacatgatatctatttacattgagaatttattaaattttgaacttatcaacttccatttctaaacgctcagctttttctttcagtttttccacttcttgtgatacttctaaaatagcttcagtttgagtttgaatcgatgctgttacttcctctgaacatgctgccgtttcttctgatattgctgcaatattatttattgaattaaccacttgttcatttttgtcatgcatttcttcaacaaagcttcccatatagtctattgcagttgttattgtgtcagtcgcctgcgtaatattattaaaggcttcattcacttcatttactgaaacgaattgatccatagacacttcttttacttttttcatatcacttacgctgcttaatatatcttgctttatatttaaaattatctctgctatatttttagttgatactgctgaattttgtgataatttttgaatctctgttgcaactactgcaaagccctttcctgcttcccctgctcttgccgcttctatagatgcatttagtgcgagtaactgagtctgctctgcgatcccctttaagactccaagtatattttctatattcttagatttatcacttaggctttctatatttccttgagttttttctacaatggaaattgttgtttgtgctttttcttttaaatcttgaaccttgttaattccatttgcaattgctttagatgaattgattgattcattaatcattagattagtcttttcctctaactgattaaattctcccctcatctcttctccaagtcttgcactctcttctgctccactagcttgattagatgctccctgcgctatttcttgcgaggtaatatttatatctcttgccacattagttgtttcttgagatttttcagctaaaattgcagaactctctttcatatcatgagtcaaatcttttgttttgattaataaagcagaaaccttactcatcatctcgttgaagctttcacctaataatttaatttcatttttagctctagtagaagattttactgtgaaatcaccagttgatgctatagataataagtttgatatttctattataggcattgaaattcttttcgatacatacatgattactgcagccgctgcaagcaatattattaagcctgcaattaatgaaatttttgttattttatttataatagcttttgcattagattccttttgaactgttattactgaccaattaagtgaattcccatctagttttatgttcgtataagatgcatagtagttttgaccattttctttatacttaaggctaccatcattcccagccattaactgagctacgatttcttttaacccatctgatacttctaacggttcttccttaggatttccatctttaactccagttgttctagtttggtttttataattatataattcttcaatcacttcaacattaggatgtgcaacaacaacaccctctccatctattatgaaagaatatcttccagatgcttcatctgaatattcacttaccagttcctgcaatttttctaaattaatatccgatcccatcactccaacaaacttattatcttcaaccaaaggaacaaatattgaagttactggatttttagaagaagcagaataataagactttgatacaaatgatgataaagaactttttgcttgtgcaaaccaccatctgtctgatctgtcagcaagatccccagatgatcttccagtctgcattcctttttcatcttgcatatataataattcaaaatatggatttctgtcttttgtttctttaagtactttttcctttgtatctttacttcctgctcttacttctgaattatatgccagatcttctgtcactttatacgccgtatccataaaagaagaaacattttttgatataagcttagataacatttcgttcttactatttatttcattatcataatatcttgataaaatagtgcttacacataaaataattccaagagttagtacaacggatattgataacattgtaactaggagttcgctttttatactctttactttcacagacccatttttatctttattatttgtttgcttgtccattgtatttttatattgtttattaatcaatcccatttatcttctccccttattaatatttcttataaaataaatagtagttttggaattgttttaagatcataagagctatgtttaatgcaaaaattatacttatttttttacaagttatgtttctttttcatgtattattgataaattataacatattactagctattatcaacatatataatgttttttatataataaactacatatttaataaaattttaaagaaaagttagtctaagacttaattttatgaatagatttacttaggctaagtaataacaatttcatggtaatactttgaatttttcatactgcttaaatgattaaaatcacttgttatacatattgcaaaaataatccttcctcataattctaaaaatattacaagaattttagccgtaactgtgaattgtgaaatatgcattgtgaatcgcaacatatatgaatggaaatctctatacttttataaaaaaaagccgtataagataattataaaatcatcttatacagcttaaattaatttactctaagttcctaacaatattatatatacgacttttaaattaagtttatatgatcatcaactgaaaacttagctttaatgaaaaattaaaacttgaggcttaaatttagatatctatagataagccaattataagttagatttatactatgaaatatatcccaactagaaatgggtaatatacttttgtggaatgtttcattggtaattatgatggatgtgattctttggctacaagttgttccaaatgtgctagttcaaaaagtgagaatcgaaattttatatttcgttcttcgaactttctctgcgagcgcttgttctttgaggctagcactttgggtgcaactttatagcctttgaatcacccatcagaattacctagaaactggaacaaaagtatgttattcatttcggcgagttatatgcataagttcaagtcttagttggcttatctatatactcattttaagtatacaaaaacttctagcttaccgctgtttcttggaattaagttatctttcattacttctccatttacaactacctttgtaacaacttgattatcactattttctgagctataaggtatggatgttacatcactttgataattattattttgctcattattcttagtatttacgtttaatccattttcattatttgctctagatacttttatagtgtaatcttctttttcatttgtaatctttatttcaaattcgttccaagattttggtatacaaggatttatagcatatcccttatcttgaacctttctaagtcccaagatattttcaacgccaactctatacatccatcctgaagctcctgtataccaactccagcctcctcttcctgcatgaggctcttttatatacacgtctgctgccattacataaggttctactttatatgtcatacactctaactctgtctttgcatgatttataggatttatcatattaaagtagcttactgccttatcaccaagcccaagtttagttaaagcaagtatcacccaaaccgcagcatgagtatattgacctccattttctcttacacctggcacatatccttttatataacctggttctaacttagaattactaaatggtggtgcaagcaataggatcattcccttatctttctttacaaggttattatccacggcctccattgcttcaatactacgttccttttgtcctgcacctgatataattgcccagctttgagctaacgagtcaattctgcattctggattttctcttgaaccaagaggtgtaccatcatcaaagtatgctcttctataccagcctccatcccaagcgtttttctctagattatctcgtataaactctcttctttcttcaaaatgttcttttgtttgcttatcgttttgtttatctgcaatttcaataaagctttctaatattgaatataggaaccagccaagccatacgctttctccttttccttcgtttccaacagtactcattccatcattccagtctccactacccattaaaggaatattatgaataccaaaattcaaactcttttctatagcttttaagcaatgttcatatatagttccttcctttgatgattgatttactatcgtatatctttcatcttcaccttctcttaaaggttcatcttctaagtacggagcagtagcgtttaaaatatcgtaatctcctgtggaattaatatactcagcagttacataaggcagccataataaatcatcgctgaatctagttcttattcctgaattaacaacaggatgccaccagtgttgaacatcgccttctacgtactgtcttgaagcacttcttagtatttgcgcttttgttatttctggatttacaaacccaagtgacatagaatcttgaagctggtctctgaatccataagcaccaccactttgataaaatgcacttctacttaaatatctacaacttaaagtttgatataaaagccatccattcaaaagataatctaatgacttatctggtgtcttaacttgtatatttcctaggaaattgctccaatattgttttactttatctaattcactttctgcatttccaaaaattttgtatttacttattaattcatctattttttctttttcatcttgaccaaataggattagcagttcccttttttcaccttttcttaacataatgcttgtttgtgctgctaaacaagggtcatagatcccaccagacttattgcttaacctattatgttttagagcctcagggctaaaggtttctcctccaatacctaaaaactctttattgtctccagtgaaactcaattctttcccacctataatggttaagtaagcatttaactttccaaagtattcactgtatggattatgagcacctataaatttatttttgaatgtgaaatcttcattactatttttaatgctgcttccatttactacatctactgtttctttatagtttgattcatctccacctatatatgttgagatatatcttgagctatcatactcataaacacccaaaacaagttttgcatagtagaatagtgaaatacttctatcctcattacttaagttttctagcgtaaccctctgaatttttaatctttcatttttaggagcaaaaatttctaattttccttttatattatatgctgtatgtctgtattcagagtatccaaagctatgttttattaagtaatcacctgaatctcttacaggttttggtgttattgaaaaatactcacctgagtcattatctttaatatataatgcttctcctataggatctctaatatagtcattactccaaggtgttattttattttctctagaatttccacaccaagtatatcctgatcctacttctgatatatgaaatccgaagtcatcatttgaaataacattaatccaaggtgctggcgtatttctgtaatttgatagttttattatataactattatctttcttgcaaaatccaccatagccattaaagaaatctaaatctcttacatcaggatcttcatccgcatctttaccataattattagaatcttttgatacatccaaatctaaatcaactaaacttgaaatttctgagttataaactaactctctttccttcttactttgattagatttcttatctatttctaattcatcaatatcattttgatcttctggctcattaatattctttattaaatcatgaatattaattacttcttcatcattatcatatacttcataaggtatgttttcgccatctgtatcttcattagtattttcactcttatatttatccttaaaccttgaattatttcttaaagctatacgcgaatctaatccctcatcatctaagtccacatatctattaaaattcttttcattatatgcatatgaacttaatggattattattgtctacatatattctagaaattcctattagtaaattcttgatttcaacatccatggttgccttattgtgaataaatattccgcccgctttattaaggtaattacctacattggatgaccttattacttccattatatttttttgaagtggttcatcataagaaacttcttcattattatatataattaaatctaacttaactcccttaattcttaagtaattgtggaattttaccatagtatatactaaatttatgtcttcttcattttctatagataacattataataggtaaatctcctgagattccatatgcccataaatccttttgatgtcttgaaatattcctaatatattcttctctattttttctagtattagttagaaagaaaattgagcttgcagcactttggaatatattagctatagcacttcttattcctaaagtctttagttcaagctgtgcacttatgctataattcttaaatactctctctagcttactattgtcattattatgtctgcatatttcaaatatttgttctttagattcacatattccagttatataataaatttctttcttagagttaggttctaatctaactctcgttcttatactcattataggatctaaaactgttccaacagtattatctaaagctttatcattatccatagcttttggattcttcaattctctatttcttcctataaaatttattcttgaagtttcatatgaaatgcttccttctaattctccattaacaaccgctttatggaaaatatatggaatctttgcattcttaactctacctcttctgcttcctataagaacactttccttttcatcatattctgtttgaacaaataaattagagaatgttgggtgaactacatcagcactgaatgtagctaaagtcacttccatgtaacttgttatttcaatacttcttcccttatctcctttgttatttaaagttaattttcttacttcaaagttttcttctgatgatattgaaacttccattgaagtttcaatattaccatcttttctgctaaatttagctttatctaaattaaactcaactgaatacttatcaccaagatctttacaaggctcaaaggttgaactccaatattcattcgaatttaagttctttatatagaagaacattccactatcatcacttgtagagtttcccttccatctataaagcatggtatcattcttttttgaatatccatttccgtttactgttaacatagatgaatattcaccattgcttaacagtaatacttgtggactatcctgatttactttttcaaatactcttggaattaaaacctctccctcaaagtatctattcttaacagaaaaatcttcatttctttcaaagacaacattttgtggaattttctcttttagtaaaagttctgtagattttatctcaggaagatcatggaatctatttatcaaaatatcattgcatagaatattatctaaagccataagtgacattcctaaatggtgtaccatataagttgcaactttattgaccttctgtggataacttgagttatcataactgctctcatcgccattattcatgtgaatcctactgctttcatcatttttattcacattattcacattatcaacatgcttatcattcatataacttgtatttttatcctgtgtattatccactattttttcgtagttatccacataatcctcatacttatccacattttgtgtataattttttccatttgttgaaatattctgctcaagaagatcacttttagaaagtgtcattatgtacttatctttcctagctttagtataatctaaagcctctatgaaaccatatcttcctagtgcgcctaacttttcaagttctttaagatttttaattccagaatctttatcaaaagaaatagccattaatgttgaatatggagatattacaagatcatcttcaagtcctcgcttaagaccaagtccaggcactccaaatgccttgtattgataattttccgctgcatcaaattcataaaatgcagattctgatattccccaaggagctttcttttgcttagcaaagcttttttgtgcctttatgacagacttataagtttgactgagtaaagtcttaggataattcctcattattaatgatggcataaaatactcaaacatagttccactccaagatactagtgaatgagtatggaatgcattagtcatcgaacgtcctagcttaaaccaatgagaagaaggcacatcatttttagctatcgcaacaaaagatgctattcttgactcagatgcaagcaaatcataataggagtttccaagagaattttcctctacattgtatccgatagagaatagtcctctagttttatcataaagaaaagtaaaatccatttcttctgttatttgatcaatatcttgtattatattatctattttatctatgtaatttttgaaattatttatcttttctctaaatttccctctgaaattatccccattttttcttcgataattctcgcatctgtggattaattcaacaatatctgggactccttcgaagaattccttactatataacttttctataccttcaaaaataaagctataatagttaatttttttcctaacctcacctataagcttatcaatccaatatcttgcttcttcactctcaatttttaactcacctatactattttgttcttcatcacttaagttattttcattattaatattatttttttccgacttaagtttctgctttaggctaattatctgatctgtttcctttaaatcttgaagtttaaataaaatctcatttaatacttttatatattctccaatgttaatatgggaagaaaatttaagtttcagattaggagcttcatcttcaattattttataaatatcatttaaagatgtgacttcttttactcttataactttattatgcttaagctcctccatagacctctttagtacccacaaattccctagaagattcccactatcaactgttgatacatacctaggccataaaggctcttttgttttggtatcataccaatttaagtaatgaccattcaccttttgaagagttttcatactatttaatacgagttctattctatcaacaaactctgccatggttatataccctaggtcatatgcagcaatgctcgaagtaattcccatacctatattagttggagatgttctatgtgcaactcccttaaacggcttctcttgatagttatctggcgctaggtagttgttttcttcattaacaaaatcctcataataagcatatattcttctagaaatttttcttaagtatgttttttcttcattctttagagtattcttcttttgttctggacgtttaatacttatgctataagccaggtaaggactaactatccatagggcagcaaccactacactataagtaactactcctaatgaactatagaacgataaatatagtacaagtagacccattataggtgcaatccacattctctttaaataattaataaaattattccttgagtttttttctacaagctctgccgactgccattctaaaaggtttttcttagaaatcattactctatatagtgttactattatggcatcaagcatcaaaaaagcttgataaggaataaagctaactattaacactgtctgctctagcgttttaaatgctcccattaacttatttttaggggttacaacaaaatctgttaccacaaatactaatggagttattaaagctaagaaggcaagaagtgcaacttgacttcttccaaatagcacagtaagagataatataagagcaagaagtaaattaggtgctaataaacttcttcttaggttatcaaatatcttccacttatataataaatttattttatttgaaaataaccatcctattagctgccaatcacctctaacccatctatgcaatcttttgcagctagattcataaaatgctggatatccatcaataaattccacatcacttaataatccgcatcttgcaatgccaccctcaagcaaatcatgacttaagactgtatcgtcttttattgagttacttaacactttataaaattcatctatacatattatccctttaccagtaaaggacccttctccaaataaatcttgataagtatcagaataagcaacggaatacccatcaactccttcttctcctccaaatacttttgaaaagtaagtttgattcttagcttctaggctaatgctcaccttaggctgcattattccatatcctcttacgactctattatcttttatatgaggaatattaagaatatgactcatagcccctacaagtttaaaagcactttccctaggcatgaaagtatcttcatctaatgtaattagatacttaacttgttttagctcttcaatatctgaactaaaaacattataagtatgattcttaccgcctctaataagagccataaattccattaactttccacgttttctttctcgtcccatgaatacattttgtttcttattataaattctctttctactaaagaaaaagaatctgttttcactaacaccttgatcgtttttaaagtcattggaatatttctcatttaaatctctagcatattgaactccagatttaattatctctacatcttcctgagaagtctcatgctcagaatcatgaaaatcacttagcaaagcaaaataaatattcttatccttatttccacaatatgctacttccagtttattcataagttctttaactttatctttagaatttactatagccggtattacaactacagttttattctctttaggaattcctgaactaaaatttaattttggaatcagcctaataccaacaactttgcccacagtataattcgtaagtccaattattatttcattgactggaattaatattataaggaatgaaattacgtactgcactaaagtgtatctaacacctaataggctgcttgctaataaaataagaaaacttattaatagagttccaaaaatattgcacgctacgtacgtgttctcagatatagttgtttttatattatttccatatttctttaactcgtttattccctcatcaattaggtaatatccaatatgacatttataattttcttctttattagttttactatttcttgcaagctctaaaatattactagctaaagtaatttcgtctgcgtttgatattctagccatcttttcgagcttatgcctataataatccttagattcaaaatccatgctattataaatatctgccggatcattcttaagtattttttcaacaaaagaagtttcttcaaagaatcttctccagcttattccttcaatttttctaataaaggttatgtattctccaatatttctttctaaaacttcttctcttaaatcacttctaatattatttttatctaaatcagaattcactttccatttagattctacaagatcatttattcttggatcttctatagaattatctcttaatacactaaaaaattctcttaaaaataaaggtccaatattttttccaacattaatatttcctattttttcttcaaatttattgttgttaattgcatctattatcttttcagctatgtctcttcctcttatgatttctttttgaatatcaacaagttcactagtatacttagataaatttattattatagctattttaagcattaatgggaatgcccacaattctcctgtagtgaaaatcttctctttattattaaaatttccattctcagtatcgccttgaagtccgtttatatatgatataagtttatcacaatcaatctcatttccattatttatatagtcctttgctactacaaaaatgcgtggaataagttccttattttcattatcttcatttgtatgattatctttatttctgttgtaattaacattacctatagaagatagtcccttaaaataatctataggcatctcaatctttatcgctttgtactctttttctattaagtatatattatcaagaagccattcagatgccccaagcactttatatccgttcttagataatttgctaaagtacctaaaattttcatggatgcaagaaaatccatcagctaactcttttaaaacattctttcttactccataagaattatttctcctcaagtaaaaaactcccttcttactattggtatattcaaaaaaaataataagttaatatgatagtctatttatttttatactttataaacataacttcccaaaagtacctcgctataaggaaaccatactttttatctaaaaaaacgcataactttcattattgatttattattttctttcatacacctaacattaataacaattacccaacggagatatttttaccaaaattataaaaagtattcttatattcataatctataaaaaaatagccatctaaagttgtcatatagacaaccttaaaatggctatttattaacgttcattagatattagctgatgctttaaaattaacaggttattaagaaatctgcactttaatagatgcttagacatttcccattattaattactattaagatctactatttgaaaaactcagtaaatgctttaattgtatattcattatcctttacagtagctaattctcttattgaatgcatacttagtagtggcgctcccatatctattactggtatatttaattttgatgcagtaataggtccaatggttgttccccctcttaaatccgatctatttacaaatacttggcatggaacttctgctttttcacagattcctttgaagacagcacttgcataactatcagttgaataacttccacctgctgcaattttaagtacaggtccttttccaagcataggcttatttgtaggatcacatttttcaacatagtttggatgtattgcatgagctaagtctgctgaaatcattattgaattacttaatgctctcttaaaactttctctatccttttcaaggcccaaagttattctctctaaaatattttctaaaattgatgaatttgcaccttgagatgttaagcttcctatttcctcattatctaaagctactaatactttagttgctttaatttcattactgcttattaaagcttttaatcctgcaaataccatccataaatcatctagtcttccacatgatataaattcatcatttaagccaattagcatgccttctgcatactcatataaaaacaaatcgaaatctaatatatcgctagaatctacctttaaagtttctgctattaaattaattaaatagttatccttttctaacttatcttcaactattgtaagcattggtaaagtatctttttgcttattatattcatagccttcattcacgcttctattcatatgtattgctaagttaggaataattaagattggcttatttacatctaataattcaactcttggactgaatggattttctccttttaaagttactcttcctgctatgcttaaaggtctatcaaaccaagtacttagtattggacctccatatacttcagtatttaatttgacataatgtccttcaactttcatttctggatttggctttattctaaatccaggtgaatcagtatgtgctcctattaatctgaacccatctttttcaatatcaccatttcctatttcaaaggcaattaatgcagagttattttttataatatagtgtttactacctttttttaactcccatttatcttcttctttaatttctgtataaccttgcttatctaaaatatttttaatttcataagtactttgaaaagcagtcttacccttatttataaaatctaataattcttgcgcattattcatatagttattatctctccctacataaattaaatttttctcgtaaaacattaaacaatattaaattcacttttaatattatatacctttttaaaaaataatgcatattttctatgtgtgattctccagaaagttttatattagataatacctacatagtaaatgccataactactttttcatcttttcctagtgtcacatctcctgaacaaagttcaactatttcttcatcatcgtcatttaaatttatctcgttaatatcatttttattcctagactttcttttgctcttattgttcttcttctgcacagaaattggtatacttgactttgcattagttacattactttcgcaggaacctttttgagtttctaagctgatattcatattagcattgttgttggtgcaaatattattactagctatcacatctgcatttctagtattatctatacattctatgttttcattgttatctttattattagtagaatctgtactagcatttatagtatcattattccgagttctttcagcacttatagtattactattactattatttttattactatttgcaaagctttcattttctgtattacctttattcacaaattcagaatccatcctagtagaattttcattatatttattataattgttaatattattatcatcattattgttttcatttatctctttattagcaatcataatactcttatcttcgattttagcagttttatttctaacaatatgatcaatacttttatatccactactttttgaatcaacacctattagattttctctatctttaattttagactcatctcttttgtgactagaatcattttcttttactacattattcttgatttcagtattcttatttattttaatattttgatgcttagcaaagttttttactttatagattttatcttcactaaactcaatcatttctaaatcaattaaaactttaatagctaattttactcgttcaatatctctattaaattctatagcaagggtttccattgtgtatggaatatttctagacaaaaataattctccttctaagtttaccttcccagctaaaacaataagtctaatccaaatatactgaacaaggtccctttcatccattgtatctattattttagatttagtatcatcatacatatcaactcgtaatttaacagattttctttctttcatttttaacacactcccatttaaattaatcttctatatggaatatatgtataaaaatgaacagttacataatttctctaaacttttttatattttttctagaaatcattttattccatgagtaaaatacatctaaattttaatttggatctaatacatatagataacccaactaagaccttaacttatgcatataactcgccgaaatgaataatatacttttgttccagtttctaggtaattctgatgggtgattctaaggctataaagttgcccccaaagtgccagcctcaaagaacaagctttgaactagcacatttggaacaacttatagccaaagaatcaaatccatcaaaattaccaatgaaacattccacaaaagtatattacccatttctagttgggatatatttcatagtataaatctagcttataattggcttatctataaaatagtttgatgcagtaaaatggtagacaaaaaaattcttacgcatctgcctcgtaaaatatatatttctgaaatttccaataatttcctataaattcaactttttataatttctttataaaaaaatgaacgccagaatttataacatccaagcgttcattaatgtattgcttatttatgtgaattattttgtaaatctaaattacatattatttatctatacttaaaatacatactaaaacttatataagattatttttagcaagttcttcacgtaatttttctagattcttgccttccattgggaataatggcattctaagtggtcctacattatatcccataattcctaatgcagtctttactgggattgggtttacttctataaataacgtattaataagatctaaatattttgtttgaaggttacagctttcttctacttttccttcaaaatataaactacaaatttcatgagactcttttggcataatatttgaaaagactgaaataacgccttttcccccaagtgataagattggaactatttgatcatcatttccagaatatatattaagttcatctttgcatagtgcttttatctttgcaatagctgaaagatccccactagcttcttttgttgcaactatacgtggatgcttagctaattctgcatatgtttcaggtgttatattaactcctgttcttgatggtacattatatagaattattgggatattaactctatccgcaatataattgtaatgttttattaatccagtttgagtagttttattgtaatatggtgttactaataaaagtgcatctgcaccaacactttcagcgtattttgatagttgaacagcataaactgtatcgttagatcctgtgcccgcaataactggtactctcttatttacatattctactgtaaatctaataacttctctgtgttcttcatcagtcatagttgaagactcacctgtagttcctgcaattacaattgcatctgtaccattctctatattaaaatcaattaatttttttaattcagagaaattaattccatcttctgtaaaaggtgtaacaattgcaactgctgcaccagtaaatataatatccttcataaaaattgccccctcgaatattttctatataaattataacacagtaaagtgctactataaacttagaatatatttaaattatagattgtatatttattagtgttgaattgcttaatttcttgaaaaaatacttgcttaactaaaaatatttaatataatagatataatgtctattggtaattttttatgattggagtgtatattatgctttttgaacttatagttaataaatttattaaagataattctaatgttaaagatgataaagtgagaaattcttatggtatgcttggaggcataattggtataatcgtaaatatcattttatttataataaagctttctgttggactaatagtttctagtatagctattatggctgatgcttttaataacctttctgatgcagcatcctctttaattactattttaggttttaaactttcaaataagccagctgacagagaacacccatttggtcatggacgaatagaatatctttcagcgctaattgttgcgttcatggtaatggtagttggtctacaatttataaaatcttcatttgaaagaatagttaatccatcaccagttatttttgaattagtttcatttattctacttatagtatcaatattttttaagatttggctatctagatttaataaatttgttggtgaaaaaattaattcctctgcattaaaagcttcttctgcagatgccctaggcgatgtatttactaccacttgtgttgctatttcatttttagcttcaaaattcacttcttttcctatagacggatatataggaatgtttgttgcattattcattgtttatgctggtttcaatttagttaaagatactataaatccacttttgggggaagcgccagatccagaacttgttgagtccatagaaaagatggttttgtcttacgataacatccttggctcacatgatttaatagttcacaattatggccctggtaaatgtatggcatccattcatgctgaaattcctggaaatattaacgttgtagatattcacgaagtgattgataaagctgaaagagaaatttcaaaagcacttaagatttacttagttatccacatcgatcctatctgcattattgaaggcgaagtcaaagaagcttatgatgaaattttatccataatcgaaaaatatgattatatagagtctatacatgattttagggtagtcggtgaaggtgatattaagaacttaatttttgatgttgttattgaaccatccaaaaaactttctataactgatactgaactgataaatataatatctgaaggagtaaagaagtatcatccttcttataactgtgtcattaccatagacaaacattacacatagaaatacagccgttatttcaaaccaagaaacttctagtttgaaataacggctgcacttttttatagctgtatggccatttaggagatatttttattcttaaaattataagcataaataaagttaaaaccctatctgaatttttcaatttattattcctttttgccttgtcctatttgctgtccttctcattgttaattggataaatttgtgatattcttttattattaagtgctattaaaaggaggatataattttgaaatgtccacattgttcagaagaactaggaataaataatgtatgtataaatcctatatgttcttacctcggtactaccattaaaaataatgaaaaaactaatatagataatattgaaaataacttagatagtaaagccaatgctgatattaaagtagatcatgttgaaaataactccaaatctaatgataactttaatcaaaacaaagtccatcacaatagaaataactatgataataatcagaatacaaacagatttaaaaatatatattctattccttaccacaaaagcaacaatatttcccgagacgaactagctatttttattgggaataacagcaatttctatattaaccacctcaataaatataacgataaacataaatttttatcttggaactggccatgttttttcttcggttactactggttattatacagaaaactttatgttccaggagctgctttgataatcttaaccttagtatcttcagcaatttttccaaaaggaatacacttatttttgctgcttctcataagaattacattagctttatatgcaaattttatttatcttaataattgtgaacgtaagattaaaaacttcaaaatgaatgttatcgatatccaaaatctcagcaatactcaatatataaataaattacgtaaaaaaggcggagttagtttagccgtaccattaattgtattagctctccatatcatgtttatagtaatttcactcggcatgttgcttgcaactaggattacaccacataaattttcttctccttcgtactacttttagcttgttaaactaacagtttagatactttaaagttaatacaatctgatacttataacttttagataaatttccggaataataattcttatagttttggtgaatccccactcttaattaggtatctatatagataatacaatcataaactatacttagactatgaaatatcctccaactagaaatgaataatatacttttgtggaatgtttcattggtaattttgatggatgtgattctttggctataagttgttccaaatgtgctagttcaaagcttgttctttgaggctagcactttgggtgcaactttatagacttagaatcacccatcataattacccagaaactggaacaaaagtatattattcatttcggtgagctatacgcataagtatggattataattggtttatctatattaaaattttaggcgttcaccataataactaataaaaatagttatttggcgaacgccttattatatagttaattataaaactttagataaaaagtctattgtacgtgggtttttaggatttttaaatacttcttctggagttccagattctaatatttttccttcatccataaacaatattctatctccaacttctcttgcaaatcccatttcatgtgtaacaactaccattgtcataccttcctttgcaagatctttcataacatttagaacttctccaaccatttcagggtctaaagcagatgttggttcatcaaataacataacatctggctgcatagctaaagctctagctattgcaattctttgcttttgtccacctgataatgatgatgggtaagcatttattttatctatcaagccaaccttatttaataagttttctgctatatttttagcttcctctttagagattccttttactttaataggagctaagcatatattttcgcatacagttttatgaggaaataaattaaattgttggaataccattcccattttttctctcatcttatctatattagttgcctttgatgttatatccttatcttcaaaagtgatttgtccagatgtaggagtttccaataagttaagacatcttaaaaatgtacttttacctgatccagaaggtccaattacaactacaacttcacccttgctgatgtgttcatctattccttttagtacctcattttttccgaagcttttatgtaaattcttaacgtatatcacttgctttcatcctcctttcaacataacctaaacatcttgtcaaagtgaaagttaaaacaaagtaaactactgctgctacaattattggttctaatcctaaagctgtatttcctcttacaatacttgcattgtacataagttctgcaacacctataacagaaaccattgatgattcttttattacagaaataaattcatttccaagagcaggtaatatattcttaaatgcttgtgggattataacatgaaccattgctaatccttgattcattcctaagcttctagctgcttccatttgacctttgtccactgcttcgattccagctcttattatttcagatatatatgctgctgagtttaatgctaaagctattgatccaacagtcatatcaggcatatctattcctataagcttaggtaaccctatatagattatatagatttgaactagaagtggagtacctcttacaaattctacataagctgttgctatataacttattggtttaaattttgaacgccttaaaagagttaatgcaagacctaagattgtaccaaatagcactgcaaaaaatgctaatacaatagtaatttctgcaccttttaaataatattcagagtattttcctaaaaatgtaaaattcaatattttccctcctagttctttatctgatgtctaccaactgtaatactatcacaatatatgaaacttctcttcctaaagtcagatgagtaagcgattcacactaaatcatagatttaggttccctgcttaagtgatagataacagtgacacgaccctagataagttcaactaatatccagctaaggactccccccatctgaatcaagtttcacttaataatacgcatataataaaataatcactaattttcaattataagacattatccgataattttcaactgttgttaacttccaataaaaataattttaaatatatatattgtaaaaataatccttcatcataattctaaaaatattacaagaattttaaccataattgtgaaatgtgcattgtgaattgtgaatttgcaacatatatctaatactcaaaaaaataacaagctatgatgtaaatatattttgcatcccactatactggtatctattaccccatagtttctatatgctaaaactttcattacttagtacaaggtaacacttttcagatgaaactctctttatcacctgatttcagttaaactcatacccacaaggggtacaaagtgattttaaataattccaatataacttctgagattttaaataattttcatgaaggaataaatcgcattatctaaattcaccttgtcaataacaaaatatatactacatctctaactcgttattttctatagtatttcttagtgtcaaacaatattagtctactaatttatttacatctactacaaattggtttatcttatcttcatcttttaatctctttattgtcttattaacttgctctaataaatcagttgaaccttttttcatagctacagcggatccgccgtttggatctgtaacctctaatttatctgcaattgcgataccttcgttcttttcaacatttatttttgcaactggctgttcagctaaaaccgcatcaactttattgttctttaaatctaacattaaatcagtaactttgtccaatgacttaatatttgctgcatcgaagttatcctttgctataccttcttgtattgagcctttttgtactccaattttctttccttttaaatcttcaattttagttattccagattcatcacctgatctaagtacaaatctatgtgttgcattataatatatgtctgagaaatctgcattttgttttctttcgtctgttggagtcatacctgcaaataccatatctattttgtctgattgaagtgctactaacaatccatcaaaagccatatcttttatttcaagttctactcctaaatcttttgccatttcttttgcaatttcaatatcaaatccaactatttgatcttttccatctatttctttatggaattcatatggtggataatctgcacttgttcctattacaagcttaccttttgattttattgcctgtaatgcagaagcattactgcttgtgttttctttgtttcctttagtgctgtttccacagcctaccatacctattgcaatagccgatactgctgcaatagcaaccaatttttttactataccaactttcattattaatacctccaaaacttttctctactaacgatagcataattatacacacttttttatatttactcaatagaaatatgataaaaagtttaattattattcattaaaattaaatttatcctcattacttattatatatttaaatatatattttatgtattggaaatagttatatatattagtattataaggcttacaagcttactttaagcgttctttaaccattttaaaattataaaaaaattttatttagtatttctataatttaaaattcacaaaaaattatgaaattttattctcattaaatttatattataatttttcactttgcatactttatgaaaaattattcacataataaaagcggcaccatcataaatatcatattatcggtgccacttacttattatttaaaattgactatctagtttagtatatataagttccagatagcatagctcattttatataaaattatttattttatatagccttatagcttaagataataaggcctgaaagttaggtttttacaatataactatattaaatacttaactgcagacagcctgtgtaatgctctggtacacattatatatttaactaacggttcgatctcttcactttctactattataactccatcaaattctaatccttttgccaaataagctggtagaagtacttttccgcccttatacataatatcatcattatctaaactttgaatattgatcttttctttaataacatgagagaatttattcaattcatttttatccttaaatattactgcaatattctcgtatccctcttcttcataatcttcaattaatgatattattgtatcaacaaattcctcattattagaaacttcttcttcaatgacagcttcaccttttctaaccaaaggaacaatcttgtctttatccaagaatttatttgaatattccattatctcttgagttgatctgtagctcttatttaactcatactttgtaatctccacattaagatctttaaatacatcatcaaggtgaagcattgcaggttcttcgctagttgttattaatctctgatttgaatcaccaacaattgtatagctcttacaccctgtcatttctttaattatttcaaattgaatgaaactataatcctgtgcttcatcaattacaatatgctttatctcattttttacttttatcccttttaacttaatcattaaatacagtattccagataaatccatataacttagtctttctttattctcatttaaagcttcattattaagattatctaattcattaatatagtctttatcagtatctaaattaataattctcttataaatatctattactggttcgtacttaatccaagtatctagttcatcacgagatttcataaccgctcttacaatttctcttatcttgattctttttaaatattctagattatttttttctatttcaagttccttctctgataagctgctaattttttctttaaactcagcatttatcttataaacttcttcatctctcttatcttttattttagatattagtattctttttattttttcacttcttctaaacaaaggcatatccttataataatttgtaaatagttcctctatctctttagctgtaacaatctcttctttcataaatcgaattggttgtatcttaaaatattccttatttaaaatttctaaattagaatttaataaatcaacaaatgccttggagctcttatatctatattcttctaaagtatcttcttttccattcatagcatcttcaatatagctaccgaagctctttatattttcatattttaaattaatttctttcttcgcaaaattttcaaaggttgtttgcttaatattactttctccaagtgaaggcaatacttgagctatataatccataaaaacatcattaggtccaaagattagtaccttatctccaaattgttttctaaaattgtatagtaagtatgatattctatgaagtgcgatagttgtctttccagaaccagcaaccccatttacaacgactattttatttctatcctctcttatgatctcatcttgttccttttgaatagtcattactatatctttcaatttatctgatgaattatctgttagaaccatttgtagtatttcatctttaacatctattgctgaatcaaatactccctttaactggcctttcttaattacaagttgttttctcgataatatatctacttctacttctcctgaaggtggattataacttgatttaccgagagttcctttataaaaaagtgatgcaataggtgctctccaatcaacaattaatggttcaaaactattttctagcgttaatccatatctacccacatacatatcttctggaatgtcttctccttctttaaacgaaacctttccgaaataaggtatttccttaagctttgtaaattccataagccttttgtcaattgttctataggcttcttccttcacataattctcatgatcaaaataatctataatttggtcttcatcatctttatattcctcaacgtatttttttctagcctcaaggatatagtttgtgacattctttcttttttccaaatactttaagatttctttatttagaatttctaagatttcacttaacttttcctcttctcttataaaatctacttgtttgctcaatattgtgacccccttagatcaataggcagttaattcatcaccttgaattattatataaggcgattaactaccaataactaatcttttatttcttcctgttaaatattattatacccttatgccaatattttcacacaaattccatgaattttgtattgttaattatacatttaaactataaaatgcacaatgtatggctaaaaactctttttaggtttcattcctccactgtgcattaaatactatatttacatttcaacttgtttctttaaatattatcagtttcagaatccttcttatcagattcctcttctttagatataaatttatcatcattaatattttcagctgcgccctctgccttagcatcactttccataataacagatgtttgattacttgttattaattctgatttacccaaatcttgaaaatctctttgtaactgttcaggcttatcatctataacaatatctaaagcatgctttttagctcttctttctgctaactcttttactctcttttcgttctctgatttttccttttctttttcttccttcatttcaggatatttttcatagactaaatcaaagaattcttctccaaatattgtttctttctctaaaagtacttctgaaattttatctaataaatctctattatctctaagaatctgtctagcatttgcatgagcctgctttattattcttagtgtttcttcatctaaaatagtcgaagtctcttcgctacagtttctgacagctctaccatctagatatctattttgcactgattctagagccatcatatcaaatctatcactcattccataaatagaaaccatgcttctagcctgttgagtagctctttctatatcatttgaagctcctgtagaaactaaatcaaatacttcctcttcagcagatctaccaccaagcattacagtaatttgatttattaattcttctctagatgtcaaatatttttcttcttctggtaattgcatagtataacctaatgctcccatagttctaggtactattgttattttatgtacagggtctgctcctttaagcaacgctgcaacaagtgcatgcccaacttcatggaatgcaacaacttctctttccttaggtgataaaattctatctttcttttctttacctgcaattataacctcaactgcttctcttaagtcctcttgaagaactgtttttcttcttcttcttacagctcttaaagcaccttcattaatgatattagcaagatcggctcctacagcacctggagtactcttagctatttcagctaaatccacatcaggtcctagcattacattctttgcatgaacatgaagtatagcttctcttcctttaaagtctggtctatcaactataactcttctatcaaatctacctggtcttaaaagagccttatcaagtatttctggtctatttgtagctccaagtaaaactacacccttagatgaatcaaatccatccatttcagaaagtaattgatttaaagtttgttctctttcatcgttactttgcatttgattatctctgctcttaccaattgcatcaatttcatctataaaaatgatacatggagctttagccactgcatctttgaataattctcttacccttgatgctccaactccaacgaacatttcaacaaaacttgaacctgaaagcgagaaaaacggaactcttgcttctcctgcaactgcctttgcaataagagtttttcctgttcccggaggtcctacaagtaaaacacccttaggtaatttagctccaatttcagtatatttagctggcgcatttaagaagtctattacttcttttaatgattctttagcttcttcctgacctgccacatcatcaaaagttacttttatttcactttccatatagaccttagcgttatttttaccgatgcccatgacaccgcctccgcctccgcccatcttagagaataaaaatctccacatgaagaatatgagaaccataggcaatatccaagtaagaaggatattcatcattggtgattctttaggatttttacctgtaaaatcaataccagctgcattaagcttagttattaatgtttcatcctttacatttgctgtatacaaagttttccctttgtactcttcattatcttcacttggcgttattaataggttttcagtagttatagtaactttagaaatctctttattatcaagcaatcttagaaattcgttataagtaatctctttagttgtagcttcttctcttgcataattaaacgccatcaaaaatgcaaaagctattaaaaaataagtaattgctatagtaaaagaattcttatttttattattctttttattaccattattattattctgcatctaatcaccttcccattatatttattaatcattatgtccaatactgtaacacttttatattcataaatttcctataataagtaacacaatttcagacaatataacatttcatttaccttttgctctttgttacaagttaggctaaaactcaaacttaattatatctgaattgattttaactttatattttattaatattcatagattaaatcattcttcccacatatctttcatcttattatctatttgttttctgcgaatttctgtggactttttatctactttaaaatatttattatctatattaattaaaatatctccttctttaaaatcccctgtaacattgttaatagatattttatctatatccccattttccttttcaattataacataatttccttctactctatctattatatacttttcactcacttaacatcctcttttcatagtataaattaattccaagaatagtgaatagcttacttagagagtgaacgcaagtaagttttcctctaatctcctaaattatacagtatatctatgaaaatatcaccactaactcttaaggactatcaaaaaataacacgtcagcatgctagcctattatgtaccatattatattcctaagtcttactattaatttaagcttccaaaatctttaaatggatagaattttaatacagctcttccttgtatatttgaggcatctatatatggattaatccatcttctcgcatcattcgatcggctcctattatctcccaaaaagaaaaatttattttcaggtacatcaaaaacaccatcaaaattttcgttatttcttacataatcctctttaatatctgatccatttacggtaacagtacctccgtgtatttcgatgtgatctcctggaagacctataactctttttataagaacctcatcaagttcctttgaatagaataccgctatatctcctctattaatcctactagtgtcataaattctagttactattaatttatcaccaatatttaaagttggaaccattgattcactaggtatatatactgtataaatcagaaatttatttattaaaaaagccattactatagcagctattataggaattatccattctcttaagaaagtgctttcaaacgaaaaacttcctataatacttttattagatagcaattctttattctcttttttatctaattttttctttagaaaatcgttatctgacttattagtgatgttatcagaacaatttaaatctatgtcctttgattccattatataatcattttcattcattaaatgttctcccttttgcaagattcgtttatcttataacacatactaagtattattcacactttataaaaaatttaactcatattactttaatatttcaaaatcttttataggataatactttacttgagcctttccttctatatatgattcatcaacgtaaggatctttccaatacctagaatcatctgaatttgctctattatcgcctaagaagaaatacttattatctggtactttaaaacttccattgtatacctcattatttttcacatagtcttccttaagctcttgaccatttctatacacaacaccatttttaatttctattgtatcccctggaagtcctattaatctttttatcaaaatttcacccttaaattcatcattcttaaataatacaatatctccttcttttaaatttttaggattatgcaccctagttactagcaatctgtctttaacttctaatgttgggatcatagatccacttgtaatccaaacaccgtatcccacaaaattccatacgagaagcgctatgcaaagaacaactgcaatatcaattatccattcatttaatatggacttctttttttcttttttatctgctacaatttcatcttcgttattttctgccacaatattacctccatgtcccacattacacataatttttcattaataccccatttttttcataatccttaattatataaatcatttcacttaaaaagttcttgattgcgcttcgcgcttttttctaattaaaattgatcttggttgcgcttcgcgcttttttctaattaaaatgatcttggttgcgcttcgcgcttttttctaattaaaatgatcttggttgcgcttcgcgcttttttctaattaaaatgatcttggttgcgcttcgcgcttttttctaatgtgcatattttaatatgctatattagtataacatattttactatctaaaatatttataagatgttaattttataacaaaaatatgcaccaatcttaaaaattagtgcataatccttttaggaaatctatatataatttaaactcttacttaaaaatattcaaatacttatatctattcaacatcattctttaaaagatcatcataagattctcttctgcaaataagtcttgtttcattatctttaaccattacaactgctggctttggtattctattataattgcttgacatagaataaccatatgctcctgtagtcattattgctagaatatctccgcttttaacttctggaattttaatattttctaataatatatctcccgattcacagcattttcctgatattgtaactgtttcttctttatctccttcaactccacttgcaagaatacattcatattccgcattataaagagccggtcttatattatcagtcattccaccgtctactgatacatattttctaacactcgggatttccttgactgatcctacagtatataaagttgttcctgcattagctacaatacttcttcctggctctattgtaagaattggcctttcttgacctgttctcgcacacacttcatcaactttattaattattgtgctgcaatattcttcagtacttcttggctcgtctcccttagtatagtatataccaaagcctccgccaaaatctacttcttttattaggtaacctaggttctcttttgtattccttacaagttctaacattatttcaactgcatcttcatatggctccaaatcaaatatttgcgaacctatatgacaatgtattcctgcaaggtttatattctctaaacttatagcttttttaatagcatcttctattacagtaccaactggagcaaagccgaattttgaatctatttgtccagtctttatataatcatgagtatgcgcttcaatacctggtgttattcttaaataaatattttgtaccttattatattctttagctatatcatttaatgcgtctatttcgtaataattatctaccacaaaatttcctacacctaatcttacgccaagttcaatctcagatagagtcttattatttccatggaacataactttttcaagtggaaatccagacttatatgcagtgtataattcccccccagatacaacatcaagacacatattctcttccttcaataatttacacatttgaagtgtcaaaaatgcttttcctgcaaaagctactctattattattctcttcacacttgaagtattttctataatccctacagtattctcttattaaagcttcatcaaatacatataatggacttccatattcccttactaaatttttagcacttacgcctccaatcattaattgattgtcttctactttcattgttccaaacaacttcatttgattaacccccaaattatattttattagccattgctttattgattaaaataaatcacaacaccaatttcaataaaaaatatccgtttcttgaattacctccggattattgctgttgtattaactaataattataataaaaaacaaacgccacagagtatgtctgtgacgagtggtagatctttacgctaaatttatgcacaatattttcattaattatcaatttcttcacaaaagattaataactgaatttgaatatctatactaacaaaatcattattattcttttcaaactgttaatttataactgaaaaaagtaccttgtagctcaacactcttcgtgacagttattcacatattctatgaatacccagaaaaagattatcgcataataatctattttcttcggctgtaataccttttagcataaatcgacgtttgccaactccttatacctactatttattacagcacctctaccccaggtcatgttatatattatattattagaattcatcaatattttaatattaatgacattataaatcattatctgcacaatatcattttattaaactgttacaaatatgataccataaattaaacttaaagcaatacttttttaactttaaattaatggtataaaacccaagcttattaagttcttattctttcctatactcatccataagatctcccataatacttgctgatgttggtggcgtaaaagttatagcatttgcgccagcttgaattgtctctttaattgactcttcagttggtcctccagttgctattataggaaattctggaaatctctttctaatatttctaactatattagcagtatttcttccacctgaaacattaagtattgtagctccagcttcaatccttttagcaacatcttcatcttcagaaatgaccgttactatgactggtatatctattgttgacctaatcttattaacaatttcattacttgtaggtgcgtttacaacaactcccatagcgcctttaaattctgcatccatagctaaattcacaactctttttccttgtgttattcctccacctacgccacaaaaaaccggaacatcagctgccataacaagggcctgcgttattacaggctgtggtgtaaatggatataccgcaataattgcatcagcattgctatttcttattaatgctacatctgtactaaatagcaatgattttattctctttccaaaaattttaattccaccacaatttcttataactgccggaacctcaattacatgattcctaagcgtaccctttatttgaggaacatatttaacatctttatttgtcataatttttatcccctccccattgactattggttaaatttttataataaatttctctagttatacatttttcttttattgtcgttataattatactttcctataaattaaccctctattaaaagtttcctaaattaaaattatctttcgcatatatacttataattataatatttttaaaacaaatcacttatccttatacactatgttaaattccattaattactatttatattatactactttctcatattacttaaagttaaattttatttatccacaatatccacagtttttatccacaaatatgtgcatattgtttataaatacatatcattaaatttctcaacggaaaattgttagtagagactttctacaaatttctcttcctataatcaattatctccatatttattgaaatcaagtccataattaattctaaaacattcataaagaactaattgaatatcatatttgacaattaagttatccacagattttatactattatcaacagtataaacaagccttgtatttacaagcctaagcctcagttttattttatatcctttaagtttgtccacaactttattcacaaaacttctcgttgacgcgtataattacaaaattcgattatagaattaatcatacttatgtggataataataacactaccaataaaatactatgggcatccttaagaatttcttaatactttgttaatttctaagttacaacaccttaataaaacattaaagtataaagtaatatcttgtggtcttttcattcctatcatatacttttaatcaggaaatatattctgaagttaggaaaaaggagatttattgtaatgacaaaaaatgaattttttaatattttaatggatggtttaaaagactttcctgaaataaagctgcaagatattatttcttattatgaaaattactttaaaactagattaactgttggaagaacagaagacgatatagcaaaggaattaggtaatcctaatttaatagttaataaacttagaaatgaacattcaaatattaccattaccatagataatttaactaataatgctagcactgaaactagcgatgagatttctaacatagatactacttgtataaacactgatactaaccatatcaatatatatcacagttttaaaactaataaaaagttcagtactatccattcagaaaacaagaatgatttaaaaactgattccaactttaatgattttaagtctaataattcttatgcttcaaatgattgtttttatgaccttcataatgaaaatatatcacttgatattcaaaaaagcaattataaatgtgctgaattaaaagaatcaaaatataatatcagtaatgagaataactttaaacgcagtgatgatatttcctttggctcagaatttagttccaatatacgtaaaataattaatatttcccataataagtctaaagatataatttctaatttcaaaacaaatattatcttaaaaatttgtattataatcttatctttagcaatattctttccagttataactggcgttattggctgctttatcggactcttaggaatagccataagtatttttatcgctagtattggagtactaattggtggaacttttgcaaacttttttacgctgcctaatactccagcatttatatctaattttccatacccggtaattgtactattttctttaggttcactctcattatcactgcttttaatgattgtatttttctatctttgtaaatttctaatattaattttggctaaaatatataagtttttaaagtttagaggtggggagtcgctatgaaaaagaaattcatttcttctaatatgaagatatttatgttaatattattacttctatccattacgttttatacttctggatgcattgctctagttcaaagtggctacaaactttctaactacgctgatgaacttcatctaagccctagtgccttggaacataatttgaattttaacaatttcaacttggattttaatacttcatatctttctaaagattatgtcctaaatgataatgtcaatgagatctacttcaacttaacctcacaggatattaaagtagttgattatgatggtgatgatttaaaaattcaaatcaaaagcaacaataatatttctaatgacttatatgaaattcaaagtgggaatagattaacttttaacactagatatgatactcccagtgacgcaagtatttcagtaagtataccttatgattttaaagataagagcactttaaaaataaccacaagcagcggtgatataaatatttctggcttatcactaaatacacttaatctttcatctactagtggatctatagctatttcagattcatttttaaattatttaggcttaaatagttccagcggaaatataaattttaataatatagaagcatcaactgaaacaaaactagcttcttcttctggtgacatcattggaaatggaaatttgggaagtataaatggaaataccttatctggagatatcaatttgagaatgattaattccttgaacaatatgtctttaagctctcattctggatccatacacttatctataccaaaaggctcaggctataaaataaactacgaaacgaaatctggaagcttaaattctcctaacgataaattgtcttccggcgatgaaagttctcttataaatattactactgaaagtggaaatcttaatataaagtaaaattttaatgcacaatgacaatctcatactaattgctcattgtgcattatgttatatatcctataatttaaactttgaaataatactgcttagttcttcagccttaatggcttccctgcttattgtttcaaccacttgtttcatagcagttgatgtatcatctattccctgttgtatactatgtgtactaccggaaacctcctcagaattttttgcagtatttgatatagctgcgctaacctgttcaattgatgcatttacatgttcagacatctcagctatctttttagacattgcacttacaaactcaccatctttagtatattgtaaagcgatacttccgtatccttctaaatcttctcttacattagttttaataaaactaattatttctttactattctctgaaagattattaaatgctttttctactctttctatagtattttgtatagtaatcacagatgatgctgactcctctgcaagctttctcacttcctccgcaacaactgcaaaccccttacctgattcacccgctctagcagcctcaattgctgcattcaatgctaatagattagtttgctctgctatactagctattgagtccgccattacttttatctcttctactacctttgattcttctatcgctttctttatatgttcttccttttggctatatacaagtgctgtattttcaattgctcttttgctatttttttctacagccttagctctttcctttataccatttgaattatcattacctttttccgcttgtgcttctaattcttccatattggcatttacttgttgaattgatgcatatacttcttcaacattgctactattatcttgtgtttttgaatcgattttttcaaactctagatttatattttccaaactacttgatatttcttgaacaacagcagatgcttcttcacttaaagcagacacatttgttgcgttatctgcacatacttctatcatatgccttaaattatcttgagctttatttagagcttgtcctataaacccaaattcatcttttcttgtaattgtaatattagttgaaatgtcatattcactcattctttctgctaactgctttattttatgtagtggtgtaattatttttcctaatgtcgtaactacaaatataactcctaatataatggcaattcctactgctatagctgtaagcgttgtgctagtttttatccctattcctatcccaatcccaactaataccattatgaaatatccagagaaaatttttactccaacagactgtaataaactaatttttttgtcttcgttcatataaaacaccccttctttctactttgtcgtctaattaatacttatacttaattttattaaaatcatatacactttgatttttaacaattataattacctgatgtccaaaagattctctaacacggttaatactcgtggataattaaatataatcttatattaatctataataactatgctccactgtaatcgttctaccatatttcaatacttaatgtaaaatttctacttttttgtacacatattagcatatcatgcgatttttttattttcaaccatattgattaaagtttaacgttattttaagtttcactaaacttaaattagtattgcaacatataatataatttctaagcgttcactaagatacatattatattttagaaataactttatatattgaaatttacaatgcacattgcacaattcacaatttcgggtaaaacttttgtaatatttttagaattatgatgaaggtttatttttgaaacatatatacataaatcttacaagttgagttccaaattaaaactaaaatcatgtaaatttaattgtaatatattcctaaataaatcactgtgttattaattattattgcaaaatgtgataaactatatatatcaatcaaattgaatgcactttcagaaattagaataaaattaaaatataaatcggggggctagaaatgatatcaaataaaatgaaatctcttgttgaaaataattccattataagagctatgtttgaagaaggaaaaagattatcagaaatatatggggaagaaaatgtttttgattatagtataggaaatccaaatgttgaacctccaagtaaagtaaaggaagttatctttgaaattttgaatgaagaaacgccaaatttagtacatggttatatgaataattctggctatgaggatgttagaacgaatataagtgattttataaacagaaaacataacttagaactttctaaagataatattgttatgacttgtggggctgcaggcggattaaatataatcctaaaatctatattaaatccagatgacgaggttattactttttctccttactttggggaatacgggaactatgtaaaaaactttgatggcaaactagtgacttgtcctacaaatactgaaacttttgagcctgacttaaaggctttaagtgaagttattacttctagaacaaaagctttaataataaacaatccaaacaatcctactggtgttatctactcagaaaaagtaataaaagacttagcaacgttacttaataataagcaagatgaatttaatacatcaatatatttaatctctgatgaaccatacagagaaattgtttatgatgatattgaagtcccttgcatcttaaaatattatgataatacttttattggatactcttatagtaagtctttatctttgcctggtgaacgtattggttatgtagttgctaactcatctatggctgattttacagatatgatggcttcactaaatattgcaactagaattttaggctttgtaaatgctccttctttattccaaagagtaattgcaaaatccttagatgctgaagtggatgtaaatatttataagaaaaatcgtgatcttttatataatcacttaatttctcttggtttcacttgcgttaaaccacaaggtgcattttacttatttccaaaatcaccaattcctgatgataaaaagttctgcgaagatgcaaaacaatttaatttattgcttgttccaggatcatcgtttggatgtccaggacacgtaagactagcttattgcacttcatatgagaaaataaaaaaatctttgcctgcttttgataagttagcttctctatacaatttaaaataatatattctgtaatttaagtagatataaatatttctcagataatatttatatctattttttacaaaaggatgatttctattatctttccaagaaaatcactatatcattctaagcttctcatatgttaatttctttacagttatgtatagatctattaataatatagctgctcctaaaattacagatacattaataatcttcatattctccatatataactcgtataagctaggttgcaaataataaagaccaataagactaagcaccatccaatatatagagaatctaagagtgacaaatccatgaatattatatctaaattcagagtaatcccaatataccttgttaaaatagtgtttaagtatatatccacttatatactctactgtcgttggtattaataaacataataatattaatggaattccagaaatgtctaacaattcattgcatattataagaaacgtaactgctgttccatacataggcttaaatggtcctattaaaaaaccatcttcttgaaatttttttgtagttgaaaagctataaccttcctctaatatccaccctataaatgaataaaatataaaattaaataccagataaaatactacattcatattactcacctcttctaaatatcaaggcaaaaaagacatatatctttttgtacacctaaagttattactattatttgtagggcttaactcttttatcccgtaaaaaacttctactatagggtaataataatctttaaggaaattttgtacctatttcttaattcttaaaaatgcaatattaataaactatctgctataatagtattattgaacttttcttagactcaggttaaacaaactataaaaattatttatagctgagccttagatattattatattttaggaggctaatttacatatggaaaaattatattatgataatcgataccttaaagaatttactgctgaaattattgatataaaagaaattgataataaatttcatgttatattggataaaacagcatttttcccaggcggtggaggtcaaagctgtgatattggaactctagaagatcaaagagttattgatgtatacgaaaaagaggaaattgtttatcacgtggttgaaaagaagccactcaaaatacataaagttaaatgttcaattgattggaatagaagacaagatggcatgcatcagcatttaggtcaacatgtcttatcaggatctttcttcaacctttttaacgccaatacttttgctattcacctaggttctgatataagtacagtcgatatttatggtgttttaactgaagaacaagttagaaaagcagaaagacttgctaacaaagttataggggatgccgtacctgtagaatcttttgttccaactaaagctgaacttaaaaaattatcccttagacgtgctcttccaaataccgaagaagatattagagtcgtaaaaataggagattttgatattaatgcttgctgcggacttcaccctgcatctactcttgatctaagacttattaaaataaaaaaattcgagaaacataaagaaggaacaagaatagaatttctagctggcgaacgtgccatttctgattcttttaagaaagatgaatttcaaacttctatatgtagatatttaagttgtaatgaaaatgaagctataaatggtataaagaacttaaatcaaagtcttcgcgaagccaatgaaacaaataaaaatcttaacattttactagctaaatatcaagttaaggaaattcttgaaaatgcagctaaaataaataatgttaaagtaattaaacagatatttgatggtgaaaacctaaagtatgtgaataaccttacttctaagcttatcgaaaatgagaacacaatagctctaatggcagtaaaatctgatgaaaaagtaaatctattatttgcttgttctaaagacattaaagatatcaaaatgaatgaacttttaaaagatgctatatctcttattgatggaaaaggcggcgggagtcctttccaagctcaaggagcagggaaaaacaattcaaatttagaaagcgcaatggactacgcatttaataaagtatctcaaattataggtattgcgaactaggtgaaatataaaaatacttacagtatgaggaaattttaattttactgctaaaccttcgaaagggaatatgcgtttgtttcgcacctagataccgaaccaaaatccaaacatataactttaattgtagtacataccagaaagaaaggtcatacttttgtggaagtgttgcattgagtatttagctgcagatatttccttagtagaagttgttccatttttgcttgtcacgagcttgcctcgggagcatacaggaatggtgcaatttttgctattggaaattcacagctaaatactccagcaacctggaacaaatgcatgacctttctttcggtttttatatataactttaggtatctagtacttctcaatattttacatttaagaatttatatactatgatattacgaatttatatctttcgcctataacgtactgttttcctatatgtaccggtctattcttatcatcataaataacagtctttatataaaacaagggttcacccttttgcaccatcaatagcccagcctcttcatccatggcttttgcaatttctattgtggtatgatcgtttcctgagttaggtgaatcagatggatttatatcatatttatctcttaataattcatatagtgaaccacttaaatcttctgttagtaaaaaattaaaccttttaaaagaaaaatagttattttccagcattaatggatctccacctgcaaatctaactctttgaatatatattaacttatcatcatcatctagttctaaatctctcttatcttctattttgggctccattacctctcttttaatgatttcattagttacttttaatccactagcctcacaggcagcagtaaaactagataaatattcaattttcctctgaacttttggcttacttacaaatgttccttttccttgtttttttataagaaaacctgactcaactaattcatttatagccgcacgtactgttattctactaacattatatttttcacttaactcaacttctgttggaatcttatctccatattttaattctccgctcgttattgaattacgtataatatccgctaattgttgatataaaggaataatattatcttgtattagcatataaagactccttttaaacatctataatattaactatatactatcacaacatttttgaaacttcaattaatctattgttatgataatatcaattctttgatttattaaagtaatcttaaaatagctgttggatattggtcattaaataatcaccattcaacagccactatacctttaattaatattttttaccatatccaaatgagccttctactagacatgttttagctgaaaatatagcaccttcatttagactttctttaattatagtttccctatccaattcattttctttaattttgcttatgtaatttaccaagaatgctgttatgaatgaatctcctgctcccattgtatctacagcttcaacaagctctggctcttgtgaatagaacttagttccatcatatagcaatgctcccttttctcccatagtaactactactattttacttccaagcttatgagctttcattattagattaagcatttcatcagtctttaaatgactacatgagaagaaactaaaatctactttaggagcaattctttcaacttcttcaattgtaaaatcatcagagaaatcaaaagatattggtatgcttaatgctcttattttatcaagttctggttcagtatatccgtacaaacctgcatgtaataagtcaaaagttttaatataatctaaatcatcttgtgtaagattcaaaccattttctcttaaaactccaccttcgttgctccctagaaaaactctatcaccatcttctaatgttactcttgcacatccattttctccattaaaatgtctgcactttgaaatatctaagccaagttcatgaattgtattttgaacatgttctgcttcagcatctgatccaaatgctcctaaaaatgctgaatttgctcctaatttttttgcataggctgcaaagtttaaagcatttccacctggatacatagttctaatatgttcatatttatctacaacgttatctcctaacccaattacttttaccataatatcttctcctatgctaaaatattttaatattcaacttttcccatatatcttctagtatctaaatcatggtttcttatttttgctaattctcctctatacacgcataaaatgctatagaatactataggattaaagaattcaactactgaactatcaattacacttattccaagttccttacaatccacaacttcaacttttgcaccatatttatttaagaatttaagtgctctttcatctaattctctagttctaccttcattcattaataataaatataatgtttctttatcagttacttcaaatggtccgtggaagtattcccctgagtgaactgctgatgcattcatccattgcatttccattagtgaacatattgagaatccataagcatgaccatacgatgccccgcttcctaatacatatgttattggctcatctttatatttttccgcatatctctttgccctttctgcaactaagccttgccccctttttacaacatcatttacgatctttaaaccttccataaatttattatatccttcataaatttctgtttgatttaatatttcaactgctatatttagaattattgccattggattatcttctacgcttgtatcatttccccattcgtaaaggatattataatccgcatacttaattaaatctgcatccttattatgcgttaatgttatagttgctgcacctttctctttggctactttagctgcttcaaccgtttcaggcgtatttccaccatgtgagcatactattactaccgaactttttcctaatgattttggtgtcgcatgtacaaattcattgctcgtatatgataaagcccttaattctcttgcttcactttgtaaaaaatattgtgatgcatacatatctactaaagaccctccacatgctactaaaaacacttcctttattccgtcttccttacttgatctaattttccctacgatttccctaatattcattgttactcctcctatatatttataatctcattctacgaatttatattttttacattggcaaatgcttacgatcattaacccaaatagtagagtataagcatatagcatttttacttttttaataagtgcattacttacttcaactaataagcgatttatctctttttaccttgcgtaactttatcataataacgttactagtaatcttggaataaatatttttcttaatcgaacttgttgatacgtattataacgtattaaataatgttatgcaacttattttgaacttaaatagtaagtatatattttcttcttaaacagtgtaatttgctagaaatatcattagccaattatttgagcctattattatagatacttttttctctaatctgattgacctattacaaaaacttctccctttaaaatataaaattattgatgcaaggtattaataacttccttacaccaataattatgtaaataatcaactttattcggatctaatccattaacttatttgcctctacaacaaattcatcaatttttccttcatcctttaatctttttattgttttgttgatttctgtttgcaattcagtcgaacctttcctcattgctatcgctgctccatcttcctgtgcctcaatagttacagaagtcaattctatatcattgtttttatcacaattaaatttagccactggtgaatcaagtaatattgcatcaacctttttgttctttaaatcaagtactaagtcagtagcttttcctaatcctttcacttccgcacttggtaagttatcttttactaagccttcttgaactgatcccttttgaaccccaattttcttatttttcaaatcatccattgattttattgaatccgcttcaccttttcttactataaatatatttttctctttattgtatatatctgaaaaatcagcattttctcttctttcatcagttggattcattgcagcaaatactaaatcggattttcctgcctgaagcgatacaagaagtccatcgaaatccatatccttaatttcaagttctacacctaaatctttagcaacctcttttgctatacttacatcaatacccacaatttgatccttaccatctatttctttatgaaattcatatggtgggtaatcagcacttgttccaactacaattttgccttttgattttatatcacttaatgatgatgacttaacatctgaatttttgctagaactattagtgttactactacatcctataattccaactgctatactgctaattgccacaactactattaatttttttaataaaaattttttcatatattgtccccctttaaattttatcgaagtattattctttagtattttgctactaattgaataatattgctataaagcaaaaatgtcaatacattataatgatgttttaatacgtattaataagtaatagtattttttatccctattactttttcttcaatcattaaacagatagctcaaatcaataaaaaatagttaacaacatgaaaaataaatcattattgttaactatttataaaaactgtttaatttattcttttaattccttaaatccagaaactttgcatttacccaaatttattaaaagaatattgtgtacttttattcttctattttaactacatcatagccttcttcttcaatagcttcttttatttcttcattactattttcagtttcaactattgcacaattatccttaagcctaacttcaactgaagttaccttatccaaattttctagtgcttcctttacgtgagcaacacaatgttcacaactcattccttcaattaatattttctttttcatatttattacctcccgtttattaatgattaaaatttagaagtcaaaatatagatatttgaaataaatttcttcaagcatctagatacaattatctactacctaagaaatgtcctaatatgctatttttgcttatcatcatatcttattgatcaggctttaaaatttttaagccttaatgcatttgtaagtactgagacagaacttaagctcattgctgccgctgctatcataggatttaacaatggacctccaaaaacatgaagtattcccatagcaactggtatacctagtacgttatatccaaacgcccagaataaattttgttttatatttttaatggttgctttacttagttttattgctgttataacatccatcaaatcgcttttcataagaactatatctgctgattctattgcgacatcagtacctgatcctattgcaattccaacattagattgagctaatgctggtgcatcatttatcccatctccaaccatagctaccttcatgttctctccctgaagcttcttaacctcattggccttgtcttcaggtaatacttcagctagcactatatcaattccaacttgttttgctattgcatctgcagtttttttgttatctccagtaatcatagctacctttattcccatgttatgaagagcttctatagcttttttgctacttggcttaacagtatctgcaacagctactattccacttaaagtattatcaactgctacatacataggagtcttaccttcagctgctaatctatcactttcatctgctaacatagcaatatcaatatttttttctatcattaattttttatttccaagtaaaatattcttttcttctatcttaacttctattccatgtcctggaattgcattgaattgttgaatttctttaagttccaagtttttatcattcgcttctttaactattgcttctcctaacggatgctctgaacctttttcgctacttgcagctaaaactaatatctcatcttccgatattccatttgttattatatctgtaaccactggttttccttctgttatagtcccagttttatcaaatactatagtttttatactatgagtagtttctaacgcttctccacctttaattaacacaccattctctgcgcctttacctgttccaaccattattgcagttggagttgcaagacctaatgcgcatgggcaagctataactagtactgcaataaatattgttaaagagaatattgttgtttctcctgcaattaaccatcctattgaagctattattgctaacattataactattggcacaaaatatgctgatataacatctgcaagtttagctattggagctttagatccttgtgcttcttcaactaacctaactatttgcgcaagtgcagtatcttttccaaccttagttgctttatactttataaaaccagttttatttatacttgctccaattacgctgcttcctactatcttttctactggaatactttctcctgtaagcattgattcatcaatagatgtactaccatcaataatttccccatctacaggtaccttttcacctggtttaactaatactatatcaccaacaattacttcttctataggtattgtaatttcagcattatttcttattattgttgcagttttaggcgctaaccccattagtgctttaatagcttgtgatgttcttccttttgaaactgcctccagatattttccaagtgttattaaagttaaaatgactgctgctgactcaaaatataagtgcatagcatattcagtttcacctatttgtattttataaattccaaatattccatataaaactgctgctaaagtacttatagctatcaacgaatccatattaggacttagtttaaataaattctttattccaactaaatagaacttatatccagctatcattacaggtattgttaatactaattgaatcacagcaaaattcaatggattcatcatagaatcaataatatatggaagaggcatacctaacatatgtcccatagttattactaaaagcggaattgcaaatattagagatataataaatctccttaataacaattgacttgcctctagttttttcttttcttcaacttgctcttcttccttaattagcttataccctgctttatctacagcagctttaatttcactatatccaatttcatcttcatctatatttatagtcaacttctctgttgctaaattaacaacagaatcttgaactcccttaagctttttagtaactctctcaactctacttgcacatgctgaacatgtcattccttcaactttaaaagtataagtcttcatattcttcttaacaccgtagccagctttaactacggttgcttctatattttcattattaagtttgttttcatcaaactctacgttcagtgtttctgttgcaaagttaacacttgcactatttacgccttctaactttttaacaaatctttcaactctatttgcacatgctgagcatgtcattccttcaattttaaatgcttttttattcatatttcacctctttacctatttaacatatacatttaaacttacattaagttcattttaactttactaataaatttgcaactttttctctacatttaattaatgaaatattgcttttatattttatttcatattatcatctcttaataatcagttttattttgaaagtaacttctctaaaactttattaaattcttctattttttcatctggattattgttatagcaagcttcttttacgcaatgacgtaaatggccttgcaaaatcattaaatctgctttttttattaaagattgaactgccatcaattgatttgcaacatctatgcaatatctatcgtcttcaatcatttttattattccttctatttgacccttagctgtttttaaagattgtaatgctttttttctttcttcgctcatttcttcctcccctccccctgtgtaggggggtcttgttaattttattatatattaataaattgctttgtcaatattatttataatatattcttaaggttatctcactcttctgtctattcttatccttgccttgaatactcattttttattctggacacttaactccatgttcgcctaatgccgtgataaaatacaatgccggttttaacgtagaatttgctaaaaaaataagctccatataacaatgaagcttatttctgtaaatatctatttatattcaattatagggctttctttaactttcataatttctccgatatgaaaatttagaatttcatgaccatttaaatttggaataataagcattgttatatcttctattcctttttcttttaggagttctttatcgaattctaaaagtaactcgccttttttcacgtatttttcttcttcacaatgcaaattaaagccttcacctttcaaatttacagtgtcaagtcccacgtgaattagaatttctactccatcctctgttcttattcctattgcatgcttgctttccttcattattgtaacaatagtcccatcacatggtgaaaatattttattaatacttggtttaatagcaataccttcacccatcattttctgagaaaacacttcatctttaacttcacttatatctacgctaactccatctgtaaaagcatataataatttatttttgtttctttttaatatatttttaaacattctctatcctacttcaattctggccaatattctttattagcttcaatcatatcatctaaaatctgttttgctacaaatgcagatggaattgttttattcatggtaaatgccataagtgctttttcatatgatccttcaatagcagcttcaactacaagtttttctgatgcttcttgttgttcaattattcctttatagaaagttgggatttctcctacacgtactggttctggtccatctttagttatatatgcaggcacttctaccatagcatcgtcaggtaagttttttattgccccattattttccaccataactaagtgtctctttcttaaatcaaaagctaaactcatagcaacttcaacaataaattctccatgcactccagtaaagaattgtgtaagatcaatttcccctgtagcattatattgatctacagcatcaaatatcttcttttctcttccttccattacttcattagctctagtatgatttttatctgcttcttttacaatcctatctcctaaaagataatattgcatataagtatttggaagatatttagggaacatttgcattatgtgtttagcattatcaaatgtatgaagccatgatgcatcattatgtcttacttcacttcttgaatctggaggaatataaccatgttcctttacatatgcttttaactcctcagttttatcttcaccactaactctaatttttgtaaaccacccaaagtgatttaatccaaaataatctgcttctatatcatgtctatcacaatctaagatattagccatatttctcataattgcaactggcatatcacatatatttaaaatccttgcatttggtcttaacttatacatagcttttgctacaatagctgctggattagaataattaacaatccaataatttttatttgcatatttttcacaaaaatctatcatttcaaccataggatatattgttcttaatccatatgctagtcctccgggaccacatgtttcttgaccaaccacatcatattttagtggaattttttcgtcttgttctctcatcttatataatccaacacgcatttgagcgaaaacaaaatctgcatctttaaatccttcttctggatcagttgtaagaacaagttttacctctggatcaaacatttctactactttctttactatcactcctactttattttgacgttctgaatttatatcatataatcttaattctgatattttaaattcctctttctttgaaagtaaactctttacaatccctggtgtatatgtgcttcctccgcctactattactaatttaaattctttcattttaatattcctccttgattttattctgctctgtctaatgcttcatctactattgttctaattttattaattgaaaggccatatacaacttgtatattattcccttttctcacaacacctgctgctcctgttccttttaaagcttcttcatcaattaatgtgttatctataacatccactctaagtcttgaaaaacaattttctactgttactatatttgcttttccacctaatgctttaattattgttagcgctttttcatcatcgttattagctttactattatttttatttgctgatttcatatcttgcttaacttttgctgcattctcatttaaatctattacagcatctgtatcattctcttctcttccaggtgttcttaaattcatcttctcaatcataaatttgaatactaggaaaatcacaactatttcaactaatcctactaatatatacacaggccaatgagttttgcctatacccgctggcaagtttattactaaaaaatccaatattccattagtcgcacatactcttacatttaataggtatacaaacatttggaataatccgtcaatcactgaataaacaaaccataataatggtgccgcgaaaataaatgtgaattctaatggttctgtgatacctgcaattactgctgttaaagttgatggtattaattgtgcctttaaattactacgctttgcttttttagcagtgaagtaaaatgctaaggcaactccaattacaccaaaagttttaactaatccatatgttaaaaatcttgctgaatcaggcataatagagattgttgaatcattaagcaatgataagaaaactggttttgctccaattacattttggccatttattatcatctgatcaccaactgctgaatataagaatggagaccaaattaaatgatgtaatcctgttggaactaagaatctatttaaaaatccataaacaaacactccagctgcccctgctgaactcataaatccagtaagagctgtgattccagcagctattgtaggccatacatatgtagtaccaatacttaatatagctactaccggaatcatgataacgaatacaaatttactattgccatacggagccatagcgccactaaattctttctctatatatttgttatgaactatagctactagaactcctagaatcattcctagaaatactcccatatctgtaacatgaaatcctagttgaattgtctgcccagttccatataaagctgatgctgtatcacctttaattatttttccagatagctctaaccacttactattcgcacctaaaaatagaatatatgacataatagaaatgaatgccgcttccgcttttttcttctttgacatccccatcgctattccgacacaaaacaaaatactcaagtttcccataatcggtgataacattccattaaagaattttcctgttacccaaattgctccgccttcttttacaaatgttgtattggtgaaaactgctgttaatgcaatcaacatacctacaatgggtaagaataagaccggtccaatcatagctttggcaaatttctgcatactatttaaaatcttatctttcatttaaatattccccttcactattttataattttctttgggtaattacctgtgagaataggatatcattattaatagatattgttaatacttttaaacgtttcagcaacatgttgactcaaaagtaaacatgtttacctttacatcaaaaaaagctatctcactagttaaccttgagatagctttctatatataatttcagtaagtttccacattggtatgactagtttggatatctatattttataaattactcattaccttatctagcaaatattccattacaatcattaccctagcataaaaatagtttgcagtaagatttctatcatctaattctttatcgtctaatatcataaaatttagggttgcctttttagccatatgattctctgatttgccagtaaaagttataatatctaattcattttttgatgcataatcaattacttttgttatactttccgtttctccacttttagatattccaataactaaagcacctcctatttgattgctgtcatatactccataagaatttgttttaatgcatttaaacccaagcactaacatctttctccaaaagaaatctgcaatcgaatcagagaatccagtagctgttataaaaattatatcttctctatgtctaattagcatagaaatgaaatcttctattttcttattttcaatttctgatatgaaactagtaatatcagaggtatgttcttgattgttttgatgattttttactatgaagtttaggcgatatatcatatctacatagcctgtataacctagcttctttgatagctttattattgttgctgccgatgtatagttaattgttgcaacatctcttacacctttagttaaaacagaatcaatattagtcaatatgtattgcaaaacctgtctctctgtttctgatagcttataattatcagctattttataaatatcaaatttcatattacacctccaatataatgtaattacttcatatgatatcatacttatatctttgttacttaatgaatacattaaaaaatcccttaacgtagggattgtaatcaaaattgcagctttcattaagttacttatatctcacatcatgaatatcttctctcttattataaattcccaataaattttattattcctcaatttcttctaagtattctataaatgccttaactataattggatcaaattgcttccctgaacatctttttaattcttcgattgcttcttctttattcaagcatctcttataaatgccattgttcgtcatagcatcatatgaatccgcaacactaacaattctagatactagcggtattttctcgccctctaatttaagcggatagccatttccatcccatctttcatggtgagctaagacgccttttgctacattatctagttgatttgatgcttttactattctatatcctttttctgtatgagttttcactacttcaaactcatcttctgttagctcacccttcttaagtaatatttcttcatttattcctattttacctatatcatgaagcttagcaactattgttaactcatccattactgacataggaagtgataatttctcccctatagcaatagaatttgctaatactctatctgtatgttcttcagtttccagactcttggcttctaaccccatttgcaaagaatacattatagaactattaagactggttttttgcaacaacttttgcctatataccttatcatctgcttcctttaatgcttcatatatactcttattcaggctgtccgctactgatgcacccaaagatatgctcacattgattaaatcgtgcttatacattttgcaacgattaaatatatttttaataatgatttcacattcctgttcagttgtatttttacttaaaattacgaattcatctccaccagttctgaaaatcaactgtttttcaccacatacatctttaagtgcttgggctattaatcttaaaagttcgtcgccttgatcatgacctagcgtatcatttactaattttaatccattggcatcccccattattacccctactggaagatactcttcactttgaaactctttcactttttcttcaaaatatgttctattgtataaacctgttaaaatatcggtaaaacttaattgtcttaattttttctctgcttcttttttctcagttacatctaatactagccctacgacacctgcaacatcaccactcttatcgattacaggtacttttactgcttctgtatatatttcctctccattttctgaataaagtattgtttcagcttttatacttcttttattttttattacttcattatcttctcttgaatattttgcagccaactcttccgttggatgtatatcaatatttgtctttcctaatacttctcctataccatccttattgtagaattcatcaaattgcttatttacatatacatatctgccttctttatctttaaaaaatactctccctggaagtgtatccattacaacttttaatatgttttcttgttcctctataatcttatccttttcttttataatatctaaatttgcatatataccagctacagcaaatatttttccctcatcaatcagcggcactattgtaatttttctgcgctttccatcaagatacccttcttcagttaatggctttaaggagtttataacttgattgcaatatttaatacattcctctcttactgcaccatcaaatatctctgcatcattttttccaataaattcttcatttatatctttatatatagctttgtattcattatttacatatataaatctcaattcaaggtcttttatccatataggctgtggaagattatccgctaataatttaaacagcttgtactccatcttctcattttccctcctttgcattccaatctgccgtaataattctcagaaattattcatccataataatctctaataaactacttgaagtatttatgcaactatttcatcaaattttactaattacaaccaacttatcacactttgtaacttctttcaatcattgcaatcatttgttagggacttatttttacaattgaaattcaatttctttgttaaacttaatcactattgatatagctttaaaactttttaattctttactatattacaaaataaatatttaaattaagtacctttatctatttagtcttatgtttatatttcttatctattatttcttttaaggcaccttctgctagttgtgcaaaatattttgagcaatttaaaattgccttctcatcaactttatattctggatgatggtgcgcataagattttcctgttcctacaattataaatgcacctggtatttttctttgataatacgcaaaatcttcaccctctagccccatagatattcttctaacatcatatccagctcgttttccaattttagtgctaaactctacccattcttcagtattatttgttgccggagaacctgaatgccaaacaagctctgcacttcccccaaaagattgtgctattcctgataccatttcattcattctcttagctattaattgacgtatattctcatctaatgttcttactgtgccctcaaggtatgctgattctggaattacattccacgtatttccaccttctatatgagttacacttaacagagctttttctgttggtcctatattacggctgataattgtttgaagtgatgtaactatgttactggcaattataattggatctattcctttttccggcttagcagcatggctaccaattcctgtaatatttatttcaaacctatcaacagcagctgtcattgctccagtttttattcccattattccaacttctgaatctgaaacattgtgtattccaaaaattgcatccacatcatctaaaacacctgtatctaaaatttttttagctccatccgcactttcttcacctggctgaaatataaattttactgttcctattaatgacccttgatgctttttaactaaatatgctgcacctaaaatcactgatatatgaaaatcatgaccacaagcatgcatcataccatcaactttagacttataacagagacttgtctcttctttgattggtaatgcatctatatcacatctgatagcgacgacaggaccattaggatttccttttacctgtgctacaaggcctgtatccaaaggtaaatcaagaatatctatatctgctctttttagcaaatcttttatcagttgtgtagttttatattcctcattagacaattcgggattctcatgtagttttctatatacttctataagctcatcatttaaattctctattatagataacaatattttattcgtcatattaatccccctttaaattcataaaataacattttaccctttataataggctactttgctaaattagttgctgccatagttataacaataaatattatatagaatactatataagccctcgaccacgctccactaaaagaatatcgtaccttctggtaagtctttaatattcttgtatcttcttttactatctctaaaaattcacttttatacttactaataaataacaataatgcagctaccccaactaaaaagtacaaagttccaaatgtatactccaatataggcatatttaataaagatattcctgttgtagcaaaagttattgtattattaaatatatgagctatcatcgacggtataatagattttgatttaattgcgataaatgctaaaacaattcccatcagtattggattgatgaattgaactaaatttagatgaaacatagaaaaaagaattgaagaaacaatcattgctgttagattcccatacttctgcatgcttcttagtataaatcccctaaatataatttcttctaaaattggtcccactaaacatacatatattaaaaataatattaaaaaactgttttgtttagggaaactaaaatctggctgtggaatgtttaatcctaaaatcttaaaaattgttgagtatatcatatataccatgcttgaaatcattcctactcctatacaagaagttgctcctaataatacaaacatcttatttgacttattctttgaaaatatttcttgcctaaatttcacctttatagtttttattgctattagaattgctataagatccccaactacacatgtaaaatatccagcaaaaaaattatatgcgtcacttgaaagtcctaatatcatattttcctttagattagttaccacattaaatcctatcattggtcctataaattttatagaaaatgtcattatgaacaccaatccatatgttgacaatactaacgcaagaagtatccttgcacagtttccgccgctttttttaatatccttttttaatgcgagctttctatattcaatttcttcttgaaaatcatttatcatagctttacctaccattcattactttagtgtaaaataaaatcgcaattacttatagcctcatataaatcttctcttctatccttctttatatcaaacttttctttaactgcttttatcatatctatttttaactcttttataattaatgtttctttctcacttatttcattaagtatatcaccatctggacttacaaaaattgattttccattataatgaagatcatttccaattcctactctatttatccctattatatagcattggttttctatggcccgcgccttcaataaagttatccaatgtttttctctttctttaggccaattagccgctatagttattatttgcgcttctttagatgctatttgaaatatttctgggaaccttagatcatagcaaataaatggagctattttaaatccatcactctcacatgtgagtatcttatctcctttataatatttatcatcctcaccactgtaggaaaatggatgtattttcgtatatttagttaagcatttcccttctcttgatagaataatatatttattactacccattttatcactttttaccgcaacaccaattcctatatttatattattatccttagccttttttccaatccattttattatttcatcttcagataatacaagcttgcttatatccatagtaaaacccgttaaagccatctcaggaaataagattaaatcaaccttattttttgaagctttttcaataaattcttcagctttcttaatgtttttgttaatattctcccagactatatccatctgcgcaattcctataatcaagttgtacctccttcaatatttataaataaaggatactatgtgcattgttacatcagagtaccctttactttaggtcgtctatatctaattatcaaccgtggttaaaaattctttccattccatccccaattttcaacttcttcatacttaacatatatcttatcttgaggtatgtttaattccttttcatatatgttacaaatttctgctgttaaagcatcatatgcatccttacttgattttccaaatatctttacttctataaatgcacccttttctaatttttctcctccgaaatataatgagtagtcatcttcgaagcctaccatcaaaaaggtttcactttttcctggaatcaattttattgcttcccctaattttttctttataatttcctctttttcctttgaaattttcacactaacttttgatcctataaatggcatctcttgttatctcctttctacatatacatatataaatatactaaattataccataattctatatatttgattattatttgcaagtacatacttaatttatatcataattcctaatatcacattcatttctattactacaataaataccacattgaaaattgattatttagttttaattatatcacatcttgcactctaccttgctactatgtttgattcgcctttcttaagttttataaggatactatattaacttaggaatactataaatattctaacgtcttatcttctaaatatagtatgtatatattttaaatatgtaatttattccttttgtatatatccattacttctcttattttttaattgttgaactttatttattaatctcatatctatttcaatattggttaatgaaataattataagaaaaaactaaaatttggttaaacttttttctaaaatatgttatattattcatagtaggtattaattttgtaagtatttaggtgttgacttttaagtttttttgagaggggattaaattatgaatgtcgataaatcaatgtcaaaaattttgatagttgatgataatattgctaatgttttactacttgaaagaatgcttaacatatctggttataagaacataaaaacattaacagattctagagaaattttaagattatattctacatataaacctaatttgatactattagactttaggatgccatttgttgatggacttcaaattatagatgaactaaatctcataaaagatgatagtgaactatctataattatgatctctgctgaaaacgataaagaatactatgataaagcgttggctaaaggtgctgctgatttcattactaaaccatttaattatgatgatataatttccaaaatcacgagcaccttacaacgtttatgattactaggcatagtggatgaggtgatattatggataaaacaaatactcataaaaatatttctctttataaatggatttggcagtcctatattcgtaatgcgttaattccattaataattattgaaataatttttacatgtatatatttcatctcaaattactggtctcataaaagttcagttgccttttacaaagatcaatcaaaaagtgaacttaatgaaattgttaaacaagaagtcaacttaattgatcaacacttatcatctatttcaaattctacaatgtttttcagtttgcaaataggacatgctttattaactccagcttctttaactcctaaagaatatagtaggttatcatattcaaatgataatatttactatactaaagagaataattcagctgatgaggtagcaattttttataataattttctacctgctacaagagatgataaagaaaagaaaatagccaaggtattaacacaacaaaaattaatggcagatattaagaattcctgtccattagttaattccatatattttaacacctttgattccttaaatataacttacccatatgttgatgtttttaatagctataattcttctttacaatcaccttctagcaaattttattatgaagctgatgctaaccataatccagatcaaaaagtaaaatgggtgacccatgattttaattcaagtaacaacgattttataagttctgctatatgtcctgtttataacggcaatttcttagaaggtgttgtaggtattgatataaatatgaattcaattgttaataaagttttagaaattgatattccttgggatggttataacttattaattggaaaagatggtaatattctttcactctctgatgcaggaaaaaatgatttaaatttagatcaactcgttttgaaatatggaaatgggtattatcagtataacttgtataacaacaatgatttgaccacgttaatggatgaaattcaaactagtgaaactggattttcaaattttacacttaaagaagaacctagaattgcatgttggtccgctatacctaatacggatttaaaattattaatagtagttccaacaaaaaatatacactctaatgctgatatgctaaaaaacaatttgttaagaatcggaataattacagtattaggattaattttatcatattttttacttttcttaatcacttataagaaagtgaaaaatatgagctatattgtttctgactccttgttaaatattaataatattgttcaggagattagtagtggcaaatatgatatagatgatccactattaaagatctcagaattagaagatatagcattaaatttgatcgaaatgggacatcatatagatgaaacaaataaaaatttattagttacccaatctgaactcagaaaaaaagaagttgatttcaggtcacttgttgattcaattaatgacataatctcagagatagatataaacggatatatcactaaattatggtcaagtgtccatacttatttgtataaactacatatgcacgggcatcttagctctatctatgatattttagatgaaaatacagctaaagttgctaaagaaaagataaattatgttattaaagcaagaaaatctactactatggattttaatattcaatccaaggatggattaaaatggtttgaagcatgtatttctccgcacttaaactataaagatagagtagtagttctaactcgtgacattacagaacaaaagaaaatggctcgttctattattacggcaaaagaagaggctgaaaaagctagtaaagcaaaatctgaatttttatctagcatgagtcatgagcttagaacaccattaaatgccatattaggattttctcaaatcttagaattagaccctgaatctccattaacaccttctcagagtcagagtgttaaggaaatatcaaaagccggcaatcatttactagaattaattaacgaaatactggatttagctaaaatcgaatcaggaaaactgagcatttcaattgaatctgttccaattaaacatgtaatagaagaggctatttccataataaaaccatttgcagataagcataaaataaaaattattaattatccaatagataattcagatgaatttgtttcggctgatcatacacgactaaaacaaattttgcttaatttgctatctaacgcaattaagtataacaaaaaagatggccaagtaatcttttatcatgataaggttaatgataagtatagatttcatgttattgacactggcattggcttatctaattctgatttagaattgattttcaaaccattttatcgtctaaacagaattaataattcaattgaaggaactggaattggacttgcagttgccaaacagctaactgaattaatgaatggtgaaatatttgtaactagcgaaaaaggtgctggcagtcacttttggattgaacttccttgcatcgaatcatctattttgcaaacttctgaaaatatgatggcatctgaaaataaaacttatttctctaacgataaatttcgtacaatattatatgctgaagataatcctgctaatttacggcttgttgaacgtgctctacaccaaattagtaatttaaaaatgctttcagcaaattctggtgaattgtgtttagatttagctgtttcccataaaccagacattatattactagatataaatttacctgggatagacggttatgaagtcttcaaaagactcaaaatgcataaggaaaccaaagacatcccaatcatcgctgttagtgctcatgcaatgcctagagatatagaaaaaggattatcattaggattttctgattatattactaaaccaattgatattccaaactttatcgaaaaggtgtgcatcatattagctaaaattaacaaagaagacatcgattaataagacataatactatatttaagaaagaggcgttatctaatttatgaattatgacaaagattatgacataattggtttttcaaatgatttaggacttaatcttcaacaggtatctgagctttatgccgaattgattaatgaatttaatatagcattatcagatttaaaggactccatgatggaaagtgatttagaaaatatccaaaaaataattcataacttgaaggggctttccggaaattatagaataactgatgtctatgaggaaactacccaaattaataatttattgaaaaatagcaattataataatatccaaccgcatttaagtaatatacttactgtcatctccatagccttaaaaaaaatcagaagcttcttttatgagatgtctataatcatataactatataataaaaaagacagtactaaagaattattatttaaactaaacctatgaaatatctcttttctgagtgtctatttcataggttttattttaattcttagtactatctttttaaattatcatctaatttctacgactacttattagaaattctcctaaatctttatctgcgtttagcatatgttttctacaccatttaaatattttttgctgcatatgtataataaataatgttgatatttctctagtttctaagaagcttcttatgtcccttaagcactctttgaattcttcatgctgcatctgctgaatctctaatcctggatagttattttccttttgaattgcttcttcttcattaatatgacgaattgcatgttcttcaagagaatccaacgccttaataatctctaccttgcttttttcttcattcatggcacttaccaaattattaattaatctaaatatttcttgatgctgtctatcaatgttatcaactccagtggataacacagcatcccaatttgaattcataaaatgcataagtacctcaccactaatattgattctgctaatatccataataaccgaatcattatcttcatgagtaaactttaccattgatgatgctattttattatttattaatcctctttcatcctttttcaatacttcatacatatttcatacaccctctcataatttatacttctatacccaaatatcattatctatatataatccttaccctaagattttaaatttttagcataactaatctacacaaatatattcattaacaatttcttctggtaattctttataatcaaatggtgatatatcatcaatttcaaatttgactaactccataacctttattaataccctatccatttttactagaaattcttccttttcttctgccttaataacaaaactattgaaaggaacattatatttatttacaaactttaaatttaaatttacaacccaacttctcatatatgtatcccccttatcaaaaacaccttagtattgtttagaattttctattaaaaaatttcctaaatccttatctaaatctcgtatatgattcttccaccaagttgacattctattttgtacctttattacaaataatgcagatgttccagtagtttcaaatgtcctcctcaattctttaagttcctctttaaactcttcatgctgtttatgttgaatgctatatttaggataattatttttcttttgaatttcttcttcttcagtaaaatgctttataacataatcttcaaggaaatttaaagttcctataacctcatccttacccttaccttctttcatagcagtcaataatttattaatacgatcaaataattctttgtgttgattatcaatatttacaattcccgttgctaaattattgtcccaatttaaattcataataaaacaccctctcataaattacttttaataagattctttctttatataaagatatcttctatacgaatacaatttaaaacacccttgcctataccagatacctatataattcaaattattttttatcatctatatctaaatttaatttcttcataacttcaattaatttatcagtatttattggtttagttacatacacttcacagcctagttcaaaagcattttggacatcttttgcattatctagggccgtaatcacaaatttttttgacaaattctcataagttatttgtttttctttttcaattgaattaatcatctttagtgcctttaacccatctaactttggcatcattatgtcaaggcatacaacatcatatggatcttcctcctctaatgaaaatataaatgcctggaccgcttcctccccgttaaccaccatatcacaatcaccatattgtgaaaaaaacttaaataaaaatcgtctatttacataatcatcttccgcaataagaattctcatataccaacctcttttcaacccaaatttatatattcattaaactaataatgcgttctctcaattgctcaaaagttattttcactttttcctcatttccccttcgtgcatttgctttcaacttaaaccccatcattactagttcatcaaacttagaaataactatagagttatttataatctctgctatcttttcaattttaattagatcactatttgcctcgtccattttttcaactaatctttttaattctgtatttagatctgtgcttctatttatttcattcgcatttttgaaatttcttttctcttgtaattcatgtgaattaatattcacttttcctctctttggtagtctgaaagctgctgtaaaactaaatgtgcttcctagtcccatatggctttcaacacaaatccctccccccaatatttcaatcaattgttttgacaatgcaagtcctaatccagttccattatattcacgggaataggaattatttaattgactaaaacttttaaataataaattcctatctttctcattaattcctattcctgtatctttaactaaaaaccttaaaataatcttttcccctattatttgctcccttttaattattagcgaaatttttccttcctctgtgaattttattgcattacttatcaagttattaagtatttgttgtaacttttcagaatctccgtataataaatccggaatttcatctgaaccattgtattctaaagtaattcctttttttcttacatcgtatgaatagattttaagtacgttatgtattagatttttaagattaaaattcgattccctcaattccatttttcctgcttctgattttgaaaaatttagtattgcattcacaatattaatcagtgaataagcactatctttcgcaattagaagattctctctcaattcatcctttaactcactattcattaatgtaagttcaatcattcctataacaccattaagtggcgtccttatctcatgactcatatttgcaagaaaattactttttgctttatttgctgcttctgcttcttcctttgaacttataagaagatttctcatctcttcctctactctttttctctcaattctttcatgcaaatccttaagttctctttttacaaccattccaagacgtgccattttatccttcattatataatccttacatccagcacgcatggcttcaacagctgtctcctctcctatttcacctgatactataataaatggtatatctaactttgtttcatttaatatttttaacgcttcaatagaattaaaattcggcattacatgatcagataaaattatgtcccactccttacaatttaacgcctttcttaaatcttctgcattttctatttgttcatagtttacattaaaaccacttcttttaagttgtgctacctcaaaattcaaagaggcttttgaatcttctattatcaaaactctaatatcatttatcataggcttcactccacagaacaattttaaatcatttatatttttacattgtatctaaattaatatttctaattgaatcatttaccaaaaaactcttagtttcccttaatttaaattttgaaacttgatcttttaacatctcggcttgagaagctaactcttcacttgcggatgcactttcttctgccgttgctgaattattttgcaccactgctgatatctgaataactccttgattaatttgagctattccttctgcctgttcatttgaagctactgatatttgatttatgaattcagcaactttcacagtgtcttctacaattttatttagtgcttcagatgtctgttttgctatcttggttcccatttctgcctttctaatagcaccctcaatcatctctgcagtttcctttgctgcttttgcagatcttgctgctagatttctaacttcctctgcaaccactgcaaaaccttttccatgctgccctgccctagctgcttcaaccgccgcatttaaagctaaaatattagtttgaaatgcaatttcatcaataacttttatgatcttatatatacttgttgaagcattgtttatatcttctaccgccattttcattgctttcatttgttcatagccttcttcagcatttatttttgcgctaacagcaatttcattagcatttgtggagttctctgcattcatttttgtttgagcagatatttcttcaatagatgccgttagttcttcaatggagctagcctgttccatagctccttctgaaagtgctacacttgaatcagaaacttgttttgctcctgctgtaacttgttctgttgctgaatttatattgcagatagtattgtttaatttttcagtcattctcctaaaagaaagggctaataatccaatctcatctttactctccacattaatatttatattaaaatctccatcagcaattttatctgctactcttattattttatgaactggtctacttactgataaagagataaatactcctattaatactgatacaattacttctattattaaaattattgttgttaataatgttgtgttatctgctgttttgctattactatcagaagtttctttagctaagttttgttttatatctgtatatgtttttaaatttgattgaagcttttctaaaattggctttccttctgaatataaaatattaactgcttcttgatttttattttggttctttagttgagttattttacttatgagattcatataatcagacttataaatccttaaatcctcaataattttttttccttcagtagttaaagtcgtttctgacaatttatttaagctataatcaaacttatcactattatccttaatttgacccatataatcttgaatttctgatacattatctgtaagtaggatatctctagtattcgctcttatattattaaagttattagagatctcaataacatctcccaatggctgagtcattttatcatataatttagtatcaagatcgctaattttatttatattagaaatacaataaatgcccgtaatacctgcaataaaagctgcaaatagaaatcctagaagtattttcaaacctattttcatatctttgaaccatttcataataatgtcctccatctattgttcaatgttatttagagtttcagcatcctcatcacttattaatttattacaatctaaaattaatttaacttgattatctatttttcctatcccctttatgtacttattgctaactttgcttagattaggtggaggtacaatgtcttgatctggtattattagaacctcagaaacactatcaacaataagacctattgataagtcattaatatctattacgattatacaagtcctatcattatactccctaaaatccttcttaaatcttaatctcacatccatcaccggaattatttttcctcttaaattaataattcctcttatataatctggaagttctggaaccaaagttataggttgtattccaataatctctgtaacattatttattcctataccataagattcatcatcaagtataaatgtgaggtattttcccttctgagtatcttcttccatatctgcattatcattaattatgtttgtattcatgctaacacttcctctcttctactagaaatcgatactaatactttccaaactctgtgtcatctaaattaatactaattttttttcttatattagatgtttgtccaaattctctctcctctatggcattttctagccttgatgcttccttttcttctatgctatctaaaaatattttatttgatgaatttctcttttttagattgaattgagcaaccctttgtttcaaagtttctgcttgactagacatctcttcactcgaagaggcagtttcttcggatgttgcagaatttatctgagtaactcttgatatttgttcaatcgcttcatttatttgtgatactgcagttgcctgttcattgcaagatgctgctatttttcttactatctcagaagtgctgctaatatcgttaactattgaatttagtgattctgctgtattgttagctatttgagttccagaattcacttttcttattgacccttctatcagagccgttgtttctttagctgcatttgcacttctacctgcaagatttctaacctcttcagcaactactgcaaatcccttcccatgctgtcctgcccttgcggcttctaccgctgcgttaagagccaatatattagtttggaaagctatttcatctatcacttttattattttagaaatattttcagatgcttcattaatctcattcatagcctttagcatagtactcatttctgtatttccattaatagcattagttgtggcttttgtggccaactcattagcttcattcgcacttatagcatttaattttgtttgttctcctatttctgaaagcgaagcagttacttcctccacagcacttgcttgttccgcagatgcttgcgatagattttggcttgcatttgagacttgtactgatgccgaagccacctcatttgctgatatatttatatcagttagcacttgattaatttcttgtactgataaatttaaagcattcgttatatttccataatcacctttatatgagttttcaatacgaatattaaggttgccttttgacatttcttctaaaacattttttatttctcctattggcttagaaaaagcatccacggctttatttattatacttatgagttctttaaagcttcctgtatatttttcactttcacctctaatctctaaatttccttcagcagctgctgaaagaaccattatttgttcgtcaacaactttaagaatattagattttaatccatacagactttcatttgcaattccgtatcttcccggcaacttttcaagctcaactgagaaatctccttctgaataagattttaataccgcaaatatttttattaatacatcaatggatatccacattccgtcattaacgctttgggccatttgcctatataccccatcgaattttgaaacatctattctatctcttgtattacctaatttaaatgtatcattcatccaattgacttctttaacaaataaatttaacgtatcaattaatgtgttcaaattgttctttattttattaaattcaccttggtattcatttttaatcttttctggtacatccccattacttatccttttcacataatcagctgtgatattaataggttcaataaatgcttcaattacatcattaattccatcaatcattttagcccatgatccattaaacttggatgaatctatcctttttgctaaatttcctgatttaatttcattggctatattaatctgttccttagatatatttaataaattatttcttaagtcttctatatgctcatttactaatccataccttcctgggaatttttcaagctcaactgtaaaatctccttttgaatatgatttaagcactgcaaataacttaataaatacttctatcgatatccatgtagtatcattaatacattccaccatttctttataagagccttgaaattttgtagcatctattttatctcttgtattccctaatctaaagctttctttgaaccaatgaatattttccattagattattgagattatctataagttcattaatacttgtttttattacattaaatgatcctatttcctccctagtgtatttctcactaaattctcctttacttatcttttctaagtaatgtgaggttgctttaatattctttataaacatattcattgttactaaactcttcctatgtacatttccccacgcccctgagtattttgataaatctaaagctatatcaaaattaccttttttaatgcaatcttcaatcaaattagaatcatcaatcaaattatttatatttttttgtatctgtttaagtgaattagccaaatcaccgaattcatcagtaaaatctgcctgtatatcttcatcaaattctccgttagcaattttccttgcaatattattaatttttctcatatgcttgtaaataaaatttattagtaataatcccatgattgctgtgattattatagacaatagtagtatcattatcatattaattcgcatttcttttatatctgtcgcgtttcctaccccaatattaaatgcggcaaacaaagcaatttccatagctataatacctgtaaatattaacccaattttactttttattttcagattacttacctcaaacatcttaatccatcccatctaacaaaatttactcttatgatgttatcttaaatttcaagttaatttcctaatattttcaattacatgcttatcttaaagttttatttgctaatatttctttctatatttaatagttgttcagatacaatatcttccctaaaaggttttactataaaagatatagctcctgctagcatagcctccttaacttggatttcatgtgctaatgacgaaattactataatctttgcattttcatctattgatttaatgatttttattgcctctactcctccaagttctggcatggtcaaatccattgtcacaatatctggttttaataaattatatagttttaccgcctttatcccagtatcagcttcacctatgatctcaaatccgcaattttgtaaaatagattttaacgccaatctcatgaattccgcatcgtctaccactaaaactcttttcatataatttcacccccatgaaatgctataaaaataccactttcctttaattttattttaaatgtttttaaaattggtttgtagtaccacaagtcatgtagtatcatgcaaattgcacaattaatttgtataaatatgccgattgcatttttatttaaaatctacttcatataactaacatttgtaatggatttttaccattgatactatcctaaccttcgtaatcgcaatttgagaattaaattaataaagttctacacagaaaattttattagtttaattaagattagttttatacattgttcatgtattggtaaaatgttataatttatattagaatctacaaacgattagtctgtgttttcattagatttaataaatattatttgtctatttttaacgaaaatttgatatattgcttatttaggtaaagagagggttcgtacatgacaagagtaattattgctgaagatcaaaaacttttgcgggaaagttttaaaaatataattgaaaataacagtgatataaaagttgtagcttgtgctactaatggaaatgaagcttatgacttatgtaaagaatatatgcctgatgttgttttaatggatttatctatgcctatatgtaatgggacggaagctacaaaactaataaaatcagaacttccatcagttaaggtattagttttaactgcatctaatgataaatctgatgttacagatgctataagcaatggtgctgatggatatatattaaaagatataagtactgaggaacttatactatctataaaaagcacctcactaggacttggtataattactaaagatatcttaagtcccatgatactaaatctgcgtaaagaaaataaaaaagctaagaaaaaaattattgatattaatggtataaatatatcattaactgaaagagaactaaaaatagtatctatgattgttgatggaaaagataataaagaaattgcatcatctttatttattgctgaaggtactgttaaaaatattattacagaaataatttcaaagcttagtttaagagatcgtactcaacttgcagtttatgctgtaaaaaatggactagtatagatagtccatttttattttaacatatcacaaataacattaggtatgtttgaaatgggtacctgcttttcaactgcccctatttcaaaagcaactttgggcatgccgtatacaacagaggatttctgatcctgtcctatagttcttgcccctgctcttcgcattgacataagccccactgctccatcatgccccattcctgtcagaataactcctatagcatttttcgatgctaccttagccactgattcaaaaagtacatctacagatggacaatgtccattaactttattaccttgaatagtttctacaatatacttatctgcagccttcttaattttcatatgcttatcacctggagctattaaaactttacctggctcaatagtatctcctgtctgagcttctttaacagtaaattgtgtttgcaaatttaatctatctgcaaacatcttagaaaacactggtggaatatgttgcactataattattccaggaatatcttttggaagattttttaatagattataaatagcttctgttcctccagtagatgctcctatagcaatcactttatttttagcatttatgctcttttccattcccccattgctaccactctttgaaatctgccctaaattagcagatagatttacatttgctgctcctctaattttgactatcaactcattaataaaaatttcaaatccattaggagttctagcatcaggcttacttaaaaagtctactgctcctgcatccatagcatcgaagactacatcgcttatagaacttacaactattattggaattttatattgaggaagaagccttttaataaattctacaccatttaattttggcatttgtacatcacaaatcataacatcaggatttaattctaatagtttatctctagcatcatagggatctaccgcctttccaacaacatctatattaggtgccgtcgatattcctcttgatattgcttccctaaatactatactgtcatcaactattaaaactctaattgatctcattaacttcaccttcttagccctttaaattatcttaagataaccctattcctttctatatacagatggcattatatacttaaatccagctgtatcaccacttagtgattccgaatgccctataaaaagatatccaccgtactccatgctgttataaaatttacggattagctcattctttgttctattatcaaaatagatcattacgtttctacagaaaattacatgaaactttttcttaaacggaaatacttcttccattaaattaaattttctatatattatttcatttttaatattctctgaaaatacgaaattttcctcatcatatttttttaaataagtcttcttccacatctccggtaatggtgcgatttgttctttatgatatattccatttttagcaatgcttaataccttttcggatatatctgtcgctagtatttttttatcccaccataacttttcttgtttaaagaattcgcttaatatcatggcaatagtatatgcctcttcgccagaagaacacccagctgaccatattcttaaatctttattccttactgaattaaccaaataaggaagtaccttttctctcaagtagtcaaaatgtgctttctcacgcataaaatatgtatgatttgttgtaattttattgagaagcgtactaactgcctttccactcttatcagaaactacatattgataatattgagagaaatcttctatattatgctctgctaacacgttatggagccttccaattaccaacatttttttctcttctctgagattaatcccatagttctcctttatataattggataattgagcaaattctttttctgtaattgaaatcatataatcaccttatctctaatattttccaaattcattatcactaagtattatctttttagtatttgatgcttttttctctaaatatttatcattttcctcaattaagtttcttgtacttttacttatatcattatgagcactatggttaatataatcattgttaaaattagacaccgagcctctatcacttgctaatctaaacatttgaacttgttcttttaaaacttctgcctgacctgctaattcctcacttgcagctgcactttcttctgaagttgctgaattactttgtacaacttgtgatatctgtattattccttgtgatatctgtgaaattcctgtagcttgttcttcagaggcatctgatataccattaattatttttgcaacctcttctatatcactaacaatactttcgagcgcatctgcagtttgatttgctatattagttccatcttgaattttaacaattgattcttctattatttctgtagtttctttagctgcctttgcagatcttgctgctaagttcctaacttcttctgctaccacagtaaagccttttccatattgacctgctctagcagcttctacagcagcatttaaagcaagtatattagtttgaaatgcaatttcatcaatcaccttaataattcttgatatattattagaagaaacgttaatttcatccattgccttaagcattaatttcatttcattatttcttttccctgcatttgttttagtactatctgttataatattagcctttttagcattttcagcatttactgatatttgagaagatatttcttcgatagaagctgtcaattcttcaacagcacttgcttgttctgtagccccttgtgataaagctatagttgagtctgctatttgtctagatccaactgtaacttgctctgccgcaaatcctatttgaccaattacttcatttaatttatatttcattcttttcattgattctgataatattccaatttcatcttttgaatcattaataatctctacatctaaattccctttactaatttcgcttgttacagtcataagctttgatatggatctacttatagtttttgaaatcataataccaagtaatagagccataactacagcgactactattacaacaatcatagttacaacagcattattcacttctgctgaatactcactagatttactaaatccccctgattcctttaattggaagagattatctaccgaattatttatttggtcagatagtttttgtgttgaatcctgccccattaaatcaagcgcttcatcttttttacctgaaagagataaatctataattttatcttttattccatcatatttatctaacatcgcattaagattataaaattcagtttttgcttcctcaccttgaattgactcttcaaatttttttaaactctcctgaatctttgcatcgtaattttttattctattaacatagtcgctcatatctcttccatctctatacattgtaatattattcaaatttatcttaagtctttgaaatgatatagatacattagcaatgtcagcaattgatactccataatctacatataagctagtgtagttctgatctactttttttatttttgtaattcctataataccaactattccagataataaagctactactataaatccaattatcaattttgttccaacctttatattgtttaaccacctcatattctttacctccattaaccacttattttaaattaaacttaaattttaattttatactgttgtcattaatccatccatatcaattattaagcttatattcccatctcccaaaagagtacatccagccaaatccttaatatttctaatattttttatataattcggaagcgctttaaccactacttgctgttgtcctaataactcatctactaaaatgcacacccacttttcatcctgctctatcattattagaatcccatctgacaatttgtctgtatcagttcttatagaaaaatgctcgttcaatctaagtattggatagcattgacctctaaccataatcatctcattattatctggatcttttataatatcgctttctttcggtctaaaaaattcttttatagaactagttggaagagtgtatctggaattcccaactcttacattcattccatctataattgcaagagttaatggtatcttaatagtgatgcttgtaccaaattccaagacactatctatactaaccgttccccctatcttttcaatattttttactacaacatccattcctactcctctgccgctaaattctgatacagcttctttagtggagaatcccggtaaaaatatcaaattaaatatttcttttttactcatttcactttcatctttagtaagtaatccattttttcttgctttttctagtatcttttcttcattcaagcctttgccatcatcttttaccataattaagacatcgctacctgcatttttagcttctaacaccagatttcctacttgctgttttcctttgtcaattctttcttctactgtctctattccatgatcaatagaattacgaactaaatgcattaaagggtctgatatatgttcaattatatttttatctacttctgtttcttctcctatgatcgttaatttaacttccttatccatttttttactcatatctctaacaattctattcattttttgaaaagttgcagaaagtggaaccatccttattgacattactgtatcctgcatttctgctataatcttacgaagttgccttgccgatttttgaaaattatcaatttcaagcccaattaaatctggattttgtgtaaccattgattccgaaatcactaactccccaataagatccataagtctatctgccttagctacacttagacttataaatccttgatgagaagatattttttcacttttattttcctcagctatatttttcttttcttcttccttcttactacactctttttctatagctacttcttctataacttctttgttgtctaaaaattcatcatcttctcccactaatctaatatcaagtgcacttaaaaaaacagtttcattcaaaattgtttttatatcttctagatttaaatctgaagaaaagaatattttaaatccattctttctaatttcttcacaggctttttcatcatcatctattatattttctggtgagctacatattatttcagctacttctgatagtttatgaagaataccaaagcaccttatgttttccattccgcaatcttctgaaaactgaattttaactttgtatttttgattagatacgtcccttttactttttgcgctggttataaaaaatttttgttgctcaaaattattctcattaggatctgtatcactatcaattgtttctattcctttgagtttatttaaaaactcctttatactagtaattttatttgcgcaatctccatctggtgtatttccttgctgaattttagaaatttcgcctttgataaaatcaattgaatctaatacaatatcgcttaatatattgttatcaacttcattcggcttattttctctaagataataaaacaaatcttccacagaatgagagagtccagaaatgttattaaaaagcatcatagctgatgatcctttgactgtatgcataattctaaatatttcatctatcgaatttgagaacccattttctttttctccatcaataactagttgctctaattgctctataagctgggttgtttcaaatatgtacatatctaacatagattcatttataaagctttctgacattttaattccctccttttttgcatatttcttatataaaacgttaatctctctatattctatattaaattttttattacaatcttttaagtcacttaagtcattgattttgatgcaaaatgcactactatactacacataaatgcaaattgcacaaaatatcttgaattttatataaaaagagcattcaatctatatagattgaatgctctgaattggctatatgtaaaatttcttattaatctcttagctcctatttagttaatttgatttctcctctgtaggcactgggtatttacgtactacaaaaatttccactcttctatttttggctcttccatcttctgttgcattagatgctttgggcatatgctctccataagcctgtattgatatcttctcctgattaataccacctgtactaaccatataattcaacacatttatagcacgcatagcacttaaatcccaatttgaacgaaacttcccgttattaattggtacattatcagtatatcctgcaaccttaatttcattatctaatccataaagcatatgtgaaatctttagaagcaatggtgatacattatttaatacatctgcttcacctgaattaaaaagtacaacatcttgtatagaaattgctaatccctcactattaagatcaactttaactttatcagaatagccctcttctttaatttcttcttctatcatctttttaacttcagtcattttgtcttcttcagccttattatcactgataccagactcctccataggaattgcagagttaccatcttgatgcataacaccagatccaccagcaaatattatattaaattctttagccattgactgaagttttgccttatctgtttgtcccatcgcaaacataacgataaatagtgctagtagaagtgttaacatgtctgaatatggaagaagccatgcttcgtctacatgctcttcatgatgttgctttttcttactcatcacttttctccttttaactaattatcattattattttcttcaaatcttactctttgttttggttcaagcattcctactaactttctttcaatactcttcggattatttcctgcctgaatagctaaaattccctcaagcataatattcatattttttatttcttcttgagattttcttttaagtctatttgcaaatggatgccatattaaatatccagtaaagataccataaacagttgcaacaaaggctgattttatactctctccaagtttttcgatatcattaagatttccaagagcacctattaatcctataacagctcctagaactccaagtgttggcgctgtaccacctgctgttgtaaatgctgtagcaccaagacggtgtctatcttccatactctcaatttctatttctagaacttcttttataaggtctggctctaatccgtcaaccaccatttctaatccttttttcataaatttattttctaggccttgtattgtactttcaagagataataatccatcccttctagttgtctgagacatctctacaagctgtgctataatttcagcaggatcttgttgccccttagcactgaaaagaacaccgaaaatcttcggaagcttagtaaactctccttttggaaaagaatttagtagagctattatagtaccaccgatgattaccaataaggcttcaagactcataagtacttgaaggcttgctcccttttccagcatggctgcaactacgattattaaacctccaataagacctaaaattaaaaatatatccatgtttgtccccctttattgttcttcgcacgtcatattattagatgttatctttttattagtaatataacatataattacattttttgtcgtttttcttaatcatctggaatctacaacctataactataataccataatcttgaacaatcgaaaactatattttgacatattatataacataaattctatataatttgactatatgacatttttattttccattattcatttaatttgttaaacatgctaaatttaagttaaaatccatttatcagcgttatctttattgtcgaaatagaactcgctttctgttatatgagtacaaaatgcagccttgatacatggattatttaaaaatccatcctaattttattcaatataaaacaattacaaaccgtactaagcaaaaagtaggtattggagcacttaactaattcatcaaacactaattactacctcattatgaattaatgtacaattcatctatggttaataatcacttcaagtaattaaattctttatatgaactgtacatctatttcttcatatttcataactaaaattcctagaaattgtattttaaatttctctatgtatagatatagtcaaattttcactggattaatttataaaccaaaatagataagtttaaataagttattgataaaatcaacaactcatttaaacttatctatataaacttacctattttataattcttctccatttgtctctatgacattttgataccaataataactatccttcttataacgattcattgaagcgccttcttcttcttcacgatctacgtaaatgaaaccatatcttttttgatacccattcaaccagcttaataaatctgttatagaccatgtacaatatgcaagtacttcagctccctcattaatagcttcttttaattcttctatatgtgccttcaagtatgctatacgatagtcatcatgaattttattatcctcagtctttttgtcaaatgcacctaatccattttcagaaataactattggtaaatcatatctacttgtaatagttctacagcacattcttatccccatgggatctattgtccaatcccagtctgtagtttttaaatatgggtttggaggatttttaaataatccaggagttccactaatttgtgctgatcctttttttcctgttgtattcatttcagccattccaacgccatcaattgggttatattcaacaactgcagtttggtagtaattaactcccataaaatctacttgagctgctgccttcataagttctgcatccccatcttcaaatacaggtgctaccccctgaccttgtagatattttaatgcagcttttgggtatctcccatatgcataaacatccatccaccaaaatgattgtaaatcatcgtaatctgccttcgctatattatttattggattacaatctattgcatagctaggtgaaaatgcaaaacttgctccaatcttaccatctggcactatttttctaaaagcaagtactgcttttgcatgagctaaatttgcatggtgatttacttgatagaacatctttaaatcgttcttctttcctggtggatgcactgccattacccatccaagacttgtaaatatgttttgttcgttcaatgttatccagtactttactttatctttatagcgtttaaataaagtaatagcataattctcataatcatcaattatatttctactttcccaaccactatattcttcctgtaaagctataggcaaatcccaatgatatattgtaaccattggctctattccatattttagacattcatctattacattatcatagaattctaatcccttctcattaacttcaccttttccttttggataaattcttggccaagatatagagaatctatatgtttttaatcccatttccgccattaatgcaatatcttctttatatctatgataatgatcaacagctacatcaccatttgttcccttgaatgtttttcctgggattcttacaaactcatcccaattactccttccctttccatcctcttctgcagctccttctacctgatatgcagcagatgcacttccccataaaaaatcatctggaaaaccatgtttttctttaaaatacattcttttatcctcctaccaacaaactttatattacatctttattaaaattcttttaacaaaatactatccttattattaacgactacttacaactctagactaccacaaacttatcacacttgtccatataatttataacttttattttaaaatgtaatatcttttactgaacaatagcattatttaatatccactcataaaattctgtctatcctaatatatgttgtgatagtaactttacatttaagtctctagtaatctacaagctcagttattaatataatttataagcttaatcgcaatatatattaattttttaaagtaccacgtatggcttttgtaatataatccatttacttcaatctaatgcaataaaataatcctatgccaaattaataatacataatttcagcataggatctttatacttgctaagacctagaagtttccctactattttcacgtgggtttttaaagctaggaggtgttggttcaggatcgtcaaaataccttccaggcgttgataagtcaaagtataatctagaatccttggttacaccaaaatctttatttgatgctctatcttgcaccttatttaatgcttctctaaagagtgcattatgtgcttcctctctatttaatagaaaatctattgtctcttttacgtatttatcattaatttgacgatatagatattcatatacaacctttgctctttgctcagctgctatatcagataataagtctgctgcaatgtctcctgtaacattaacataatctgcagtccaagggtgtcctgatgcattaataagtcctggcgcaagacctgtcaatacgtgagtctctatttctcctccaggagttttagtataatcaacttcatgtccatttagtaaatttatagtttgtgctaccatttccatatgacttaattcttcagctgcaatatctaaaaataaatcatgaatttcaggatctttcaccctaaaactttgtgaaaggtattgaagtgctgcctttagctcaccatttgcaccacctagctgttcttgcatcaacacagcatattgcggatttggcctctctacttttacatctctaagtaatggtttctcgtgtttaaacattgtacttgcctccattcatctcagttaaaattatttacaaggttagtatttaataatccaatgcttattattcaaaactctaaatacataactgtgataaatttacatttagtattctagagcgttagcacttttaataaaattacattacagaaactaaattataaaatatgtaacacttttctatttgatttgatgcatattcttctaaatttagaacaaaatcgcaggcgactgtggagcctgagattttttcacgcatctgccttttcgaacgcatgtgagaaaaatttggcaggcgaataagatttcttttttattctttttaaaataccaaaactagtcaatcaaccttttttaagttatccacagattttattggaatataaattcctaaagaataaaaaaatacctgcatccctgcaggtataaatctatatttttttatttgtggattactaaaattaaataatataatttctaaaatttcagaaatatgtttatctctaaattgttatcaactcatattccttactgcctaaacctaattccacagcatagtcaatagcaactttccaatctgtttctggactaacatcagtaaagtgatcattatgcttacaaccactcttttcaagaaggctacctttcataactggctgcttatttactgcatctgcacaagctacatctaatgctactggatcaaaggatgcaaacatacctacatctggaacaatcggtacatcattttccgcatgacaatcacaatatggtgatacatcaattaccaagctgatatgaaaatttggtcttccattcaatactgcccatgaatattcagctatttttttatttaaaatatcatttgattcatctgatgctggcataacagcatccattggacaaattcctatgcaacgaccacacccaacacatttgttgtgatcgatgaaagcttttttatctgttaaacttattgcactatgtgcacagtttttagcacacataccacatccaacacatttatcttcataaacactaggtttcccactactatgcatttccatttttcctgcgcgcgaaccgcatcccatacctatattttttaaagcgcctccaaaacctgttaactcatgtcctttaaaatgatttaatgatatgaatatatctgcatccataatcgcatgacctattttagcttcttttacatatttcccaccagtaactggaactaaagcttcatcagtcccttttaacccatctccaattaatatatggcaacctgttgaaaacggactatatccattttcatatgctgaatttaaatgatctaaagcattctttctgccgcctacatatagagtattgcagtctgttaaaaatggatttcctcctaattccttaatagtatctaccacaactttagcaaaattagggcgcaaaaatgctacatttcctggctcgccgaagtgaatcttaattgctgcatatttcttctcaaaatcaatttgatcaattcctgcactcttaattaaacgttttaacttctgtaataaattttccttagctgttgcttgcatattagtaaaatatacttttgatttttccattctaagtccctccaaattatttataagctaatgtaccaatttaattatagattttagagttaactctaagtcaatacatatagtaaaaaaatctctaaaatgaaaattttataacactcctttgacagtagctaaaatatagatattcttatttcttggtataatgctgctcatttattgtatggtaaaaaaaggctaaacttaatgtatttatctattttacttgtaacatcaatagtcccaccatgcagttccataatctgctttgcgattgccaatcctaagccagtagcattggagtttgattcagtagctgtacctctgtaataacgatcaaataagtgtttcaaatcattttcagctattccttttccattatctagaatacaaatagtaagcccttctatttctgacttaatagaagtttttatatgtatttcatttttgttgtgaataattgaattagaataaagatttataaaaactctttttaataagtttttgtctccgttaaaaaatatattgttttctgaagaattaaactcgaaacttattttctcttgatgaggcattcttttcatttctgctataatttgctgaatgaactcaaccatatctattgtttgcaaattcgcagataatttatgaatatcctccattagaaaagctattcccaaatcattaataagattttctaaatgacttgtcttgtccttaatgataattagaaaatcttgttgttcttcttgactccaactatactcatttgccaataacatatcagtatatcctttaatatatgataaaggcgtttttaagtcatgagtgattccagatgcccagttacgacgcatttcctcgaattcttttcgtcttagctctgtttcctgtaattgatgacttagctgatttaaattatcaaaaacttcacgatagagcttgttagaaaatagtttcttattgtctgataacaataagtactctccttttgcaagtttttgtataattacaataatatcagccattggtttcgccacatagaaaccatagaacaaacagtaggcaaagtataaaataagggaagagactccaagtgcttgagaatggattacagcagatggtttccataagacaaaaataccaggaaaagctactaccagcattaaaagcacttgatgaataataaagctcatggtaaatcttaaaattattttcccattttgaaaattaaatttcacttttattctcctttagcatttaacttgtaccctaaacccctaacattttgtataagtttaggatttttagaatcactctctaatttttttctgagtctcataatgtgaactttgacagtctgatcatctcctaaactgtccataccccaaactttttcataaagttgtgtaatcgtaaatatttgattgggatgttctgcaaaaaatactaatagttcaaattcttttgcagttaactcaattgttcttttagataattgaactatagcggaattcttatcaatttctaattcccctatttttatgtattgtgaatgtcctgttttttgagtttcataaatctctttgcgtctaaaatgggctttaatacgtgctactacttcaagaggactaaacggtttagtaatataatcatcacctccagttccaaaaccagttatcatatctaattcactagttcttgctgtcagaaagatgataggagcataagtaaattttcttatttctctacataattcaaaaccctctatatcaggtaacataacatcaagaataatcaaatcatattgtttattcttaacgttattcagtgctacagcaccagttagtgcgctatctataaagataaaaccttctttttttaatactttttttaacatctcaatcaatcctgcttcatcgtcaactaataaaatagagtgattatccatatttcttccacctttaacgtttttacaatattatatcgcgtttactaaaagatacacagctgattacgtttaagataatcatataaatcaataatactacaaccgaaaacgtaattgacatttctggtcgaggcattaaatgataaatgtaaagcgagaagtcactattagcaaatggtaagtatttaagcataggaattgttgaagcagcttcaatcatagaattacctacaatcataaacactaatgaggcgcctactgctaatgcactattttttaccaaagtagaaatacaaaatgcaaatgtagcatagctcataattgaaaataaacttagtccatataatttaaataattgcataacaactgaaagaagtagaattgttccattcccatcaataaagatatcttctgtatttattgatgaaaacaaattagagaatccataaagaaatccgttggtagtaatctggctgattagcattagtaataaagctacaacactaaagaaaataatagaaaaatatttagaaaaaagtattttaattctattatgtggtctaatcaacaacagcttaattgttccatcagtaaattctctagatacaatttcagcggcaagaataataacaataatgataatcatctctatcaatcctgttagatttaagcttgctgaccaaggatttaatttttgaggttgaatgtcattatctaatctatattttgatatgtttattttattttctgcatcagcttttagttgtggtgacagattggttaattcaattcgatttttattatctgcgattacttgtgtttcatatgatttccagtcattgatttctattgtttgtgttttttgaaaaaaagcagcaccaatggaaaatatgattagaaaagataacaagatttttgttaactttctagagaaaattttagctatttcatttttgattaatcccaacatgtctattcctccgtaattcttaaaaattgttcttctaaagtttcttctaccaaaccaatgttataaaccaaaatgtcgtttttcgctaactgttgattgataaaaggaatttcttctttattagcttttaaaagaatttttccttcattatcagatgtaatgatatcaaaaccattatttattaataactctatagctcgagaagtttgtcgaggttcaatatttacatttacctgtatactctccccattatttataatggagtgaacatcttgtattgttactaattttcctttttttaatacaccaattcgatcacacattaattccatttctgaaagaagatggctcgatattaatatagcaacaccttcttcatgagaaattcttttgagatactctcttaattcatgaattccctctggatctagaccatttgttggctcatcaagaatcagtaaagaaggtttgtgaagcagcgcttgagctaatcctaaccgttgcctcataccaagagagtatgttcttacctcgttattaatactgtctgctaatcctacagtcttcactactccttctattcgattctcagttatacctgacatcatacgtgcataatgctttaaattttgataaccagaaagatatttgtataagtctggattctcaatgattcctccaatattttttactgcattagtaaaatcatttttaatactataatcattaatcattatgtcacctttgcttatccctattaatccagtaatcatgcgtatcgttgttgtctttcctgcaccatttggtcccaaaaaaccaaaaatctcaccagcatgtacagaaaaggaaacattatcaataattttttttcctttaatattctttgttacactttttaattccaaaatagctttgttattcatctaatctcacctttctttttactgatatcataataagcttctaaagtaaacagatggtaaacggtaggtgaacggaatagaaattattactgtaagtgtaataaacagtcgtgctcaatccgataaaacatgaatatacttctaaataatatttaataaactaagtatagttattacaaaaaataaataaccgtccggagatttaacggacggttacaattattttataattcccccaacttcttcccttcttttcaagcgtcaagtttaatttcgaaacctgtgtgctttggtcttctggtcgatacacttcacttctagcgatgccgtcacttgattatccttgcgattgtaaataggattcacgagttcttgaaacacatagtctttgctaattggctttactatcccgtcattcacatattaagaaaactcactagctgttgctgtaggatatagtttgaagaacgagattaaaaactcattgatttcatttgttgtaatggaaccaaccgcaccatcactttcaatagtttttggtttataatctgatttcttaagtattctagtaatggttggttcttatagctaaaacctttccggaaccacaagtctaacttgtggtattcttaaatacaaaaagaatgtagtagatttgttttacacaaatctagctacattccccgacatttgactattaattgtcgtgatttttttaatttgctcattataatattactttatatgattattttctattcttttcaatccattcaaccgcaaaatctacaatttctcgttgtctcatgaatcttacatccgcattccctatttttgtatttttaactctatactttttctcaaaatcaattcctatatccataaaatcttcaccatcaacatataaagttgaatacgtaacccatttacgctcaccgtctttcatcactgcacagctgttttcttccatatgctttgatggataatcagctctttcatctgctaaatgaatagatgtatttttatcatatccagttcccaatagtaatacatatccaactaaatcatataatttcccaattggagaactttcgccaaaaatatcgcttaaatcatggttgtttattaaatattgtgcattttttccccatgcagcaaaagaccttacagggtgatcacttcttaaaacacctggccactttctaaacatttctgctactgctcccattgtatttgttggagtaatatccttatcataagctggccaattatctcttataatatcccaccactctattggttcctcccaatgtacaccatatgttgggtccatgtttttccatgtctgtgtaggcataattatggttccatcttttccaactaactctattaacgcttcaattatgatctgtgggcctccacagacaaatccaaatcttttcattgaagtatgaactataatattttgtccactttttacaccaagttgttgtagcgcatttactatatcttttttaattacaatttttctatcacccataccctttccctctcaactttaatatttaatttttattatctcttctatatttcataggcgtgcaacctactatatttttaaatagcctattaaaagttttaatgctattaaatccacagttataggctatctctgcaatagtttcatcttcctcaattatacgccactctgcttttttaattctataattatttagataatctaaaaatgtcactcccgtgttttctttgaaaaactttgtaaagtaatatttactaaaacctatagattttgaaatatcatctaaatcaatatgctcttgataattactatctacatattgaaatacactatccattttctttaatctttccttttcaccgcttaaatcttcagatgaatatgcttgcttaggtatatatctaagtagtatacctgccagatcatataatctggcttttattattaacttatatccttcctcagccttactatattcattgataatctcatttatgtgcctctccattagtgcatgaatttcattccccatggttaaatgtattgattgattccacataggttttattatcttagtatctttcgttccagaaagaaaattatcatatatggaagttctaaattggattacagccctattactgaattttttctctttaaaaaaacaatgtatttctccaccaccaattataagtatgtcaccttgcgttaaatcataagtatctctgttaatacatgcctttaatgtaccttccacaagataaataatttctatatcttcatgccagtgatgtggtgtattggaatatccatcattaaaaaacaatctgaaaggaaattcaggttctaatactgttttttcaaaacttccatgcataaatatctcctccaaaataattacaattaagcttcttgattaatttctataactctaccactttcttcttgttagctgattcacgaatactctccataagcttaataaccctcattacctctgtattctttacaagaatttcttcttctcctcttatagctcccataacatttctataaaaatccttaatatcagaattaacaattttaagtgcttcttctttaattgtttcctctgtcctaggcgccatagtttttgttaatccggcagctgttctaataggaattgcatcatttttactactatcagtaatacgaacgactttgcctcttaaattccagtcctctatcacagctgtgccattttgacctaacacataccaacgtggtaaatttataaaattgcttgttccaacttctacaacgtaaattaatccactttcaaattctaactcagcagtaaatccatcatccacaagttcattggtaacatgagtaaatctagcatatactgattttatcctttcattaatcattatgcatgcctggtcaataatgtgaacgccccaatctaaaagcattccaccaccatgtttttcttcttgtctccaatcacctggtatgccacgggatccatgtactctagactctattctaaagacatttcctaagatagcttcatcatatatcttttttacagttaaaaaatcctcatcccaacgtctattttgatgaacaaccaaaactttatccatttcttccgctatatctaccatctctttaaattctaaagatgacattgctgctggtttttcacaaattacatttttgccagcttttaatgaactgattactatttctttatgtacatcatttggtgttgcacataaaacaatatctactttctcatcttctaaaagctctttaaaagaattatacggatttatttcatgctctctagcaaacgcttgtctatcttctttaatatcataagtaccgcaaacagtcaaattatcaattccttcaattagctcacgatgccaatttcccatgccacccaatccaactattgctaaattgaacatctcattacacattgttttatttctccctatcaaatttttataattatgcccaaaacatatcacctttagattcaaaaataattgcatcccttaaacaatttattgcttttatcagcccttcttctgttgtcatcaaactatcctcatgttctatactcaacgcatgatcatatccaaccattctcaatgcagaaacaatgtccttccaatagccaacatcatgtccatagccgacagagcgaaaaatccaggaacgttcaatttccttaccgtagtgtcctacatctagcacaccgtttattggacaattgatttcatccatctttgtatcctttgcatgaaagtggaaaatggcattatgctttccgagctccctaattgctgccactggactaactccttgccaaattaagtgacttggatcaaaattagcaccaatttctggccctacagcttcacgcaatcttaataaacttttaggattatatacacaaaaaccaggatgcatttcaagagctattttatcaacaccatgagcctttgcaaatttcactttctccttccagtaaggaattaaaactttattccattgataatctaatatttcaataaaatcctctggccatgcgcaagtaacccaatttggtttttgggaagtctcactgtcaccaggacagccagagaaacaatttaatattcttactcccattttttcgcacattaaaattgcattagtcaaatcatcattaaattttttcgctatttccttattgggatgaattggattgccatgacaactaaatccactgatttctaaaccacttctttctaaaatagatttaaattcagcaaacttttcttcatcttttaataaaacttctggatcacaatgatgtttccctggataacctccgcaaccgatttcaattgtttgtacacctttacttgctaaaaaagaacaagcatcttcaaaagatctatcttgtaaaactggattaaatacacctaatttcatataaattcatctccataaaatataatattattaattatttaaaatatacagccttaccagttttagcagactcatatattgcttctaatatttgagtaactattaaagcttgttcaggcttaaccactaattcatcaccattaatgattgcattatagaacgtactttgttctatatcaggagcattatcttcttctccatcataaaaagcaaccccagcagcatctagtgcaggcttttctatgcattgtttattatacttaacagaatttatcctcaaaccatctttcatatcagcaccagctttggtaccacataaagatgttttagcctcatcaacatcaagactatttaatgcccagcttgactctagatttattgtagctccatttttcatcttaataaatccgaaagctgaatcctctactgtaaactcatccttatcccaatctccccaagcatttcccgtacatgtttgatctcctaacttgtggtatacagatcctaatacacactctggttcataattatccatcatccaaagtgttaaatcaagagcgtgagtacctatatcgattaatgaacctccaccttgttcatcttcatttaaaaatactccccaagttggaacagccctacgtcttattgcatgtccttttgcataataaatctcacctaaatcaccattttcgcatgcagcttttaaatattttgaatctgctctgtatctattttgataacctatagttagtattttgccagtttcttgtgctacttcaagcatagctttagcttcagcgtatgttttagccattggtttttcacacataacatgcttatcagctttcattgcatcaatagatatatagctatgtgatttatttggagttaagacgtaaacggccttaatttctttttcttttgctaaaagaagtttgtagtcagtataaatcctactttcttctttgccatatttagcttttgcctctatagctttttcttctattaaatcacaaaatgcttctatttctatgttgttattcttttttattgctggtaaatgctttccgtttgcaatacctccacatcctataatagcaacctttaatttcttttcattgcatgtattttccataacaattcccgactttcatagcttagtaaaccttaaagtttgaagtcagtttttcacttcctttcatagtaaattatcataatttattactcttatgaatgatacgtatcattgtctttcataaataattttatacttaattttgtctatttactcgccattaattgcttagttattctcaaatattgttttactatattctttgaatgccataacacattaatttaccctttaagttaaaacttgaacgtttgttatcgatatcataaatattaatagattggttaattccaaaaaactctttcctctctcctcataccagccttattccttctcctaatccattatttaaaaaccataaaaaagtacataatcagattttccatctgttcatggacctttactttttaaacaaaatataatatagtctttattcaataggataaatgattcacaaaactcaaatattatatttattatcttgaatcattgattcatttatatgagcacatatataaacaaataatcctatcaaaaagtaacatctcaatattcaattttttgatattttcttcaactttccattactatacattaatagtctttaagttaataaagttttctctcaattcttgaaaattctataattttaagttcaataaaagtaaggtattgtggttaaagtcactagttaatttaaaatacaataccttatatagcataatccttatagaattcttaatatttaatgataaaccaaataataagcggttaataactcatcacattggcaaaattattaaccgcttatctaaattttcaaacctatacttttttcaataaaatcgttatttctctacaatgctctaaatatatgttgattacctgctaatctactataaattttgtacatttatttagaatttcttcaggaatatcttgtccaattccaggacgatcagatatagtaatatatccatcaattggcgtatcatcatatgctcctaagcttctagtaaagtcagacatattcccaacatgatattcatgaatgcagaaatttggaattactgcttctatttgaagcgctgctgcattagaaattggtcctccgcaaacatgcatttgaactaatacgtcatatatttgtgccatatcacatattttttttgcctctgagattccaccacaattagctacatctggctggattacatccaaagatctgttttgtaaaaatggaagatatccatatcttgagtagattctctcaccagaagccaaaggaatatttgttttttcttttagtaatgacatcagctgtggatttaatggtccgaatggttcttctaaataatagatattaaattcttcagcaagtttactaatctgcaatgcggcattaaaatctgtcttcgcatggagttctaaaataatgtccatttcatctccaacagcatttctgatttctgctaatctatctttacacaatttcaatttgtaatttgttagcaatccatcgttacgcaaattcttctttccaaattcatctcgctgtaaagggtcaactttgagtgctgtatatccatctgctttagcctttcttgctgcttctccatattctttaatcccacccaatggacgtgaatctttatcccaatcaaactgaatttgacttgcatatgctcttactttatcacgtacttttccgcctaacagttcatacacgggaactccaagtaactttcctttaatatcccatagtgctatatcaattgcactgatagcagaaaaaattactgttcctccacctaatccccagaaggtctctttctgaagcttattccatattttttctatattcattggattctctccaataattaatttaccaaaatcctgaatttgaccaattgctgccaacttggaatttccataagccacacctgcttctccaaatccacaaataccttcctcagtatttatttttacaaagactggttcattaggtgcacttttatcataatctgcacaaaatatttcaacacttgttattttcattgcttaacttctccttttaattaattatctgcaaaaattcatcatttgtagataattcatctttctctaccactttaacatcttcttttgatgtacttaatgccacaacaataacactggtatcatatccattttcttttacaaattctaaatcaacatcaactagtctatctcctggatgaataattgtaccttcctttacgtaagtagtaaagcctttcccttctaattttacagtatcaataccgatatgaatcaaaatttctcttccactattgcttataatcccaacagcgtgaccagtcggatagatagaacctatttttccttctacaggagaataaatagttccctttgttggtataatagcagccccatatcctaatgctcctgatgaaaatgcttcatcctttacttcctccaaaggaatcactttaccacaagcaacacttgtgaatgtttcattagctttgtcagcttttttatctgcaacggactctgaacccttttctacttttacaaagatataagtcaaagtaaatgacaatactaatgctattactgcagtaataactgcattgataatattacgtggatcagcacctataaatacaggcaatgtcaaaaatcccgatgacgcaactgcatatctaactactcctgtaatacctgcatataatccagcaattgcaccagaaaccattacacatgctaatgtacgtttgtatttcaatgttacaccatacaacgcaggttctgtaataccagataatgcagtaataccagctgaaattgcgacttgtcttttttctttcttatcttttaaagcaattgctaaagctgctccaccttgtgaaatattacttgcaagcattcccggccccataactgtttcatatccaaattgagatagagataatatttcaaatggaacaagtgataaatgcatacctaccataactaaaagaggagcaaaacatcccataacagttggtactaaccaaggaacattatcgttaatgcctttaataacaacatagacactacttcccatatatgctcctaatggcccaataacaatcaaagcaagtggagctgtaataataagcaacaacattggtcttaacatagttttcagcacctgtggtactattttctcaacaaacctttcaagataactcataaaccaaaccacaagaataataggtacaacactagatccatattttactgctttaacaggcaaattaaaaaattcaatattgttaccagaagccactaaatccaagaaattaggatgtagtaggactcctgcaattgccatagccataaactgatttgtttcaaatttctttgcggcactatttgctatatagaatggcaagaaataaaaggtggcatctgaaataaaagataaaattttataattttgtgtatcattacccattccagaaagtacacataaagcaagaacaactttaaccataccacctgcaataataatcggaataataggtgccatgattccgacaagcatatttaaaacagcttttggtgcattttttaaatcaaatttcccacctgtactttttctttctgcatttttatcagctccgtgtcttagtaaatcgttgtaatatttatcaacttccgcaccaattattaactgaaattcatccccagcttgaaccgtattaataacgcctggtacttttttcagtgcttctacatcaaatttagttttatcatttaatttaaaccttagtcgtgtcatacagtgatataaatctttgatgttatcagttccacctacatgcttaataattaaatttgatatatctttctgatccatattaatccactcctatacataaattctttttcttatgctctacacctcttaaatattaattccttattacatattgatgtccattcatcattaaatctataacaacagaatcttttgagtactctccttctttagctcttaaattttatttttaaactgtgtagttgcgaaatctgcatacttaaatatttctatttagtgttgttactacctttgccttataaagtgttacctcctacatacgctgtgccaacgcacctactatttcaagtttttctctttcatcttccatattaacaagacatatttcgcctattggaagtacctattgttgctattttttcagatttttcataccacctgcctccattaacaattaatatgtttcacttgtaattaatatataatgttaaacgttttaattcaataaaagcggctcactctgatactttttttctaaaacttttctattttatctatttttttgacactttttgaaacccatcagaaaaaaactcatcagatttttcttctgatgagttttattattcagtaatatctcttttatcaattatatttgcaatttccttaatatattttatgttatgattataatctcttttaaaaatacaactataaatgagatcaagcatatactgcattgcaatatgagatgaaaactgagatatcctatttttaaaattttctctgtcacttatatataaacgatgttttatatgttctggaacactcgaacttccaaccctacctatccaaattgtttcaataccttttttataaagtatctctgaaataggctgaagaaaagtagactttcctgaatatgatagtaataatgctgcgtgattcttttttgatgcagtcgcattacatctctgatcataaaaagattttgtacagttaactattcttccaatagagcgcattttatccataaagttctccgccacattactattatgcgcatgagtatagatatctataatatcagctttatgaagaatacttacacatgtgtttagcttctcaacatcaatatatttatatgtatctcttatagttgtttcatataattttataagtttctgtgcaattactccctgagtatcaccctctaaaaaaggaaaattgacatcaatatcattttctattttgctctcttctgctatgtcctgaacaacttttaccttaagctcattaaatccatctatccctatttttttgcagaacctgtgaattgcagatttagatacaaatgttttgcctgaaagctgctgaatagataatttacttatttcatttttgttttcaataatatattgtgccagaatattttctgtttgagttaacttatcacaacattttatcatattttcaattgtcatatttatcctccaaattatttaagttataaattaacagatttactagcatttattcacataccaattaaaattagcagttcagtcattatctataataaattaatttaagcttctcaagtatctgggaaactgcctttttcaatacattaggtgttcgattactattttatttctcgttatcatagaagatgtgtataactttttcatatttcattttctatcttatatctattactctttttttaattttcttatttcttcattctatattattaggtttctattatcaataaaaatattctatcaatcttttctgcgcttcttaacgcaacctaaaatgattccttaactaacacatatatacctgaaacataagttacgtttttccattgatccgttccttgcttaatatatttttttaacaagcccgcatatgtaactctactttacacattaatttaatacatatcctattcttactctttattatcccccttctattgatccgccaatttagatatgcatcaattaggataaattttatattaatagaacgtctaattctagtcgtcattagtccagaagtcgtgtcaaaagtttcaaactattatgacaaagttacttttatattatctgattctaagcaacatagtatatatcaatgtaaaattcttcttgaatgcttgctaaaaattatccatttaaagcggtgcaatgattgctgattgtaaacttatttctgagtctgtaaaatcaagattccttgatttttggattcatgtatctcctattttttattataattaatttgaaataaaaaaataccctgtaatataacacagcttctttttgtgtcattcttacaaggtatagtttaccacttgctatttttctatatatttttagtttaacactaaactagattataacttttaatgatttagtttagaatattaacctagatcttcacataaactttatatttttcaaaacctattttaaataattgatttattttgtgtattcccttaaaactccataaacatattttattatgttatcacaacttacaccttttttcttaagttcaacacactcaagagttccatatttttctttaattctgaccattatttcctttgctaacatcttcgtgttattttcttcttcacttgtatttcttccttttaatgctccaacagccattaatgttcctgtaattgccccacatgtagttcctacattcatgccagatccaaatggacttgctattgatactggaatatctgctcctgtctcctcattgatagctttcagtatagattctgcacaattataaccatccttatgaaattcaactactcttaccattttattttcctccttggctaatccacctactatgattcataagagttactcactactattaagtcatatacgtttatataactggccccatagtataaatatcaatggaattaaaatattttattgcttcgtttttagtcattcctccattaagaacttcaaccactttattaaatgcttcttctccaacttgttcaatagtcttctcgcccttaataattaatcctgcattcatgtccatatcattactcattcgttcaaaagtatttggattcccacatatcttaagaacaggcatactcgggaatccctgtggagctccccgtccagtagaaaataccataatctgcgcacctgtgcatgccataccagtaagtatttcaggttcacgacctggagtatctttaatccatagtcctttttgagttgttacaatatctgaatattccataaccccttgtataggtctagtacctgatttaactattgctcctaaagatttttcctctatagatgaaaggcctccagctatatttccgggcgtaggctgaccttttctcatgtcgcagccaagagattttgctcttgattccattttatttacaatttcatatattttatctcttacttcactagagacagccctctttgcaagaatatcctcagcgcctaaaaattcagtagtttctccaaacacaacagtacatccaagatccaccatcttatctgctaaataaccgataacacagttagatgccattccacttgtagtatcagatgcaccacatttaattgccatagtaacatttgaaatatcaacaagttcacgttgcattggtgaaacctttaatactagtttttgagcagcatcaataccggcttgtattgcacgacttgccccaccaagttcctgtattctaataatttctacaggcttaccagttttagcaatagtttgtagcattctttcatggtccgtaccttcacatcctaaacttacaatcaaaactgctgaaacattagggctacatcctaaaccaattaaagtatctgtcacacgatctagatctggtggaagctgacagcacccttggtgatgaaaaaaaccaactgtgccctgtacttgtcctacaatagcctgtgctacatcatttgcacaaattacactaggaatgacagctacattatttcttgaacccaccttgccatcaggtcttacatatcccataaacttcataatgcactttctcctttcaaatctccacgtcctcgtgtactatcaagattatggacatggacatagtcacctttcttaatcttttgggtagcaacaccaattgtttctccatacttaataattttctcatttatatcaatatcttgaactgccaccttatgaccatatggaatgtctcctaataccttaacaatatcagaatttccttttttatcacgcacttctacatcttctccagcaacaacatcatctgcaaagattgttgccacattatctaaattatgcacttttaatgctaatcttaaatccatattaatctcctttcttctgctatttttatcaacataaataattctttagtaaaaaaatagttttcttttcctatttaacaactaatactgatactccatctggaataactactaccttggcatctttacctttcaattcatatgctatagcaagagcttcatcagcgttggatgctggaatcatattggcttttctcacaatatcgtgatccaaatatgttgttactaatataaccttgtgtttttttaggatacgagaataaatttgtgcacaccactgttctggaattgtatccttaggagaaattttagaaagacgctcttcaatttcctctacagttcctgatacaattaatttttcaaaatgcgtccctcccataccttcaatacatgaagcacacattatgatgactccgttttcgcctgcacatgcctcagcagtagcaactgcttttggagactgatacagatcctgatccaaaggataacctccattactagtaataacaatatcgccagtaatgacattgcatcttgaaatatcattaacaaaactacaaccagcctcatgagcttgaaccaaatcaccagcgtatgcagcaataatattcttttcactatctaatgcgacattgagaataaactgaacatttattgcttttgctgcataaaccatatcttcatgtatgggattgtttttcaacataccagctttagcaaaaggacttgctactgccttaaacgaatgattttcctttatagtctcttgagaacatatacctggtaaaatgcttttgcgaccaccagaaaagcctgcaaaaaaatgaggttcaatgaagccttcagtaacaagcagatcacattctgctgcaagatgattaacgttaaaatctgctcctgatggtagcttacaaatgtgcacgaactcatctgcttcaaaagctttattaatttcaattttctcattgtcaactatagcatcaccaaacatagaacgttgctcttcaattgtagtttccctatgcagtccagttgcaataagaatagttatatccgcattaggatttcccgcacgtatttcagaaaaaagtattggcaaagtaatcttgctaggaactgctcgtgtatgatcacttgttactattaacactttcttctttccaactgcaatatccttaagtcttttagttccaataggatttttcaatgcatctttaactaattctgttccatctatagttttactagtattatgaagctttgtttcaattatagcctttaattttttttcttctatgtgcaaatccatactcgaagtataataaggaattttaatagttttcaaaaaatatcctctccttctcaattatactttgaaaagtttatggttttatatatgcaaaaccttgtatttgcttcttcgtaagttcaacaactccagatggaacaaattgaacaaatgaatactatttcttttctaattcttctatcttttctttgaattgtggtaaatgttttttatgtgctaataacatttcatctaataagtcttttgcaatttgtccacttggaactaatggatttattgtaaatgcatgaagtgctttattataatttcctgtaattgctgctgaaattgttgcttcttccattcccttcattatttgaaccatacctcttggttctgggccaaatttaccaaagttaattggctctggtccatgggaagttattatgcttgaaacctctactattgaatcatatggaagatcttctaatgctccattattctttgtacttactaccatagtagttttcttatcattataaattgatgcaattaattcacaggcagcatcactataatgagttccacctctctttgttaattgttctggtttataatctaactttggatctttatataattcaaataattctgcttccgtcctttttacaacttctgctctagtttcaccttttttatattcttctaattcatcttttaacatatcatctgtaatataataatatctgtgatatgggcaaggtaatattcctaaatctttaacttgttcataattaaatttaatatctttaatattggcaacgccagaatctttttcttctctcttttgtgatggatcatataatttatcaattagttcatcagttatttcatttccttgcttatcccacactctgtgccaatggaaatgatttaaacctgcaaatttaaagttcaaatcttctaccggaatatctaaagcttcactacatttatgaatacagttgataggcacattacataatccaacagttctatcccatcccccatatttaattgcagcctctgttaccattcctgacggatttgtaaagttaacaagccaagcatttggacataattccttcatatcatctattatatctagtattacaggaatggttctaaatgctttaaacataccaccagcaccattagtttcttgaccaataattccgtggcttaaaggaattctttcgtcttttattcttgcatctaaaaggcctactctaaattgggttgatacgaaatctgcatctttaagtgcttttcttctatccaaagtcaaattaacttcccaatcaagtcctgctgcttttaccatccttttagccatagctccaacaatttcaagtttttttcttccctcttcaatatcaacaagccatatttctttaataggcaactcatcttttcttttaataaatccttcaataagttctggagtgtagctgcttccaccgcctattgttactatttttaaaaattttttcatataacatacctccattaaaaatcatgtatctttctcttgtgcttaatatataattttgaacgttttaaatcaataaaagtaatataatctgatacttttttctaaaacttctctatttcaactgttttttctgacactttttgaaactttagaaaaaactcatcagagtttccttctgatgagttcttttattcactaatatctctattatcaactatattagcaatttctctaatatattttatgttatgattgtaatatcttttaaaaatacagctataaataagattgagtatatactatactacattgcaataagatgaaaattcatatattctacttttataagtttttttatttctccatcctctattattaggttcctattatcaacaaaaatattctatcaatattctctatacttctcaacacaacttcaaataatctcttcacaaacacctatatcgccacaacatgaattaagcttttccattattccgttctttacttaataattctttaacacccgcttacatataactcttctttacccattcattcaataaatctcctattcttattcttcattataaatacatttctattaatctactaattcgtatataaatcaattaggataaattttatattaatagaaaaactaatatttattattaacttttaaacaacgaattggaggattattaatgaaaacattaaaaagaataattttatttattataataatatcaactgccttaaacctaatgattaatgttaaatttaatgcatttgctagcccaatttttaatcttaatactacctctgtaattaatgctgcagtattattctctaattccgatgatttatttctattacaactaaaacaaagtttagaagatattcaaaaagaacataaggatattcaatttaccttctattatggaaaagataacatttccctacaatatgagacattagattcaattcttaaaagtaatattgatctaattatagcaagcttagctgatacaagcgaagatgtaatagaaaatgtcatattcatggtcaagcaaaaaaatgttccaataattttagccggcattagtcaagaagctgcgtcaagaatttcgaactattataacaaagttgcttttatatcatctgattataagcaacagggtatatctcaaggtaaaatgcttgttgatttatggaataataataaaaatgctctagataaaaataatgataatatattacaatatgttttgctacaaggtaaaaaagctaatcctgcagcaattaacagaacaatatatgctatttcaacaattaatgattcaggaataaaaacacagcagcttgcgctagtaaatggaaattggttaagggaattggccaaagagtcaatggattccttatttcttaaatatgatggcaaaattgaagcaatagttgcaaataacgacgctatggcaattggagcaattgaagcattgcaaaaatataactataataaaggtgataaatctaaaactatagccgttgttggagtcgatgggctactcgaagctaaagatttaattgataaaggctttatgactggcacaattgttcttgatccaaagattgaagctgagctaatttataatattgcgatgaacttaattcacaacttaaatcctatagaaaatactaattataaaattgttaatggagaaattataattccatatccagatgataaatatattaaaaaacaataataaaatctttaatttagattattttttgaattcctattcaaaaagtcggttatttaaatacttcatgacctaccacctcatatagcttgtttatgatatctttaacagacgttttgccaaaactagctataattaaagttagcattaatgaacagtttataaatataaaagatattcaagaaagacttggtcatagtacctcttcaatcactatggatgtttattctcatgttactaaaacaatgtcatcaaataccgtttctatcttagaacatcagatgatgctaaaattgccaacgctttaatctcagcgtcggcaaaatgttggcaattcgcctattccagattgacctaaaattcaagaatgacattattgcttgattagcttcaccacagtctccacatggctaatagggcttggattgatgtacaagcatacttaaactataatttttgcatttttttacatatattcgttcgtgggaataagtcgatggtacttttttgagttttaacgtatgtggaaacatatcaacttaaatataatttttatgtttcactacacagtttcattggcagtaactctaaatttctactttcctaaaaaagtatgttattccacgtgttgttggactataatagataatttatcaaatattctatcccccgtaacaataaatgatatatcatgtatatccccaatatcaagaatcataggttcctccatatgggtaaatagttctattctaaactctgattgtttttgaaatctgatgtcttttatgaaagagtcatctaactgaattccattatttactatattaggaattcgtttattgcgatatttaattgcaccatgtttcccagcaacgccaagtttttttgtagcaatttgaactctgtttaggaattcaccaacatcagtaattatcaagacaccagtatccttattattgtctataaaatcagctagttcctcctgtgataattgaaactggccaacactttgcttttcattttctttctgtaaatcaataagcttaaacatcaaacaaaacactggatgatataatgcttcctcatcataaattattcccggcgcaggacctatcgatacttcttttctttcctcaccttccacttgtatgaatagtttatgtttccttatatttataaaggatgcttcttgaatatccccaattccctgctctcctgtagttttttccagttccacatagtattttagattattcatatacagtttaccattttgaatagattctaaatactctaacttactaattttaaccaataacgcaaaatccattatttcttgcaaacgcatcacctcctatttattattattcgtgtatttgaacatcaacagcattttcttcacttctcacctcatatcgtttttctggttttccatatacgttaaccaattgatgacttgttgaaaatgaattatcttcaagataactattacttccaaaaatcttttcttcaatatgctgcgattcatattcaatccagtttgtctgttccttgcatagcttttcaacgctctttatcatagtcagattctccacattttctgtagcatcatccggcattactataaacagatagtctctagctctgcttatagaaacatttataatattgagtttattgagaaacatttcctttgaagacgatatagatggtggtgggttaaatagtgcaataataatgtcacattcgtcaccttggaatccgtgtatagtccctacttgaacatctatattctttggaatcgtgaatgatgttatcaacttatcaatcaagtcagactgagcacgataaggtgcaattaaacctatacgaaaaaactcatcctcattttcccttttaataagagatgatatatactttacaaactcgaatacaaaaagagcagaatatacctgataattactcttactttgtagacgttttggacgataaacactctcatatttgcttacaggaaattttataatatttaacggctttatatcaataaattcttcaattaataatggtcgttgcgtatttgagctacggttatgatgtaacacaccaccatatgcaaactgactgaacacttcaccaatttccggtatacttctatattgagtagtcagaagtttgacattgtaagaatgaggtatcgttgtaggattagtaaatgattttagttccaccattgtgtaaatattctcatctttccacatacctacagtagtaattggttcaatctgaaaaggatctccagcaattatgaatttcttgggtgtcttcttataaagcggaaatatgatgtttaccagtggtatcattgatgcttcatctacaattatatagtcccactttagctcactcaaatgaattcttgtgtttgcatctggcagaaaatagtcatatggaaaacgagcaattgttgtaactgttatatttcttggaaaagcacgaatatcgaaagttttatcacgaaaaacaccactctgttcaataacactatcgttcgttgctccaaaacgtacaagccaatcagaataactgtagtcagtgtccatgatttccataagacggcgcacaagaacatccgctgctttgtttgttggagttagcacaagaactttcaattcgtttgattctttcataagaggaagaagaacttcttttgctaagtgcgttgtttttccagtcccaggaggtccaaaaacaaattcgatattatcgcaaaggttacgttgcatatcgtaatcgtcatccaaatctagtttattgaatgctttacgtagttcctctaatagaaacactggattctttgcctcaattcttgcctcggtgacaagcgataaatcaactccatcaatctgtgcattcgttcttaattttgctcttaaagtgtatgattttacgttaacaacttcaattgcgacttttaccataggcctatcggcaaaatataattcaagtggaatatcagcaagatcttccatggactgagggatatatcggcttggatgttttaaaacaagggttcgtgatgtaccttcctcacgttcaacctttgagaatgctatagaaatctccctactattagcggtattttcaccactatttagtgattctagttcaagtaaagttttaaaccacccgaatgaatatttatttgcttttagagctttttgagtcagttcatcgagatatgcaatttccgctatctcgtttgcacttcgttgctttgctttctcaattttcttactgaagtcaatagatggctttgtatagtcatcctcgtcaaagtctattttattttcactataatcgttaatttcctttactttcttaacagaagtaactcgtttactaatttcctttactatacgggaaattgaagaattttctggctcagtattggattcttcatcatcttcatcgcctttaggttggtgaactatagcacttttattggcacgatattcttctgcaaaacgcttaagttcttctggtggaatatcagaaagggcttcagctaattctattttggctcgctgctcatctgataaattttcatcatcaaaaccagcattttcaatttcatcatcaatacccaaatactgaagaagctccaccacttcatctattgacttattgtattgctctgataatgtctgaagtgttacttcacttgctgatacaaattcccccttactattgataagccacggttcagtgcgaagtctaatggcttcactcgaatcaaactctttataaagaggattataataaaaatactcacatctaccgcacattatgcttcgcaagctattataagaatatccatattcaacatacttcaacagttgattccataccatgactgataaatcagtatcttgtttttgaattaaacattcaattatctctttactaccatcaatatacttttcaatccatttcctctcccgagttgaatatggccaattagtactgatttgacaagcctcttgataacttaactcatgtgataacactcttggctcatctttcacaccaagagcagttaagaactcaatcaactcctctttgttatcctcacctacgatttgcaaatattcgtcaaatgacacaaaatttgtgtctagttttgactgaaaccacttctgcaaagtttcattagggaagtaaagattactcgccttgccacgatattgtttttcattactatttgatcgatataaaacaaatgcatattctttaataagagtaataaatgacttagcctctgactgtgaacattcattgtaatactgaaaaaatttcttaaaatgaggtcttgtgttaatctcactagaatccttgtattttggtaataccttattgtaaatttcgtcctttaaagacggagcagttattccaagttgcttaatgaatgtagcagtttcttgattatttaacaaatctggatatattgtttcataaccactttcatcatcagttgatataaataatatggtctgccctttagtatcaaaagcagcaacagctttcctatcctgattaaggaatacttgctttgattttatcaaattagtacgtttgcctgtttctgcgatccatcgataaaacgaatgtagccaaacaacttgctgcgactcaataaaatcactattaataccaccaataacagaattacttccctttaacttccagccattaataatatcatcttcatcaagccacacatatgttattgaatcaatatattctgtaagtgccttattcttacgaagcgtatcctgcctaccaaatgatgtaaaaacccattttgcatttttatttccacttaatgtagctaactgtgcatttgtaaataattcagctatttgaggaacgaatgcccagtaagcgttttgtgttgatacaaatccatctgaagttggtaacaggtcttcgttactcattttttccaagatggctgtataaaatggcttgaacgatatcttccgtttgtcgttcacatcgctaaacgtgctttcgtcgtatggaataatatcaaatatatcatcactaataagtgaataattattttcttgaccaatattcctaagataaacaaaactatccgctgccaaatccgctaataattcaatcatatctttattatgttgaatacctgctctgattccctcacggctatcagtaagtaagaaaggtgcatgaacaataaaattcaaacctgttacctcttttgttgggaagaaacaaaaagcaggatattgttttgcaatcagattttctttttcatcgagaaagaaaccgactgcatatgtatgtccattactttctttgcgagaaaataaccacagattatcatcgtaaatctcatcaccattattttgtgtaaggcaaatacgctctgcaactgtatcgccgaattgctgccttctcactgtagatttaccatatagtcctaattcacctggaatttcaagtgatatctccttaagatatgataaaaacaaaagtgggtaatctaatgtacgaagcttctcagaaatatcttcatatgcctcagtttcacctctttctgtgtggtcaaaaggaaacataaatagtgtttcgtttgttttccttccagaaaaatcttcattaatcttttttggtatgataaaacgatctattctaaaaaagatgtttggatcataaatatgcggggttgaagtatattgaaatactgatttaaatccgacaccgaatttacctattgaagcttcccgcttattagagttagcaattgatgttattgcattaatatcgcctaacgcattgtttaccgaatcctctacctcatttgctggattggatacagaaaagcgccgttttccattgtgtgcaaaaattaatttatccttatacaacacaaaacgagcatatgttgcttttgcatcatctgcattttggagtaactcataaataaagtgagcttggtctgaatacttctcaacaacactgttcttcacaccacgtaaagcaggatcatcaagaacatcagcaagatgtgttctgtgcttagataattcttcaaaaaaactctcgtcttgagtattcataaatatttcctcctatattttatacctaataatttgtgataaaataattctgcattgagactcatcccttataaagaactcaaatgatttttattcttttattgaggatcatttcctaaaccgattacttatcctaatatttttaccatctgatagcacaaaagactgctcaaagataatctcaggcgcatctgcaatcgtgatcagttcatctaagttcatggtatttctctttagctttttattgaagttttgtctggtctgacctatacgtcttaatacctcgcaatactcatcttcagtttttcacacaattgtattagcatatcatattttgtaatattttacctccattgtatttatatattataacccttttgattgatgccttcaatacaagtaaccaatatctacaaaaatttaaaagtaccttgtaagcttcatcaacccacaaggtacttttaagcattctaatttttacatctctacctcaacttccacccctgacttaaattctatcgtgaacttatcctcatgcaccataatctttccaatcaatctccttatcatctgctcatcacattcttcaataagagttggttgctcctttataaaagctgtcatatccataagtctttggctcactgccttcttttctgcttcttctgctaaagcattatacttttcttcccttaggcgataaatctcatcagcaatatcgttataatcctctttagaattggcccgtattaatagttgcttttgtaattcttctagctttttttctatttcagctactgcagtggtatcttgctcattaattaccgtttctatattattgctaagaacttctaaaaaatcatccttttgccccagcaaatcattaattgcttttacaacagcatcctttaataaatcctcaagcactgtccttgagttgcaagctaagcctgtgttttccaatctacttacgcatctccaaacaatagatttcttgccacggttgttccaatgaactctgcggtatatctctccacattccccgcaaaaaacaatctgtgagaatggatggctgcaactaaaatttcttttcttgccgcttgtacctacattacctgtacttctgcgaatcagttcttcttgaacctgcataaaaatctcttttggaattatagcttcgtggctattttctacataatattgtggaacaacgccattattttgaactctcttttttgtaagaaaatcaactgtataagttttttgcaaaagtgcatctcccatatacttctcgttactgaggatctttcgaattgtacttgtatgccaccttttcttacctgcacttgtcagtattccatcattttcaagtccttttttaattttatccatactagaaccttcaagatattctcgataaatacgttttattatctctgcctcttcaggaacaatcacaaggtgcttattttcatcctttgtatagcctaaaaacctattagtatttatttgaatgatgccttgttggtatcgatattgaataccaagctttacattctgacttaaactttggctttcttgctgggcaagagatgccataatggtaagcataatttctcccttggaatccaaactattaatattttctttttcaaaataaactgcaatatttttctcttttaatttacggatatattgtaaacaatccaaagtattcctagcaaaacggctaattgacttggttataaccatatcaatatttccagccatgcattcctcaatcattctattaaactcatcacgctttttagtattagtaccgctgattccatcatctgcaaaaatacctgcaaatgtccactctgagttcttttttataaattctgtataatgctcaatctgcacttcatagctgcttgcctgctcatcactatcggtagaaactctacaataagcagcaacacgaagttttggcttttcatctactatgttatttccaacacgttttcttgcaggaataaccataacatttctactgactgtcattcatggcgccctcactttctattaaactgtaagcatactctgcttgctttaatggatttttgtatttttgctctactactccaactttaaagactataggaatattaatatcttcttccgtttcttttttatcccaaaccctaccaagagctgcagctctctttattctctctgcttcagcctttttaaaggtatcttcatcaataatagctggataataatcatcacctaagtaacgcttatttcttagcatttttcctgctgttccatgatatgtgtctatacctgcctctttagctgctgttaataaagatagacctcttaaataacctagaaatagcttttttactttatttgttttttcagcatcaattagtgcctttccattttcaatcctatagccatatggtatgtgcgacatttactcacagcccctctcttagcgtaatcccacatttcatttgaaacctaacctcttctcttgagtacacaaatacttgatttacaaagctttcaaatatctctccatcaaaggttgtaagcatttgagctttatttgtaacttttaataattctctaacttcataggtctttgatatttcactattcatagcaaaatttaggctttctatttcattacgatagctttctgcctctatttgaagttcattattttccttattaaaaagagctggttcaagatatccctttgccataagctttatcagcatttccttctgctctgcatttttctctatcaatttttcaagctctgaaattcttgaaatgctatctgctttcctcatatctcttaaaccttcaagcagtggctttaaaataaatttacgtccaaatattagtttgttcatcattgttataaaagctctttctatattatcttctcgaataaatttcattgaacattcatctgcctgagtaatatgtttttggcaacaccaagctacatattttttatttccattcgtatgaagtcttctcttaaaggtactgccacactgggaacattttaacttccctgaaaaaggatatctgttttgatacttaccacttccttttacaatacctttttctttaccacgctgattaattacttcatccgctgtttcaaaatcttctcggctaatgatagcctcatggtgattttggatataatattggtctttctcgccataattggtatgtctatgaaaattgtcatctgtgtaggtcttttgcaaaatagcatctccaacatacttttcatttgataacattcctctgatagttgccgaagcccacttattaccttttttaggtttaacaccttttgtatttaattcatctgcaatctttcctgtacctttacctgccagtgcctctttaaaaataaatcttacaacttctgcttgatctaaatttactacaatctcaccatctacatagtcataaccatatggtgggtaggaaatcttataagtgccattttgaaatcgtctttgcactgaccatttattattttcagcaattgatactgattcactttctgcgagtccacttaatatagatagcattagttcactttccattgatttggtgtttaaattttccttttcaaaataaatgtaaactccaatatcaattaacttacgcaccaattccaagcaatctgtggtgttccttgcaaatctacttatagactttgtaacaataaaatctatctttctattctcgcaatctgatatcagccttaaaagttctgagcgtttttccttttttgtaccagagataccttcatcataatatagccctgcaaactcccaattaggattagccttgatataagattcgtaatggctcttctgtgcttcaaggctcaataattgttcttcactacctgtagataccctacaataagccgctatccttaatttagctttagcaacagaatctaccttattttctgctattttagttatctttttcaccgtatcacctcctttttgcgtagtcacatattacctctaaagcctttatatatcaacgatttaatggcataatctcacctagaaacggggagaaactttgacggtttaacttggttattttattaaactcccctgcattaataagacccttttcaagcatagcttttagtaacttctctgcacggaagtaatcaaattccatttgaagttcttcatttgtaattacctttttataattatgactttccatttgttcctctatcatttgggttaccttcatatataaaacctccatctccacaaatattgcttgcacctatatgcaaaaaactggaggtaatcgaaccctaaaaagtatagatttttatttttaattacgcacataggcttccctcccatttttgaagttctatcttcctaagaacaaaaatcataaattaagatgggtaatattttattaaagaaaaaagcctgtaagaaactccaaagagaatcatacaggctgttattcatttaatattcagttcattttttgtataaaaaagctataatagctacttattgaaaatcataattgttgcatcaaatcctgctgtctttaacttttgtacttgattttcagcattttctcttactgcataagatccagccataactctataaagagtttgactagttatttcttctgtttctgctgaagattcaatataatcaattcctaattcatataatattgatttagcaattgccttaataatctcacttctcttttcatcaaacaaattgttatcttcagtattatcaataaagcctatctcaacaagaactgctggagattttgtttctcttaaaacatgataatttgcttctttaacgcctctatctaccaaacccaaaatcaccaatgaagcctgtatgctttcagctaattctctagacttttctcctggatttaaatatgtgtaagtttcaacacctttagctttttctggttcataggcatttctatgaaatgatatgaaataatcataagtattcctattttcaaaactacttctatcattaaggctcactgtagcatctgaagttcttgtttcatctacaacaactccatgccttctaacttcagctgctacttcttttcctatacttagtacatcatcagattcttttctaacattataagttgctcctggatcttctccaccatgcccataatcaaaacataatctactcattaatcttctcctccttatttaactgttctaaaatatcctttaatttttgtggtattggtaatcctatctttgcagaattttctataatgcttataccttcattagaaatgtagaaaaaaataacagcagtacgaattgcactaccgtttttgagtaaatgaacatctataatatttcctataccaacaaagataaaaaccagaacctttttaaaaattcccctaaacccaatttcacttgatagctttctttctagcaccgctaccattaagcctgttacataatcaatggcaacaaaggtaatcagtgcatacataaagccatcaactcctcctaaaaaccatcccatatatcctcctattgctgtaaaaattaattgaaaagtattaattaaatttttcactatccctttccctccatagtttcttattttatttaatgtgctggcatatccaaaggatatacataatcacaagtaaaatcatattgtattttcatagtattagttggcgttttagttactgcttctggaagcaaagtatgtgctgaagctggaataatgtattcatgttttaattctccatttgagttacttgtatatgtgaatatagttgaagtatcattatcccactttatacttttatagtttgttaaattagaatttatacttccataaacatttagattattatttagttgtaaacataaagaactatttactacaacaaataatttattgttagttattttagttataggaatgttataaacataatccaaatataaatctgatttctcactaaaagttccatccttattatattttgctatgcaacctttttgtaaacttccagatgactctctatacccaccataggatatataaacattagcttcattaacttctatatcataaaattgtagagaacgtggtatatctgctgatattactgaactcttagaatatgtgcttataacactaaaatttttatcaagctttttaaatgagccagtacttaataaactccaaaaattcactccatcatatgctattgctatcgatgcatcagctaatgttatactacttttcttcttataagttactttatcgtacacatatatagtggttgagttaatttttaaaacataaaggttggtttcatcagtacataaattgtagtcaggtaaagaagtactataatcacctttttccaatgtttgtttagaatacgtataattcaattttggacttgtaggcgtgttaactggaactccacctgcccaatagatacttttaaatgttccatttgcagcattggttgggaagtcaattacataatgtttctttcctgtagttcttgtagtttctgattgatttacactgcctcttaaattatcacttccactatagggtgttatgcaatctgcataacctacaagacttccccaagtaaagtaatcataaggatcttctggaatatctcctgttgtaagtgccatcattctaaatggtagtgatgtatatatatcatatagtaaggaattttgtgtattatctaatataggatagtaaaatccctgaagatacgctatattcccaaatattgccgatattctattttcacttttagcttcataagtttgttttcctgtaagcgagtcatacaattttattgtggcagttcctgtatacggcattattaattttttctttatgacttcaatttgcgttccttttattaaatctttgctataggctaaactttctttataatccattcttaacacctcctacgttgtattataattaactcttatttgttttaattttaaaacatctgtacttgatgtaatttccatataccatgcaaatcttatctttttatttgaaagatcaagggatgtccattgtgcttcagtaatcccctgaagtattgcaacaaacatccctttactttttacatcctgcatatttgttatatctactaatccccatgagctgctattccatgctttccatgaaactccactatctacacttactataaagtttataattccgctacctgtattatctaaagtcactactgcatttataatatcttttatatatgcttcactaaatgaaatatcctccttcattgttactattataggtttaggtttaattgtttggattacctttggtggaatcatttcagttaaaggtgaccatatttttaaggctggagatgtagatattatccctgttctttctttatggtatgtatcatcaccataagcttgaaatttatctgctgttaatggtacttctgaaaccttagcataacttgatgatgctgtatcccaatgtttaatatcatttccatctacaattagatattttatattagcttggacgtatgaaccttcctgaacagtatatgattttccttgatcttgactaggaataaatgcataagatttattatctgcaagagttaaaatagtagttcctattataggattttcaaaagagtttgttcctgtattaggtatcttttcaataacaagtaccatagcactatcattaaatattataagttcccatactaaatcaagagttccccacgtactataactttgatgcccttcccatctaatccaaaaaattggtttatcatttattgtttcattagcatagtaaatattatctgcccctgcatctcttctatttatcttaagttgttcatttgatcctgtgaatccaacccatgagttaccactaatattaattgtagttctacaattaactccgttatagaagaaatcaaaacctatgtcaggaaatttaactgtagtatcatcattatgggaactcaataaagtcattccactatttcctttagggctagttaaactgctactatacatccccatatcatttcacctccagtttttcaatacttgcaaaactactattgtctaaaagttgaaaactgtacattttacctgtatcaataacttcgtcaattgctgcaccttcataaattgttttaaaatacaatccatcattatctattatcaaggtattattatctatcaaatatttatacttatacagcgtattaacatataaaacttcaccatactttttaattgaaactgcataattggtactcatctgttttccacctgtaattgctgctatatttgctgtttgataagtatttagtatttgactaacaggagtttggaattcagtatttatataattgcacttaattttatcaaagtataatttattcatatttatatattcaagcttttggaaacattctgcatgagctggttctgcacttaaaccaccttgaagatttcttccgtcaaccatgcattgaagattatagataggtatatttaatgttccagtatccacttttaagaagactccaatataatgtggtccacttgaaacttgtggtattccaataggtatacctacaacattatctcccagctgaagtttttgctttggagtaaatgaaatatctctattatctaattgaatttgaattgttacagtacaagctgcacttgctacgcaatacatagaaaagttcattgataaatttgtatttgctactgcagtaactccaagatacataggctgaatagatgttgttccaatagttaacgcaattggatttgcataatatagcattgatgttaaagattctgttaccttattgccaagttcatctattgatgtttttatatctaccgtatctaattgacttaatatactgttctttgactgtccaagttcaactttagaatttacacaagttgggatatctttctttatcttaagtacaggaactttaacgtctatattaaaatctttatgccttactataacaaaatctccaactttaactgtttggagatgcttataattctcatattcttttgtcttactaagttcaataaagtctatatcaatacttactttacttaagcctattacatttgctgattctgtagctaatgtccttaaagtcacttcatcttctgcttctttaaattccaccttttttataataggaaatggtgggtatttatcactattccaattaggaacacttatatatttctcagcaagtttaataccattttttcctactggatatagttttgtaacaacacttgtggtatcagaattaaattttaatcctgatatatttttaccctgtgcaattaaaactcctgcatcttttcctatactttttaagatcttgatatcaaaattatctctctttaattcccctaacccccatatatttattattgaaaatatagcttcaacaggatttttttctactacactaattgaatttgcagttataatatcactgtctactgtgtatattaatatcaaatctccaactaaagatttttgcattgctgtttttacactacagttttctgctttcatttcttcaataaaataataagttaaatcataaaatatatgcttagcccaaactttaataatatttttaccatcactatttttctctactttatatattctaaaaagctgaccatctgcttttataatgttccattcttctaaatgctttgcttttttagaattagctgagtattctaattctaaagaataatcaccatttaattcttctgtaatgtaacagcttataggttcacttaagactccaagaccattattatcaaagtttcctttagtggtttttttatcataaatgcatatcattataaccaccgccagtttggtaataactcaatcttagtaacatttccactccactctataatattttcacctggcttcaatattaaaaattcacctgacattttgccatttaaattatttccgttatcatcatagcagtcctgtatcactgaatttaatattgctttttcagttatgcctttaaggcttacttcttgatcatttacttttaaaactaaatcaccagatccataaatagttattataggttcgctttcaatagttcctatactacttaatttagttcctgtttgaataatatttaccatagtattctcaactacatacttaaatggcctacaattaaatactataggaaactcactaaaatacttacaagtctgtttaaaatcaatagaatttaccacttgagcaatatacttcctatcatcttgaaaactaaatatcaagtcaccttgacctgtttcaaataaccacgcttttatatcatcaatcttatttacaagattttgattatcctttactgaacattccacgcttaaagttatatcatcataagttttctcatcaaatattaaattagaatctcttcctggaatatttattgtatttactctacgctttggagaaggaatgcttggccttttagatattaaaattccaaaatcatcatagctgtttttaccaccaaaattaaaactaagcatcctaaacccctccttttcccatagatattttttgtctataaaattctaattcataagctaactgctctatatctttttctgtattattaataaagttttctatatgaagtgtaagtccatcactactgtttgttcttccattttgattagattgattattcattggagttgttatagttgctaatttagtatttacactcatatctaaagataatccttttatagcctctgaaacaacattcttacttttatttattccttctgcaagtcctgacatgaaatcaggcatccagctttcataatcagtaagcggcccttcatctggaactgaaaagtgaagatagcttcttattttagcggcaagtccacttactgcatcttcaactttacccatagcagatttaattcctcttacaataccatctacaaaatctgaaccataagtccaagccttacttggtaaacttgctagaaatgttagtgcactatttataccactttctatagaagtttttacatttcctatggtactgcttattccttctttcatacttgtaaacatagatgatccatagttataaagcttgcctggcaattcagaaaaccaagttaaaattccattccatatattaagtactgtttctttaatgttggtacaaagatttactacactttcctttaacttagtccaagcacttatagccacttctttaattgcattccatatgtttgtgagtgctgttttaatattattccatatattttctatatctgattttaactttgtaaaattttttgtaactatatcaagaactataagtacagcacctagaacgatattctttataatatcccatgtattttcaaatattgttttatagaagtttaaagctggctctagaaagttctttatattatctagtccactacttatagtgctttttaagttttcccaagcagtcaatgttgcagtttttacactttcccatacgcttgaaattgatatttttatattttcgaaggtcaaaactacgctattccaaagatctgatgctttagcctttattgtgtcccaattattatataaaagaactcctacagcaattattgcagtaattgcggctatagctattcctactggtccagttaatagtgccattgcacctcctgctccagcaactgcagtacttatgcttccaaacaaagttactagactgctacctacagtaatcacactacctattacagaaagtactggtcctaaagctgcaagtaatgccgctattacaataataattttctgtatgcctggatctagctttccaaaagcctgcacccattcatttaatttagtgattatagtgttattactggcaatatattttgtcccattgtagcaccaagttcttttaaactctcttgaaatactctcacctgattagcagttccagcacctgtacgttcaaaatctccctgtgcattttttgttttttctaaaacaaagttatatcttagttgaactttttcagcttcagtcatatcttgagttttcttttgtatcccctttgaataagcatattgttgaaggttggtatcagtcataactacacctagcatttttagactttcagtttctccagtaaatattccatttaaagcgtcttctgcttgttttatatcaatatttttaaatgaacttaagtcacctgcgagtcctactaaagacatagacatatttgcagcttcttctttatttaatcccatacttgttgccatatcaccataaagggcagacatgtctaaagccgttccttttgcaattccataacttttaagagtagtatctgaccaatcctttaccttttgattaacacctccaaaggcaacctcaactttgttcatactttcattcatatcagatgctaactttacacttgcaactcccagtgttgctattggagctgttaaccctaccgaaagcttagatccagcattactaaatccttcaccaacgcttttcattttacttcctattccatcaagactttttcctaaagaagtccatttactgctttgagtttcaatttctttgtttgctttggaaagttctgtttccatttgtgagagagcttgttttgctttattaagttttatctcaagtgcttgggtagcttcactatctttgccttttgcttgagcacttttagtgtaagcttcttgcaatacacttactttttgcttttggagttccatttgtttagaaagactttctgattttagtttcaatccgtcaagaccttttgcattttctccaagtgctgctgtgttagctttaaactcactatctaaaactctaagatttctattaatactacttattccattttgaaaaccacttgaatctaatcctattttgactgctaaacttccaagttcttctgccactctctcaccacctgcctatgataaatttcttataatatatttaatacattatttaaattctgcttatattctttattggctctgtaaatcaaaatatcaaaataataaaatatatccatttcatcaatatcatttaaagtccatccttgctctaaaagccttgaataaatttctttaataaaatcaagcggagatagcttttcttgtgcttctccgcttaattgtttgggaactcatttaatttattgcccatagttcctactatgccatttatgctattatttaaagtttctataagtttatctgcatcaagaccatcataaaaatcatctctgctgaatttattaccataaagatctactacaaaatcaaccaaaccatctagatccttagttctcaaattattaaaatctatattttcatttatctcaatagcctttctaagcattcttgtttttaccttaggcataacatagcttttattattcagtgatatttccaaagtttattccccccatcacattagaatttgtaactaagctgccggagcatatacattcgtaaaccaagtagagccacctgtaaatccactatcttcatcagcagtgtacttccacttaccatcttctcttgtaagaaaagtacctttaagttttggtgtctgaaattttgttttatcttcttgtgttgaatgttcttcttccggttcactaaatttgcctttgagaagccaaacatatctgtatttaccattgccttttttcaccttaaagcctatggctacataaggtgccatatcatcagcttcataactcataactttacttgttgcatccaatttatgtccaagaagtgctgcttgaacttctaatggtaaatcttgagtttcaatttctacatctacttcacctaaatttgatactgtctccactgctctattatcagcatacaatgtctctgaattgctctttggatttatttttacatttattgctggtgaaactaatgctggtgtaccataagttggggtttgttcatcagttaaaattgcatataccaaattttctactcccactggagcactactaattattcctgacataaactatttcctccattccatttgtataaaaaatctcattgctttgtgatatattttagtatcttcctcaaataaatcagctgcaaaagttcttataaaccctgctgctctcatctgatcttttaccttttctataagttctatataatcatttttactccatacatctaactgaatataataacctgtagctttttcttcattatcagcatactgttcccctcgctctaaataattaaaaaatgttatataggtgctttccttaccagtatatttttgaaatgaaacaggaattttaagaggtttcaaagcttctattattaatttatttatcactttaaaccctcctttaaagtttcagctatagtttgttgtatattatccttatttttttcataagctggttgtaaaaatggtcttgccgccattttagaagttccaaattctaaaaacttaccataaaatatctttgagttatcacttttatcaacacctacaagaacgtattttactccatctttcttttttatattgcttatcttaagcccttttctaagcttgccgcttttatcattaaatgcatttgttgctcttgcatcttcaagtacaggatccgctgcattttttaaggctttattttctagtctactaatgtttgtaccaatttgctgaagtttatttaatatatcatcaactcctgtaagttctatatcagccactactctccacctccaatgcttttatttctatatacttattttcatatttaatgttatctattacatttatgttatattgcttacccttaaaaagaattctcatatctgtatcaataccatcagtataccttattgtaaatttaacagtattctctgctttaacagcagctgctgcaaaatattctctaccatgaaggttagttacggatgcccaaagtgtttttaaatctacccaactttcaacctcaaagccatttccatttactaccgttgtaaatacttgaaaagttattctatgttttaattcctctgctttcatactggaatcaccctgttcatataaagaagtgagtttcttgcttcttcaagctttgctttttcttctggtctatagtcatcataaagtagcttcatttgaagaatgattgcccacttaattgtttccggaatcttatcttcagtatctccatagcctacaaccactcttaccctaacagcgtttactgattgaagttccaccataggccaatgctttcctctattcaaaactactctgcttacaaaaccatctaaatcagtaatgtaattactctcatcaaataaatgctcttgccgatttacatcatagtattttatactttctaccttttgaactggagaacaattattaaaaacgatggcatttccttctggaaaagaatctaaaacaagatctatagtctgagttatataccttctattttgaaagttttcacaccattctcttgcctgttttattaggctctttataagaaagtcatcatcattaccgtctactctcaaatgctgttttgcttcctctaaagttattggttcaactgctggagtatttataatttttattgccatcttatcacctcaaaagaaaggagccaaaaggctccaatttaatcaacaactacagacgatggaacatctccagcatatttactatccaaaataaactctgcactggcaaaattagtaacctgagtacttgccccaattcttacatttaagcaagtgaagccatcatttacatcaagtcttgcaggatctatatgaaataccacctgtttattctttgcagtatttgctacagtgtagcttaccccatcggtttgccttatgggagaatctcctaataacacatcctcgttagcccatactggaacactatttgttaaaggctttgcaccagttcctgaaacatccttagcttggtacaaagaaacctgagttggatgacctactgcttgagttagatttacaacgactgtacctgtaattacatttttaagactaacataatcccctgttattgcagcattagtagtctttggttctactgcttgaactattttataatcttctattaatgtcattgatttttcctccttaaaattaattttgtgtattaaaaaagacctgctgtttgcaagtcttagtgtatttataaattatatttatttttcaatctaagctatacattggaattaatcatctcttggttcataataataacatcctttatattagatatattaccagaacacaaacttatattaactcagttttctatggtctttttttacatccctggcatgttatcctcatcaaaaacgcctaagtattgcacatcgtagaaaagttccccctgataatcataggcagtatatgtaacccaatgatcattttttaaagattccttctgtacttcctgaaattgagcttttgcttcctcctcagtgtaatcatcagcatcaaaccaaattccctcagctgtcttatcccatccttgatgtataaccttaaacacgtgtcttttcataactttacccaccctcatcattattcaaattagtcctacaaatcacaatttgtcgttcatttaagacatagaacaaataagaacaattataccacaaacattaccaatttcataattatttgtggtatatcttatcaattttatctatctcctaaactaacaaaaggacttaatggactagcacccttgtaaggcataattggtttactcttatatggcataccattgaacttatagatgaatctaaatacctgttcatcataaaggaatctaacatgaatggaaacatcagaagttaaagcttttttatctattccaatgtattgagttggatcagctagaattatatctccctttttaccaagtggtgaacactgctctattggaattattggtctattaagtaacgtgctgtactgagaagttgcggcaccaccagaaggcataaacacaggtgcgccaccagttccaatattaagtgccatagtgtatagctgcggctctatctcttgatttatataccatactgcattcgctctaagtcttgctggcattgaactccacattttaagtatgttttcatactttatagttcctgctgcttgaccagattcttttgctactgtaaccaaagcatctgagtttaatattccaagaggcatcccaacaccagtaccatttatgatagaatcatcaatcttaaaggacatttcatctgcataagcctgtcttacaatcgcctcaagtgcagtagtatcttgaagtaaatcatctgttacatagcaaagtgctaaaagcttttgaagagacatttcaatttccttaaactttggtttactttgagttgctgtttcagcttcagctacccaataagcttgaactccaccccatctacttccgtttgctctactattttcatcaataccaagtgctctaagtctattagtattagcacctattggaatcattcttattctatttgccacttggctttgagtcatcatggattcaaataaatcattgataaagtcattctcaagaaggaacccaccttctgaagctacactttcatttaaaccggttgctgagttctggtaagttaatctattatccattcttccaccaggacttgatgccttagcaacagcacttaagaattcccccatacctttccacttcttttcattatggtctttaggctgagcatatattggttcattaactggagtttgtgcttgcttttgtctttctgcatttaatgtatcaatttccttttgtgcttcaatttttgctttatgagcctttatctcaccaagctttgcatttatttcatcagctgtagcatcctctttatttataaggtttttagattctgtttctaaatttgataactgagataataattctttcattttctctgacatatacgttaccttcctttcaaaatgataaatgccctaaagttcacactctaaggcaagtttagattttaataattttattttttcttcatttttataagtttctttaaatctttgattatattgcttaataaaatctctagttctgttatttacactattttgaatagcaaacctgctaaacataaatgagttttccactggctcttcttctttattttcaacataaagcattccatcgacaaacccttcagctacagcttttttagcactcatccatgtttcctcatccatcatctgagatatttttgctctggattttttagttttaatctgataagcatttattatggtatctttaacttcatctagcacatcagcaccatgtcttaaatccttagcttcaccttgaaagtttccccacggattatgaatcatcagaattgaagttggagacattaggatttcatcccctgccattgctataacagaagcagctgaaattgctactccatccacctttactttaacttttcctttgtgttcttttagtgctgtgtaaattctcgaagctgcataaacatctcctccataggaattaatccatacatttatatccttgcccttgtactgactaagttctgcaataaatccttttggagtaacattctctattccaaacagcatggaccaaaaatcatcatccatggcaatatcaccatcaattcttagatctatttcctcctcatttacctcactgtttttaaagttccaaaatggcaatgtaatcacttcctttcgcaaaaaactcctagtctttcacggctaggagttaaactaaaatattttattatttttacttactataattttttaaaagaaaatatgtcattccattaatcattttttcaccattcttatattttcctatcccccaagcttcctctctatgcataaaaactttaaatgtaaaaagtccaaaaagtaagcctgatgcattcctatttccattacatattctagaaagcggttcaaatggtgtatcttcccaatcattgcctggaatccaactagatgtgtttacctcgtttccatcaattctatcatttatttcctcgcagatactttcaaactcagtatcagatagtaactttttataattcttaaattccttttcatgaggtaacttagtaattggcttcatagtttcaatgtttataatcataacatatctcctcctagaaatttaattttttttctaacagtgtctttgaacttttggctaaatcgactaacttttcaagtttcaaaattattaaatccattttttccacagaatttattgaatttacatcactaatcttctctgctattttacaaataagtacttctgtatcttgaatatcttctctattatatataacttcttccgtttcattactggtaacccgttctgaaactacttgtttttctttatccccatacttttctactattttatctgcaaattgttttctttcattttctccgaattcactttcacacgaaaatacttccctaggcaaaccgctgaatctttctaaattagtaacaacatactctgatactttaccagtacttatatagttagcccatgatgtaggttccacatttgctatttctttgataacggtattaactttttctttagagttagtttttataatttcacgaagctctctatacaaaactttagcttcttcctcttttcctctagtagccctaatagtttgatttcctccaaaattagccatttgaacatcactccttgaatatgataatgttattataatacacaatcgaatataatacaagctttttacaattataatatattattatattcaataatattcaattagttttaagttttaataatattttagtcataattatcatttctattttctactttaatacattaattacttcttctcttagagccttaagttgctcctgctgttttcctgcttcactcatatttaaaggctccaaatatatatctccattttctattgggttcatattttcaagtcttctaatatcattaacagaaagccatccccactgccttccttgtgcataagcctcgtaccttgatttgatatcgcctcgaagtattccacttatattaaattcaaagtatctgttttttcttcttgattcaggagataaaagctgcagatttaaattttcttcccatcttttaaaccaaggaagcattgtatacattatgaactcaagactttggtgctctatgttattgttagtagatcttgataaatcctgcaccaagtgaagtggtactctaaatactctgcacacatcttctattctgaatctctttgattctataaactgtgcatccgttagcttcatagttatttctttaaactgtcctccaccttcaagtatcataggaactcctgcatttgaaagacctgtgtaatttttagttatatccttcttgagcctttgaaaagcttcatctccaagttcattaggatactgaaatattccgcttgtagaggctctattatgataaaaatttctctcaaatttatcctgagataggccaatatcaatagttagtgctgcataactaagaggtgttattccaatgtagccatctaatgttaatcccggaatatggagtatctcatctcttgttttaggctcttgttttccatctataaaataaagaagcctacctgaacttttatctatatcaattcttactctttcccatgatataggtctaagttctaaaagctccccatgaagattaaaaaccttctgtgctatcatattgccgcctagatttatattactcataccaaattctttaaattggcatggagtcatttctgcattaggtgcataatgaagcacaccatattctgccacatcagttatctgctttctgtttccttcaccatctttttcataaagaagtatagggcagcttgccaaggtttctgaaagcactctattacaggcaaataccgctgaaaaactcattgttgtttcagcatcaaactttgtattatcacctacaggaacatcttctccacttaaaaaatcctgagaatatttctgcaagacttcaaataacgcattttgtggggatataaacaacttaaatctatctctaaacctcaaaccatcacctcctcctaatccagtaaacttctcattccacgtttttcataaacattttcttttatttcttttctaattgctctatctaaagccataattagtgcaaccacaccatctattttttcagtggatttttctttatcaggctttatgtttccagcggggtcagttctaacataaacattatccatcatccatgataaaactggatgtcccccatgagcaattttcccttctaaagatatcttcataagttctttggttggtggactcatatctttgtaaccttgtccaaaaggaactactgtaaaacctaagccttctaggttttgaaccatctgaacagcaccccatctgtcaaaggcaatttgttttatgttatattttttaccaagttcctcaataaacttttcaataaatccatagtgaataacattcccttctgtagtttttagaactccttgctttgcccatatatcataaggcacatggtcacgtctaactctaagctttaagttttcttctggtatccaaaagaatggaagaacataatatttatcatcatcagctattggtggaaatatcaacacaaaagctgttatatcatttgaacttgaaaggtcaagaccaccataacactctctacctctcagtttatctatgtcaacagcaaaagagcatttctcccatatatccataggcatccatcttactgattgctttacccattgatttaatctaagttgacggaagatattttcttctgctggattttcctttgcactattaaaagcatctcttaccttttcaattggtatagtatgccctaaagaaggattagctttataccaattttcttctaaactccaattatcctcatcttttattccataaataacaggataaaaggttggatcgaattttttacctctcagaatatcatcagccttttgatgtacttcatagcatatagaatttctatcagtaccagctgtggtaattaaaaagaacagtggctgcattctagcatctccactgcccttggtcataacatcataaagttctctgtttggctgcgcatgaagctcgtcaaatataactccatgtacattaagtccatgttttgaaaatgcctcagaggatagcacttgataaaaacttccaagaggcatatatactaatctcttttgagatattataggttttattcttttcttaagtgctggacactgatcaaccatgtcaacagctacatcaaaaacgattgaagcctgctgtctatctgcagcacaaccataaacctcagctccccactcattatctgcacaagtaagatataaagctatagctgctgcaatttctgatttgccattcttcttaggtatctcaacataggctgtattatactgcctaaagccattatctttaacagttccaaaaatatctgtaattattttatcttgccaaggtaataaatcaaaaggaactccatgccatactcctttggtatgcttaagattatttataaatcttatagctctttgagctttcactgcatcaaacatcacttcaccaccctaaggatatcctccattggatcttcagaacttccctctactgtagacacagatattcttgaccttgcagcaggagtaagtccaaactctgaacaaaagtccttcataattttcagataagtttgagcaatagatacctgaggaacctgctgaatatatccagatggtgttttaaaaatagtaccatgctttgatagaaattcttctgcttctttccaccttgcataggcttggcagtagcctgcaaaagctgatgcatcaacttgagttaagacacctatagcttctaaggttttactcatccttctccattcctttttagcctcaggttccagccaaactgggcattttggagcctttttctctggttttggttcatttttattaaggggtcttttccctggatttccttcaaggactttaattgctgtaggctttggttttcttcctctttgggccataggtatcacctcccatcacaaaaaatagttagagattatattcccctaactatttcttattttaatcataatatcttttgtctagaatccaccatgtttccatatttcactttctaaaactccaaactttgaagctgccattgcaactgccgttcctttagacattccttcaatgattaatttaagtatataagctattatctttaaccaatctactgggctaagtatagacatagtgcacctcctaagaaatcattctaaaattgattattgacactatatcccacatatatacacttctactaatctggcttacattacaattctttaatcttgtttaatgaattaacttatatatctttatcctatttaaccttttatacccctgtagttgtaatttccttttttaacttcttcatattcagcttcaacagcttctttataatcactgcatttcttttccttttccttacatcttaagcaaatgcaatcctcattatacattgacattattcttccatcctttaaacttcctccacatcgatcacaggctttctgagtaaaaaatttatccattattacctccatatcttagttcagataaacattcttcatatgcaatttctaatgtttttaaatcaattccattatcagaatatcctttagaaatgatattaaaataatattctgtgggaactgctaccatatgtgtatattctttagccataatataaaccatagctgttttaatttcagtatccactattacttcaacttcttcttttatatataaacttggataaccctcatatacatcaagagctctttcgcactcttctgttattttccataaaacaatagggactgatttatctttacaattttctatattggcaactcctttatgtttccctttaaaagttagtttgtaatctttaagtgttcctgcacctaccaccttagctttggggcatctataactcatctgctctaaattcatattagaaccataagcaacataaaattttacttttttatccactttttcatttctccttcttatagttttccacaaaggagtttcctcctcagtggattaattttaatttcaagcaattcttggagttctccaagctgagtttccatcaagtgatttcattaggtgctgtctgcaatttttaaactcgtctcctataagtcctaatctaagtaaccagcatctgaatgtatatttttcattatcagtatgagttctccttgcacttgcacttttttgatttaatgcttgatgacttactgccaagcagaaaactatgtaacttctaatttttcctgcgtgtaaagttccattgaaaagcctaaattcaatagtcccttttgtaaaagtgctgtgcaaatttaatccatgatatctgcttgtatgataatggcgttctctattttcaactccataatcgctataccaaatgtctgcaagttgctttagtgtttttggctttttcttatttatagtttcaatcaaattctcattaaccttttggcaatacctaactcttgcgtggtctatctcaaggcttttgtaaattaaatcttcctttgaagccataaggttaaccaaattcttcaaagtatttggagtatgttcctttgctcctatgtgaatatgaattccacattgcaatctactttcactaactgctcctgcgtgtctaagttgtctgataacttcttgcaaggtttcaatatcctcatcatactttaaaattggtgtaaccaattcaacactgtagcttctgtcgcctgagacaagttttcctttttgatttttcattgtgtgaatactcgcatcactcattatttgccaaaccctattgtctggtgttattactttgtaggtatcgtagctatcaaaagttctttcaatccttccatttaaaagctttgaagcaacctctgcagctttttctctagtaatgcctgtcatttcaatttccactcctattgtctggtttttcatttagtttatgctcctttcaaagtgtgtttattaccttttggtagtgtacatattacctctgtcagagccacttatccagttatatctgctaaaaaaacacaggattttaatgacaatattcctctaataatctcaataggaaaatccctttttatagctgcttctcttgttccttttcaatctctgagtatttaattttcattccatcccttaaaagaaatatatctttctcagttccaacttgctcaatatatcttttaacaataacatctgcatacttttcatcaagttctattgtgtagcatattctatctgtttgttcacaagctataagtgttgatccacttcctccaaaaggatctaaaactattgaattagttaaactagaattagtaattggataagctactaaagctattggcttcatggttggatgatattttgattttgttggtctatcaaagttccaagtagttctctgttttctatcagcataaaacttatgtcctgcagtaggtttccacccaacaagtacaggttcatgattatattgataatcacatctaccaagcactggtgaattctttatccaaatgcaagtttgatgacaaaaaaatcctgcctctttgaatgcagttctaaaattaacagtttccttatctgcatgaaatacataaatagaaccaccatctgcaagattttcatacatacctttataagcattaatgaggaattccttaaacttcttatcttccatattatcattttgaattgtgcctgctgttccttcataagccacattatatggaggatctgttacaactaaattagctttctttccttccataagtttttcataagtttcaagcttagtgctgtcaccacagatcaaacgatgtttacctaatatccaaacatctccattctttgtaattggaacttctggtggtgcttcatcaaagttatcttccttcacatctttatcatgaaccttagaaaataggtcatctatttcagcagcatcaaaacctgtaagtgatacatcaaacattgatttatctaagtcctctaaaagctcagcaagctttggcatatcccagtcaccacttactttatttaaggcaatatttaatgccttttcttctgattcatccatatctactacaacacaatctacttcggttgctccttgctcctttagaattttgaatcgttgatgacctccaacgatatgtcctgttttcttattccaaattactggttcaacatagccaaaggtttcaattgaccttttaagcttttcatattcagaatcacccttttttaaattcttcctgggattatatttagcaggatttagtttctccacagcaatcttttgaatatccaaattatcacactccttaaaatcatcaaaaaatacctcaaaaagcatatgttttaacatcactttttgagttgtaaatatatatgaacccctttatttttctaagtttattcatttctacagttccattgaccccccgccctagaaaatagcgatttttcacacgaaggggaccgcccgacgttgcctcgaaaggcacagaggattttatccccccctacctaaagcaaaaattatcaacagattattaacaagttatgcacagtctgttgttgataactctaataagagtaaactcttcctttctttccccaacgtccatcttccttcgctgtcttcttatcatgacaacacttacataaagcctgccaattgctctcgtcccagaacaatctttcatcaccttcatgaggcttaatatgatcaaccacttcagcagcagtaacaattccctttcttttacacgcttcacaaagtgggtgctcaagtaggaattgcttacgaagcttcctccacttgcttgtgttataaatgtagccgtaaggtctatagtttttattgtagcttctatctatttccttttgatgcttctcacagtacctaccatatgtaagctcaggacaccctggataactacaaggctttggcggttttcttggcaattgattcacctcgtttttattaaaataaaaagtcaccacagtttgtttgcgatgactttttgcattttctttttacttttctattataactttatcatattgttagggtgtctttcagtgtcttttagtgtcctctttaaatttatctcacaattttctaatgctttaccatgaagtttatgaatatagcgtaagtcatatcccatctctactgctatctgctcccacgtcttaaaacaaagatatctaagttctagtaatgtttggtattcagggttactaatcttttttataataaatacgaattctctttttaaatcaactaatgtatctatatccacatttatttcattttctaaatccaccattttagctattgtgtcctccatagaatgtacattacgagttccactaggtggtgtatcacttaatatggatgtagcctttgtagctaatgcccttaaggaaactatctgctcaagtttactgtttattctttggtcaattctgtatgcctgcgataaatattcttttgctgtcatcttacttttcctcctttagccaaggcattttgccattgtaataagtatcagcaatgcttttttgaatttccttatctaatgaagcaatacgagcatttgctttattaaggctttcttcttgatcctcttcagttttgaagaatgagcaactattattagcacactgcatactgttaaggattttacacctattgtttttatttgcaaagcaatttttattcataagttttgtcctcctttaacttagcctttactgcatctattaaatctgattgtactttttcttttcgttttaaagctctcattatatcctcatcaatagttcctttagtaataatgtggtggataacaactgtttcattttgtccttgcctccacaatcttgcattggtttgctgataaagctctaaactccaagtaagtccaaaccatataagagttgaacctcctgcttgaaggtttagtccatgtcctgctgatgcaggatgtattaaagctacttctatctcaccattattccaatccttaatatcttttgaagtttttatttcacgaaccttaaacctctttttaattctttctaaatcatgattaaaccaataagccacaagtactggctttccatttgctgattctattaaatcttccagcgcatcaagttttttatcatgtatcataaacactcgcctatcctcaccatacacagcaccatttgccatctgacaaagcttatttgataaagcagcagcatttactgcatctatctcttcatctttaattgatatcaccaaatcttgttttaagctgttataatctttttgctccttttctgaaagtgttacaacaacctcatttataacgcattctggcattttcaaataatccgtacttttcatagaaattgtaatatctgaaataaggcgataaattgcatcttcagcacctgctttaggtttataactaaataccatctgctgatttcttttatctgggtcaaagaagttatttcgataatgagtaataaatcttccaagcctttcacccatatcaaggagcctaaactctgcccataaatccattaatccgttactgcttggggttccagtaagtcccacaatgcgttttactctaggtcttacttttaataaacttttaaatcttttagcactataggacttaaacgatgatagctcatcaattacaaccatgtcatagtcaaaaggcataccactttcatttatcagccagtccacattttcacgattgataagataaatatttacattttgcataagtgctgattttctttgtgtttcactacctacagctactgaataagtaagtccattaagatgatcccatttttttatttctaaaggccaagtatctctagcaactcttaatggtgcaataactaatactttactaacttcaaagctatcaaggcaaagatcaaatattgcagtaagtgttattacacttttacctaaacccatatcaagtagtactgctgcgataggattttctaatatgaatttagttacaaatctttgataatcatgaggattgtatttcacttaaaattcctccaatctgactcacatcatctatgcagtaaacccaaaagcctagctgctccagctgtgtttttctctttatttgcagtggtctcattttcttaccttttgcctttagttcaacaaaggctaatttagcatttggtagaagcactagtcggtcaggtactccatcaaatccaggagatacaaatttaagacaaatgcctcccatctttttaactgctgttccaagtttattttctatatatttttcaagcattttctgcctccttagcgtcagtgattaattaaggtggaggttggtggatggtatttctataactatacatatatctatttttttaagcctatagagaagtttataatatgacctcctcagacctccacctttgagtaaaatagcttattctaggaattcagactttatccttagaccttttataatattagcaacttttgtctttttcctttcaaattctgctgaatcaagtgcagtatagaagtcagcggtacttctgataaactcgcctgtcctaatgcagaaagcacgatactcgttatacacttcaccagactttgctgtgaatgtttcatcaatttcacagcattctgcaagaaaatgtgaaagccagtcattattttccttatatgcctgaattgcctccttcactttctgaggcggctctattctatatgcatcattgattaccttttttgcaccctcaataatccaagtgagtatcgcaccacctgcgttctcaaaaagatagtccgcataattcttcacatcctgcttaccttcaatctttgctgcaaaaggaataacaatgagtcttcgccatgtacctttatcaatcgccccaactttaggtaggtgattggtataaagcaccaatgtatggcttggaatatagctgaatggatctttatatttcttttccgcatagatttcatcagtggaacaaagctgctttacattggatgtattaaggcgcataccttcctccaattctgctgcaattaatagccttttcccctttgcctctgcaagttctggttttacatttctacggcaacctgctgtcagcatatctgcagagatattaccgctatatgaaccaagaactctcgatactacattccaaaaggtagatttaccgttacgtccttctccgtaggcaataattaaagcctccacataaacttttccaatagcagaaagccccactattttttgcacataatcaataagatctgcatcgttacagaaaaatgtatttaatgcatcctcccatatgttagtacccacatcacttggattcactgctgtctgcttagttataaaatgaaaagcgtcatgactcattacaaaactcatacctttttgcaaatcgtatgtagcagatggtgtattaagtaggaattcatctgcatcaagcgctctctgttcaatctcaagcataggacgtgcctcttttaatgctgatgcaatatatttggaatccctacgtttaatagcataattcctatatgcagtagcagcctcatacatatcaaaagaatgtgattgctgcttattaaaagcgtttatggctttcttagatcccattgctgccaatatttccgcagcaccgtttttaaacatttcagccatcgcttttttcatttctgcttcagcctcttccagctgtctagtggtaagctcctgtgcaacagcctgtgactttggtttagactcctcccaaaagctaccgttgtatacaatataatctgtggacggagaatatctaagagttcctatatattctcttgcaagcacaactgcctgtccaacatctgagaaatcctcaggcctcaacaaggcacctgagttgtatgcttctggtgggatatacccttcctgtgatgccacacgttttccaaaacccacagcactgctccatataagttttaattcgctttcttcaagtggcggattacatttttctgcctgttttagaaacaaagcatatgcctcatcggtattaccaaaacgctttataatcttgcctgcataattagacatggtgctgttacgttttccttctggtacttgctcctgttcgttatcccagtttgcaaaggcatcctctcctaaaaattcagtaatacttttattaccgtcatagatttctacctcagcattgtcagtaccaaaaagtagtcttgcactatcaagagcatttgtatcaaagtagggaaacaccaaagcaatctgttgctttaagatggcatattcagcttggtctgttattgttggaatcatgaagtaaatatgaaatcttggacgagcagatttattgcctttctgcttcatatgatttctactgtaaaccaccacaaatggaacatcctcaaacgtggtggctacatcaactgaagtaacccaatccttcggattatctgagtggccattatcacaatcaagtgcgatattatccgcttgaataaaattagcattacttcggtagttatctttgtattctgctgtaacatgatcaaacctaattgccttaagcattgatgccttatctatgattacagcttttttggaataaatgcagtttgatagatttccagtacaatctgctgtatataaagtgaattcaatcattccaaaacctcctgtaacctctcattgaaatatcggattaactgttttcgtttctttgcctttgcaatttcttgtgccataccatttgatatgatattaccaaatacccagagttcattgcacttgcctagtaaaaccatattcataaacatagctagttccagctcctgtggaatgttatcattcataaactgaggaaaaagtaagtgaggagcaagtgggatacaattcatctccaatgcaaacctacagaaagcacgtgccttttttacattagtatcaatatctcctgaatatggtgaacaaatatatacaagaggtttaaagacagagtttttttctgcctttaaacctttaataatattagtaattgctgcataaggggttgggtcataatagccttcagaattaaatttattaactcccatactatttaccctccattaagtatttgttaataaaatgctgctgaccttttcctgtaacctttgttgtttttgaaattgttacatgaccatcagaatgtgtgattgctgtttctttaactttaaataatcctaattccatagccatctgcgttggagcattatagtctgttcctctacgtttaataagaaatccttcttgacgtaagcgttcgaacaaacggttttgtccaatatcaaggccattacctttaagaattttagcaagttctcctataagtattgttccatctgataccgatactgcatcagcaaaaacaaccttaggcttatcctcagttacttgaacttttagttgctctttttcttctctttcagctttaagtgcagtcaatatctttatccatgaatctggatcattcataatttcttccatcttctgcattgtgatataagcaccatgcttacgaatagaaggtaaaacttcatcaaaaacccattgctcaaaacgctctgcagcagctaatttgctgtgagttataagacgataaacatcaccctctggaataaatatcatttcaattgtcttatcttttgactgtggatgaggtacggtacatttcataccatacctacaatgacgttctactgccttatgaggttggtcataaccaagagaatcagctatgtctttaccacagaataatcccttgccatttttttcaatgaatctaattaccccaaactctggatttttaaaaatttgtatttcgctcatacgaatacctccgttaaatttattgaggaaatatccctctatccataagcgaaaaactgaatataatcgaacccctaaatattaaaaactttttattctttttgttccttattcttttttataaaattcacattcatatccatcagcattaagtatcaacccttttgcccatgatggagttttactcatcatcctgcaaacttcttctactgaagattctcctactggtacttcaagaaccacttcatcatgaacatgcattgtaatttcatatccttggtcagctaacctaagcattgcctcagctaaaatatcacggctaattgcttgtacaatattttccacaaacttcggaccatagctttctatgcgttcccacttttttgttccacccacaccttcataggtaacagactcaccaccgaacctgttctctccaataagaggttttacataggccagctttctgccacttggcagtttaataaaaagaatgccactttgatatataaaattagtaccatggcttgttgtagtaattctttctttaatactggttttaactgctttatcaacatcccaccatagatgtacaatgttggggttagactgcctccatgcatttactagaggttgtaactcttcctcagtaagtcccatctgaattgcacccatagctttaagtgctcctacagacccaccatagcctaaggccaattctgctattttacctttctgccttaaatgtccgttaataccatttttctcaacaggaacattaaacatctgagatgctgaggcacagtagatatctccaccacctgcaaatacatccattcgccaactctctcctgcaagccaagctataactctagcctctattgcagaaaagtcagctacaataaacctacatccactctttggtacaaaggctgttctaattaattctgatagcacatttggaatactgtcatagagtaaatccaaagccataaagtttccgcactttaccaaaccacgagcctcttttaaatctggcagatggttttgaggcaagttctgcacctggattagcctacctgaatagcgccctgttctattagcaccataaaactgaattaaacctctggctctcttatcagtacaaactacattttccattgctgtatatttctttacactactttttgcaagttgctgccttatagaaagagcttcatatatttcaccatctgcatcttcaagcaattctgaaactaccgccttggaaagagagtctgtttccattccttgctcaagaagccaattctttaattgtgcaggagaattagggttttcaagacctgttaattcctttgctttttctatattttctattttaaattcatcattacaagaaattgcttgttctacaaaattcatatcaagagcaatcccccgatcattgattagctggtctaaatgatagttcttccattcactttttaataccggaaatttagatagcttattttgtattgcaagttctgtttctacatcacgcttgttataggtaataaacatttcccatttattgacgtcatgctttggtatattgcggacacgtcctccattagattttgttggtaaacaaggaatgcaaaaatatctgatcaagtttttaccttctgataatttttgtttttcaacacctaatactgctccaacaccttcaagagataatggaagtcccaaggttgctgcccaaaccatagtgcaatgccatgactttggagaaagataagtacctgttggtattcctagccattttgataaacatattctttcaaactgtgcattgaaggcccatttttcaacttcatcatcagtaagagcatttataatttcagctggaacttgttcacctcttgcaatatcaactacctgcacatctcctccatctaccgaatatccaaatagaagaatttcaaaatcatcactttctgcataacgataaatcccagacttctgaagatttacactactatatgtctccaaatccaaagatataaatttcataaataccatcctttcaaatgtaataaggtggcagaagaatatcttccaccacctagttcttatagttgtttatctcttatgataaaaaatcatcatcttccacagttgtgaaatcatcagctgcatttgttctaccacctaaagactcaccatcttttattttttgaatgttgccaagtccacaagcaacccccttattgccattactgttaaaagcatagaaatttaaagacactcttgcatagcaaccactataaacttcattacggtcaaggataggtcttactgccttatctacaatctgaggtgctgttatactattagcatttataaaataatgccctttatatgcctcatcatcacgctctacatctccatctcttagaggtgtttttatagccgctttattgggtttcttcccaccgaattttgcaattccttcttcaattgctgcatctactgctgcattaatagcattgatagtttctgtatccgtcttaggaataagcactgatacactatatttttcagcaccaccattaattgatactggctcccaaccatggaaatagcttaaacgagagtttacccctgtgataaccttagttttgttttgatttgccataattttattcctcctcaatttcattaaattcactttttgcatttgatatattcacagcagctcttttatccgaaattggaaccagtgtcggctttcccagtggtttatatatgagatttcctagaatctcttcaaattgtttcttgcccatcagtttctgcatttcagtaatggtaataagacttttatgataaatgtctttataaccatttgccttagctacatctgccacggcatcttcatccttatatttacgattagatcgaccttctactactttaaaaccactccactctttaccatgattaattgcagaatcagtagcataagccatgatttcatttgcccacttagtgatatctggtatcttattaagaatttcttctatctccatatccgttaaaagaggtggtagtttaaattcagaccttgcaagttctaattttgcctctgctcttgcccggcatttaactgatgctttgcagaaagtacaccattcaccagaaagatactctccctcaccgttaattgccatttgagcccttggctttaattcattttctgcccaatctttcagttcttgtattggaattgtccatgtactgatattctccctacgaggttggaatattgtcattgatacctccttgatgtcatagaggctatcataaatttctaatgcaccaagcgcatatagtttcatttgtggattatctactgcatctactaaaactcccataccatatttaaaatctatgatgtgtagattttctgaaactataatgcaatctcctgtcccaaagccttgtggtacatagcaagaaaaatctagtttctgttcaataagtatcaatggatctttacaactttgcttcactatttctaattgctccattacaaaatccacataggcatctgtatgatcttccatttcatcagagtcataacttgatgtaggtcttttactcctcagcctaagtgctttacgaagtttatgctcacaaagagcatgggcagcactaccttcagcagcagctgttgtttctttattttcaaattcaagttccaatcttgcagatgggatacaattgagccacctatgagaacccgatgctgaaagtactgcgtgattacccattagcaagtacctccgcatcctttaaaatatctgcataatgcttagtgtcaatctcacttaattttgtagcaccatatttttggatgatttcacgtacccctgcagtcattccagcttgactcttttctgcaagcactgctcttacatcctctagcttaacttcttttacttttggctttactgttttctttacctcagcctctttagtaggttcagattgcttttcaatatctttagactcaccttctactattgcatcacaggcagcttgtatgctatctgccaaagaacgcatatctgaaactacgtcaagtaacaacttaattttactcacgcctttcaactcctttaagttcacggatttccacagtttcaactgagtcacccggtgtaagaacaagtacattcactttttcaccgaaaagaaaatttaataatcttttgcgaatttgcattgtaccactctcaataacaggattatggttaccgctttgatgtgcaatgttgatacataccttatgttttaaactcatagctttcgctcctttctgaaggattttatttacccctctgtccatatgcaaaaaatccaaggtaatcgaaccccttttttgtgaaaattttatttagggggattttaacccccatttttagatttttttacaaaggttatcacgaatcttttttaaacggtttctaatagctgtttcactaacaccttcttcagctgcaatgctcacattagtgcgtttttcaaagaagactttctttataagttccttctgctgaggttgcattgtttcaattgctgttcttaacttgtctatcttttctttatgctctgtttcttcaataaattgaataatattttccaatggatcagaatcattatcaactaaatatggattacggtctgctgcatcatcttcattttcatcacaataagcatccatatgtactggcacatggtacttctcacgtctaccagcattgtactcttcatcgtcaaagctatgtagagtagcaataatagcatctgtaactccattctcatttggtacgatttttattgcctctccaccagctgagtaataaatgtaattagttctgttctttttacttgttttgtaatttcttaacataagtgcatcccttccgccagattgcattggcggcaaaggatacaaaaatagggcttgtgcctaaaagaagtacacaaaccctaaaaatgagcgcaataagggaaggttacttctattgcatcgcaactgtttttattaacagtacgaacaatatgtatcctttgccttattgcaactcaggcatagattttctatttcagcagctattcaactactgtatctgttgaaaattatattaaaataatcctctaatgtcgtatcttggaaagttaagagaaacaacttttcatataaaaaaaatgacctcataaacctcctctacaatagataatggcttaataaggttcctttagttctattattaagttctttatctcacaaatctttaacttcagaagttaaggacttttcaaaattcttctcatgtctaatgtaattacaattttcctataaaatatagtgattatttaaattgtaatatcaattactttttgctataattatgtgaattaatacgcgaaggaggttactgaatgagcgtgaacaaaaagataaagacacctatggaacattacaatatgtctgatttactcaaaggtcaggcttcaaaaataattacatctattgctgaaaaagatacaactggctatattctgaaaaatggaaagcctctagcagttctcatatctaaggaaagatatgatcgtttactaaaggccggaattgatataactgaattttaaactggaggaaaatgaaaatgacagatacaaaaataactaaagttatgatggatgacacaagcatcaacgtaagtaaagaagtagatatggtattctctattgctaatactttacgtggtccatataaagcagacaaatacaaagatataattatcccaatgataattataagacgattagaatgtgcattagaggttaaggataatgacggtaaaactaagaaagaaaaggttactaatgcctttaaaaaaaatcccaaaacacctgcacaaattctcataaaattgtctggttaccctttttataatacgagcgactttaatcttgcaaacctgttagatgaggcacctgctattgtagaaaacttctgtttctatattgaatcattctcaccaaatgtgcaggatattctaattaatagacttaagttcaaagaaaaaattgctgatttagataaaaataatcgtcttctcggtgttgtaaagaaattctctgaactagatttgaatccacatactatcgatggtcacaaaatgggttatatgtttgaagaaattattcgtaaattctctgaaaatgcagaagctggtgaccactacactcctcgtgaagtcattagattactttcaagtattctacttgctgaaggttgtgatgatgtatttagtgaaggtaaagaaatcacagtactggatatggcctgtggtacaggtggtatgctttccactacacacgattttataaaaagaatgaatcctgatgcctctgttcgtctgtttggtcaggaaaataaccctgagtcttttgctatctgccttgctgatatgcttataaaagggcaagctgcagaaaatattagatttgctgatactatgaaagaagattgttttgaggatacttcaatgcgttttgtaattgctaatcctccatttggtttatcttggggtggtaaggatgcaggcgatggagtagaaaaagccgtacgtgcagaatataaaaaaggaaagaatggccgttttggtgcaggtcttcccggaacaagtgatatgcagttacttttcatgcaacacgcaatagcaaaaatggataaggataatggacgtgcagctattattacaaacggctctcctcttttctctggaaatacaacaagtggagaaagccagataagacgattcatgcttgagaatgacttgattgaagctataatagctctcccatctcagttattctacaataccgatattagcatttatgcgtttattctttcaaagaataaacgtaaagaacgtataaatagaattcaacttattaatgctgtagatttgtggaaaccccttaagcgttcccttggaaaaaaacgtagagagatttcacttgaacaaatcaaagaaataacacgcctatattctgaattccaaccggggcctctttgcaaaatttttgacaaagaagaatttatgtataaagagtattccgtatggcaaccgttacagcgcaggggtgttattaatgcagaaagtatagaatctttaagaaccagtgcttatttcacaagcaactcaaatatttacaacgaggctgattttgccgaacttgaagaaacaatccctcgagatgaagcagctgaaaagaaatatcagaaatataaacgtggcattgtatttactactgcagttattgaagctcttaaagaacataaatctgaaacagtttatactgattatgcaaagtttgagaatgctattaagttaattattaaagatattgatgggtattcggcatcgcgcttaactggaattgcaatggaaatgtctgtaatggataaaacggctgttatccagaaagaccgtaagggaaatatcattccggatccaactactaaggatactgagataataaagctcaatcaaaatgtacaaaaatatttagaggcagaggtgttgcctcatgttccagacgctatatgggcatatgaatttgacgaaaataaagcacctagctctactaacaaagaaaaacttggtgctgaattcccatttgctcgttttttctacgaatacaaagcacctgaaaaagctgatgatttattaactgaatttacagagattgaattgagtttgaaagagaaaatcgcacttttaaccggaggtgataattaatgtccaaaataaaagaaagtggtattagttggattggcaccattcccactgattgggaaatcaataaaatcaaatatatttctacattaaaaggtcgtattgggtggcaaggtttaacttctgaagaatattgcgacgaaggagcttttctaattactggtacagactttgacaatggtcgtattaattgggatagttgtgttcatgttcctatgaagcgttgggaagaagctcgtgatatccaaattaaagatggagacttgcttattactaaggacggaacaattggtaaagtagccatcgttgatggcctaaccgccccaacttcccttaacagtggtgtacttcgaatttctacaatcaacggatatgatcgccgtttcctttactgggtactccaatcagacgtattttggacttggtatgctataaaaaatgctggtaacagcacaattcagcacttatatcaaggcgattttgctgaatttaaatatgcaataccacaaataaatgaacaaaagcttatagcaagttttcttgatacacaatgctcacaaattgacagtattatcatagatttaaaaaaacaattagaacttcttgaaaatcacaaaagaagcctaattacagaaactgtgtcacatggaataaacaattctgaacgaagaaaatatagtggtattgaatatattggtgacattccctcatcatgggaaataaaaaaaattaaatatgtgattgcaggtattaaagatggaacccatggaacatttgatagagtttcatccggtaaaccactacttagtgcaaaaaatgtttttgatgatgggttgcacattagtgattcagagagtgaaatatcagaaaaagactttagaagcattgtttccaatggctaccctcagcaaaatgatgttttactttgttgtgttggaaccataggtagatgttgcgtttatgagtacaatgaacctgctgcttttcaacgtagtgtaacatttttacgtcctctttcaactactaatcctaagtatttggcatactgtttaaaatcagaatcaactttagttcaagaacaacttttaattaataaatctgcacaagacggtctatatatgggggcagtaaaagaactcgttataccttttactgaaaatattgatgaacaggtcaaaattgtagagtttctcgataaacaatgtgaacgaattgattctgttatatctgaaaaacaaaaacagatagaaataatgcaacaacataaaaaggcgctaatttatgaatttgtcacaggaaagaaacgtataaaggagggtaaatcatgccaatcagagcagatcaattaaaagaaactaaagattatcaaaaattaattcttagccatttacatgatgtaaatggcttccgtattcgcgaatcgtctgcttataaagcaggattagcaatggatacagaattactctttcaattttttgaagatactcaatcagatgttatggatagccttagaaagctatacaaagatagaactgaggaaaccatactaaatacaattaacgctgaaataaatcgacataacggaaatcttatctctcgaggtcttattgacgtaataaaaaatggtgtagagtttgacaacggaaaaacacttaaactaatgttccgcaaaccagatagtactagaaatacaaaagcagttaaaaattacaataaaaacattttctctgtaatggaagaggtctatcataagggtggtgaacgtattgatcttgttatattcctcaatggtattgccatttttgctatagagttaaaatgtaacacatcaggacagacctataaagatgctataatccaatataaggatgaacgtgactgcaattctcgtctactcaaagaaaaggttggtgtctttgctgcatttgcaatggatttaaatgaagtctatttctgtacaaaattgcaaggaaaagactctttcttcaacccatttaatatcggtgataattttggaaagggaaaccctcacaatgataatggaatcaatgtttcctatatgtgggaagatatttggaccaaagatagaattctttatttaattgaacgttttatttatataaaaactaaagaaacccgaaatgcagacactggaaaaaccaagaaaacaaaagatctcatattccctcgcttccatcagcttcgtgccgtagagaaagtaatgggtgatgttataatcaatcatactgactgtaactatctaattgaacattcagctggcagtggaaagacagaaaccatatcctggcttgcacatattctttccaccttgcatgactctacaaatgataatatttttgatactgtattagttattactgatcgtatagttgttgacagacagctccaagagtccattctagggatggaccacaagagcggacaagttaaagttatggatgaaaaatgcgactccgaagatttagctatagccctctctggaaacaccaaaatcatagtaaccactatacacaagttcttctatatacttaataacgatttgttaggtaatcttaaacagaagaaatttgctattttaattgatgaggctcattcttctacagaaggagtattcatgcagtccgttacccaggttctatcgaatgaagatgatgatgaagaaaaaacagaagaagataaaatggttgaagaaatacaaaaaagtggcaagcagagcaacgtttccatgatagcatttactgcaactccaaaaccagatacaattcaactttttggcacattaaatgctgctggtaagaaagaatcttttgatgtgtattccatgaaacaagctattgaagaaggatatattctaaatgttttaaataactatgtaacttggaaaacttattgccatattaacaaagcaattaaagatgacccagaactaaacactatcactgccaaacgtaaaatggcacgttttattgacttacacgaaaccaacatagctcagaaagttgaaattattgtagagcattttagaaataatgtaatgcacctattagatggtaatgctaaagcaatggttgttacttcttctattcccgctgctattgaatataaattaaaatttgaagaatatatgaaacaaaagggctatacaagtttaaaggcattagttgcattttcaggcaaatgtacccttaaagacggctacggtaatccaaccgaatatacagaacatggcatgaacggaataaaagaggatgaactccgttacgaatttgatcgcaaatgttatcaagttttattggttgcagataagtatcagactggtttcgaccagccaaaattagtagcaatgtatgttgataagaaattacgaaagactgcagctgttcagaccttatcacgtttgaatagaatttgtcctccatatgaaaagactactttcgttctagatttcaaaaatgaatatgatgatataaagaaggcttttaaaccttactataaggacactattctttttcaaacaatttctccagcagatattcgtgaccttgaccgtgaaattgaaaactataatgtactcgatgcagatgaaattgacgaatttaattcattcctatatcaagctaaacgtacaaataaggacaagcagcgtatgtgggcattactggatgtatcattaaaaagaatttacaaaatgactgaaaatgagcagattaagttaaaaaaggacatccgtcactttctgaaaggatattgtttcttaatacaagctactgcatatgagaaccttgagtttcacaaacgttataactatctttcctacctcattaaagaaattgatataggaactggtggcaataattttgatattgctgataagataacaatcagcaactttcgtcaaaaacaaacatcttctaataaaggtgacgaaattgaggccaagccggaagtagcgattaaaaagcctaagcctgccacagttgaggaacaacagaaaaaattactttcagagattattgatgaggttaatgccttgtatgataaaagctacgaaccggattctacctctaaaacagcatcgcaaatacgagatttactcttaaagaacgcagaacttcatgagcgcttagagaagagtgcaaaaattaattcatttgatgatttcaaatttacgtatgatgattgcgttcaagatgcattggttatcggatatgaccaaaatgttgacttctatacattgcttttaaacaatgaagaaattagaggtaagatttccaatgtttttatgaaagaaatatacaaaatcctacgcggcgaaaccgctactataaatgatttgtcaacaactaaatatacatcatcttcacaaacatataaaattgctgaggattcaatcacttacgtaaaaaattcaaatgaggaatagacataaggaggtactatggctaaacggaaaaacccatttatggcttacattgatgactttgatatggaagctgcaaaatttctaacaaaatatggactatctgaggctatttatacccctatgcccatacctatttgggatattgctaccaagaaaatggccttggatattgttcaatcagaaaacctctcatcagatggaagcgttcatggtgccattgcctttacaaaaggtattatagaaatctatgattggcttgaaaatgaatatatcggatacgaagtaaagaaaggaactgtgtttttagattcagatttaactaatgaaggaagagcaaataacacattggcacatgagtgctttcactggtataagcatagacaatactttgtataccgttgtagtcatgaagagggtgtagaatttggttttcgttgcgatgaaggattccgaaaacgagataatcaatctctctggactgatgaagaaaaaatggaatggcaggcacgtaatatagctcctaaaatccttatgccgaagaatgccacaaaagtaaaagtagaagaattgtatcaagaggcattaaaagacagtacaactgctgatcgcctcttagttacaaaatccgttattatagaacttgcaactttctttcacgtttctaagcaatctgcagccattcgcatggcagaacttggatattgcgaagcaagtgatttcttcacttatgacgacgaagataatttatatcgcccaaaacgtctaaaacatcatacaaatgcaaaacagcaacaacaagctatttctgctgttgaagcttttaatctatattgtacaaatgagtatttaagaaccattgtaaagactggggtattttgctttgctgacggctattttgttatacgaaatgataagtatatttcgtcagttgataactcaatacatttaacagaatatgcacaaaatcacttgtctgaatgcacacttgatttctcaacaagacttgttgacaatacatcaaatgatggtacattcatgaacatgatgtatcgtatggatattcagtacaaaaaattacatacctttgattctactgctcaaaatgctgatatgtataataaatcaaaagcacttgaaaaggtatctgaggattttgaaaaacaattcgagttgagcaagtcattaaatccaactgccaatcagcagttttggaaatgtatacaagtggctcactggaattctactatatttcaaaataaaacattattaaatgccatggactatagtagagtccaaaagcctgatcatccttttaaattagaatcctatacagctatggcagttggtcttgaattgtcgcttattcaaacaacaaacatattacagctagctggattatgctactctgaaactaacagagtacatatggcctattcatatattcttaatgcatttcaaggttgccccattgaagaatgcaatgaagtcctagtaaaattaaaggtaccacctttaggcgctaaaacacggaactaatatcctagaaggaaggtcaagccttaattgtattgctatctagaaaactatagatgagaccaaacgaaaatcttgaaaacaaataattttacgagtcaatctgatacccaggattggctcttatttttttcacaaagtcactttatcctctcctctctgctgacaactatcctatctactcaacctacctatcatctaatctgcctactcaactataagaacatttcaccgttagatatgttacctcataaaataaaaacaagagtctccgaaaccaaaaatccttgctgtaaaactagcaattacactttcactctcagaaacccttatttatcagtgctttaagcacttttatttatcttttcgtgacatctttactaccgtctcaacgtgctttgtatttggaaacatgtctacaggctgtacttctattgttttaaatcccaacccttctaaatgttttaaatctcttgctaaagtactaggatcacatgatacatacactactcttttaggcttagcttctcctatagcatttagcaaattaatatcacatccctttctcggcggatccacaactattacgtctggtttgattccattttttattaactctggaatcacttcttcagattttccaacataaaattccgagttgtctattccatttatttttgcattatctaccgcattatctatcgcctgttctactatttcaactccatagacttttcttgcattctgagataaaaataatgttattgtacccgcaccgcaatatgcatcaaaaacaatctcgtttccacttaaatctgcatattctaaagctttattataaagcacttctgtttgaataggatttatttgaaagaaagataatggcgaaatattaaatttatacttacctatataatcagatatataatcctgcccccacaaagttatacacttgtcgccgagaactaaattattatttttagtatttatattctgaattattccctttaaatttttaacctctaacctaatatcctttatcagttcttctttctttggaatttccttatcggtagtaatcagaactaccataatttcattagttttaaacccttttctcaccattacatttctaattagtccttcactaaaaaataaattatctttcctagcaggtaatatagaatgctttttcatccaatttcttattatttttatgattttatcagtttcttcatcttgaattagacacttatccatatcaactacttcatgtgttttttcactaaaaaagcccattgaaagttcattgtctgtcaatgcaattgaatatattcctttatttctatatctgtatggaaatttcatccctatagtattttgaactatatccccggataatccaccaattctttttatgcaatccttaactctattgtatttaaattttaattgtgaatcgtaattagaatgcattagagtacaaccgccgcatttttcataatacctgcattgaggtacaattctttcgtcacatttttctactatatctataagctttccataagaataattctttttattctttattatttctgtctttacagtttcccctattaaagctcctggtataaatattggatatccatctatctttgcgacaccctcaccttcatatcctaaggaatctatttttacaatatactctttatttctctctaacacatgtacacatccttcattgttagtatcatttcttaactataattttcaaatcaatatttaaaaatactttctacattttatcatatcttattcatttatttaagatatttataaattcttatatccaattaagaacaaactcttaactattaaattttcacttaatggatattatatttagacttgacatttcaataatctcctataaaaatcaaataatttacttatgttacaatttattttatcgggtaataaataagtaatgataattatgatatctagatttaatcaacatcttagtaccattaagctatataattttcctaaaataaaaaaagagcaccttgcggtgctaatacagaatcagttgccatttaattccataatcattaaattattatttctcttttagagcaataatatacattatatattaaatatcatatctttaaatgttaattttttgttaactttatatatttcttaaaatttgattacatatttattatcttaagtgcatgtatatattggattttatgcttaaggagcatttaaaaccttccatgtaaaaaaatcgcaggcgactgtggttaagttccgtattgtgcttcgcactcttttcatatgtgtagatttttttcacgcatctgccttttcgaacgcatgtgagaaaaatctgcacatcagaaatagcagctctgctacatataagaacattttatgcaggcgaatgagatttcttttttattctttttaaaataccaaaactatttaaccaaccttttttatgttattcacagattttacttgaatataaattcctaaataataaaaagagactttggtaagattcctaccaaagtccctttatatatattaaaaaattatgtttcaaatattattttacttcgctaatctttaaaagatttgttgcaccaacttggtctacaggaactccagctgctaatacaactatatctcctgatttaacaaattcactattcttagctatttcaactgatttttctaacatttcatcagtagattccattttatcagcaactactggatatactccccatgagaatgctaattgtctagcaactattggatctggagtaacagctatgattgggcattctggtctacattgagaaattctcttagcagttgcaccagtttgagttgaagtaattactgctgctgcttctaattcattagctgcattactagctgctcttgaaataactcctgctatagctggaatatgtgttttagcttgagaaactgctactttatattctaaagatttttcagtttcttcagcaatcttagccattgtagctacagcttctactggataatctccattagcactttctcctgataacatgattgcatcagtaccatctaatatagcattagcaacgtctgaaacttctgctcttgttggtcttggatttctcatcatagaatctaacatttgagttgcagttacaactggtttaccagctgctttacattttttgatgatcatcttttgaactgctggaacttgttctattggaatttcaacaccaagatctcctctagctaccattataaggtctgaagcttctaagatttcatctaagttatcaacaccttcttggttttctatctttgaacagataaggattctttctccaccatttgcatcaagtatttctctgatagtctttacatcagatgcttttcttatgaatgaagcagctatcatagtaactccaacttcacaaccaaagattaaatctgatttatctttttcagtaagagctggtaattggattgatactcctggtacgttaactcctttatgagttccaacgaatccagtgttttgaacttcacacttaatagcgttaccttcaacagatttaacagttaatcctactaaaccatcatctattaaaattgtatttcctggtttaacatcatttgctagtcctgcatatgtaactgaacatttagtagtatcaccaactacatccatatctccagcatatactgtaaattcagaacccttagctaattcaactttctttggttcaaatttaccagttcttatttctggtccttttgtatcaagaattattgcaatttctctatttaacttctttgatagttctttaactttcttaattcttccaccgtgttcttcatggtctccatgtgaaaagttatgtcttgaagcattcattcctgaaagaacaaccttttctaatatttccatatcttcacttgcagggccaatagtacaaatcattttagtttttctcattaaactaacactcctctttcttcgattaggcacataaaataaaataatgttacaaatatgcaaaataagcaagcatgttgattcattattttttgattgtaccttatttataaaatttatataaataaactataagctaaattattatgataatacttgagcaatatcataaagttctttatcaaatttactttccatatcaagagcttcatctatatcttggtctattattttattatctctaattcctattactcttgaagttccaccttttaataatacttctatagcctttgctcccattcttgaagctaaaactctatctgtagcagtaggacttcctcctctttgaatatgacctaagattgttgctcttgtttcaattccagttacttcttcaacgtactttgcaagttcaaatgctcctccaattccttctgcaagcattattagattatgcatttttcctttatttttaccttctaagatagttctacaaagtgcatctttatcaaattccatttcaggaattataattgcttctgcgcctccgcagatacctgcatataaagataaatctccgcagtctctacccataacttctacaattgaaactctttcatgtgaagttgaagtatctctaattttatttatagcatctacaacggtatttaaggctgtatcaaaccctaaagtaaagtctgtgtaagctaaatcattatcaattgttcctggtaaacctattgttttaattccaagctttgataataattttgcacccataaatgaaccgtctccacctataactactagagcttcaacaccataagcttgtaatatttttgcagccttttttcttacttcttcattcttgaattcaggacatctagcagttcttaaaattgttccacctctttggattatatcagatactgaatttctatccatgctgaataattctccattgataagtccactataacctctttgtactcccataacttcaattccgttatgaagcgcagttcttactactgctctaattgcagcattcatgcctggtgcatctccaccacttgttaacacagctatctttttcataatatatatttcctccttaaaataccgcaaagggaccttaaatgacccttgtgtacataatataaccataatttattaatcaagaattattgtacataaatttgaaccaattatcaatgatatttaaccattttctgatattattctaaaataaatgtctaaattttatgaaaaatttcacaatagaaataatttgaaaattattttactgaatttatgactatacaccgctaaatatcatatttcttcatataagctatcttcatttataacaaggatagtaactgcatttttataatagttttagtgttataaaacaatgaacgtaatttgtcttctctattataaccaataatcgataaatttatataaaataatataatttttgtgatattaatttttgtaatatttttcatttgtatatttactaaatttttaatcacatctcgtttctaattatgaatctaatactttaacattctcatctcctaaagtttgcctcaatagattcataacatcgctatctagggaaatccatctatctcttggcaccctaaacttttgttttcctttgctctcaaatatataaataggcgtatctcctatatattcttttatcaataattcttttaattttttacttagaatagtagctgccaccttatcatcaactcttaaatatacctttgaagtattgaccttctctaaaggttctatactttcacaaataagttttggtggttcatcttctttcaagcttaatcttcccttaactattaccagactatctgttacgcataattcttttactttctccaaagttttagggaacactattacttcaatcgttccagttaagtcttcaagttttagaaatgccattatagaattatttcttgttaccttttgattaacactagcaagtattcctccaaggattactctatcattatcttgtaaggcatcctgcctgttaaacatattaatctcgcccatatcgctctctagagaatcatctaaagtttcctgtactaaaaatattttagaaatctcatttgtggtctgcattttcagactttgagcatagtcatctagaggatgcccagtaatataaagtcctgtcatttccttttccatagctaataaattacgcttagtaaattccttaatattaggatagtttacttctggattttttaattcttcacttgcaaataagcttatttgaccatcaatatttcttctcttatcactagatatattatcaattaatttttcatgaacagctaacatcttagatctaaaaacatcaaaatcatctagagccccagcctttattaaacattcaactgcacgcttatttattgatgatggatccattttatttataaaatccactaatgattcaaatttgcccttttcttctcttgctttcactatgctttctacaacattagttccaacattctttatagctgctaatccaaatctaatcttgttctctttaacagtgaatttcgaaaaactttcgtttatattaggcggtaaaacttgtattccaagttcttctgctatgccgatatagtatgctactttttcactgattcccatgattgagttaagcattgctgcaatcatctctactggatagtacttcataagatatgctgtttgatatccaacaactgcatatgccgctgcatgggatttattaaatgcatacgaagcaaagtccatcatagaatcgaaaattttattagctatttcctctgaaattccatttctcacgcatcctggtactattacttcatcattttcaacaataccatgaatgaaattttttctttcttcctccatgaccttatgttttttctttgacatagctcttctaaccatatcactacgtcccatggagtatccagctaaatctctaacagcctgcattacttgctcctgatatactaaacatccatacgtaacacttaatataggctctaattctttagttaaatacgtaactttttctggatttttctttccttctatgtatctaggaatttcagccataggtcctggtctatagagcgatattcccgcaataatatcttctaatgaatcaggttttaattccttcatgaatgaagtcattcctggcgattcaagctggaatactccggcagtcttgccttccccgatcattttatatacttctttatcttcaaagtctattttatctaaatcaatatctatccttctattttctctaatcatatttatagcatcattcataaccgtcaatgttctaagtcctaagaaatccatcttaagcagcccaagctcttccaatgttgtcattccaaattgggttactatcatttcttcattcttctgtagtggaacatattcaactaatggctttgatgctataacaacaccagcagcatgagtagaagaatgccttggaagtccctctaaatcctttgaaacatctattaaagcctttactctttcatctgtatcataggctaatttaagctctggatttaagtctaatgccttctctatagttattccaagcattgttggtatcatcttagctattctatcaacctctgcatagctataattcatagctcttccaacatcccgtatacatagtctagctgccattgtaccaaacgttattatctgagaaacattacttgctccatacttctcaactacataatcaataacttcttgtcttctttcatagcaaaaatcactatctatatcaggcattgatactctctctggatttaagaaacgctcaaagattaaactatacttaatcggatctatttttgtaattcctaacgtatatgcaactattgaacctgctgcagatcctctacctggccctgtaggtattccactttcataagaaaatctaacaaaatcccatacaatcaaaaagtaatcaatatatcccatttgctttattacttgaagctcatattctaatctatcaacatattctttagcttcttcataatttgctacaacctcttcaattttactatagttcaaactctgatttctaagattttcaaatacactatatctatctatcagacctttatagcaagtatccctaagatagtcataaggatcttgaccttcttctagcggaaattttggaagcttagattcgtgaaacttatattcataactacactcatcggctatcttaatggtgttctccaaagcctcaggaacataggaaaacatatcccacatttcatctgctgattttaaataaaactgatctgaaggatatcttcttctatgaggatcatcaatggttttagctgtttgtatacacattagtacatcatgtgatttagaatcttccttacttatgtagtgaacatcgttggtagcaactagtggtataccagtttcattagataattttatattttcttcatttactctcttttgttcttccattccatgattttgtaactcaatataaaagtcaccgttaaaaatttctttgtatgttaaggctgtctcttttgctttttcataattacctttaagatggtaagattgtacttcaccacctaaacaagcactcaaagcaattaacccttcactatgttttcttaaatattcataatctattcttggcttataataaaatccttcaatagatgcaactgatactattttcattagattttcatatccaatttgattctttactaataaaaccaaatggtaagttgaattttctttgtctggctgctttatatgtctagattttggtacgacataaacttcacatcctaaaataggttttatatcattttcctttgctgccttatagaaatctacaagcccatataaaactccatgatcagtaatagcaatactcttcatacctaattcttttgccttcttcatgagctttcctattttccctgatccatcaagtaaactatattctgtatgcaaatgtaaatgacaaaattgtttttcttccattatcctcacctcctctttaaattacagttaatttaaagtttaaaatttacagtttatttagaatttttctaaccaaactataaatcttaaaccatatgtcatttagaaatctaaagttttactgccttccatatatggccctataacctttttaactttttcaacatgaaattcattcacgtcatacgataaataatcttccttattatcaaaccttgttatgattccaacatcataacttctatcactttttattacgtctacccctacttctaactgctttaattccttgatcattccagtcatagataataaagttttttctacaaactttaaattttctgttgttggctctttcaatttaaataatacaatgtgtgtaaacataacatcctctccctttaattttattatttgcttgttcgtaattcctctgctatcttttctatttttcttaatctatgatttattcccgattttcctactggaggatctagcatttctcctaattccttcagtgattcatctggataattcaacctaagctctgcaatttctcttaaattatctggcaatctttgcaacccaatctgtgattggataagttttatgctttcaacctgtcttactgctgcatttacagttttagaaagatttgctgtctcacaattcacaagtctatttacattatttctcatttccttcattattcttatattttcgatctctaaaagcgatgaatgagctcctattacattaagcaaatctactatttgttctccttctttgatatatactataaaactattttttctttgtataaccttagaatttaaactgaaagtattgattaaattcgataaatcttttgcatattcttcactgtgcgttacaaattccagatgataagttttttctggattacttatgcttcctccgccgataaacgctcctcttatatatgctctttttatatcttcatctttaaaaatatactcctctattctatagtccaagctcattattccatcaatttctttgagtattccagtatcgcttaataatcctctaacacccatttcttcagaaattactaccatatagatattattcttctttaaagaattactctttttcaccattaacttcgagtgtatattaaagtgatcctttaaaagtgtaaaaattaatctagcactagctgggttttctgtggtcattttaaaactaagtccacttccactaaaagctaatgtaccactaaccttcataatagccgatatttctgctaacgcctcttccttcgaaatatctatatatctgcatatctctcctttaactttagatgaaaatgacattctgtttccttccttatctataaattttcttatagtttaattaatcaattacttttcctttttcttctctgactctttctttaatacgttgcgataaatacatatattctattatctttttcttatcatataaaagtttcttttccattattgtatctactaatatttctgctaatttatctgaatcgtgtttcactaatccatttttaacttttactaaatcgtccccaactatttttacacctagactattaatatcttctctatctaacttaacaagatctgcgccatctttttgatatttttcttttaattcctctgttatttctcctgtattagcaattacataatcaacaatatctttcccaccatatttgaataaaacctttaagtggtctgatactttaaaacctgtagtctctccaggttgagtcattatatttgaaatatatattttgatagcactactcttcctaacttcttttgcaatgtctttaacaagcaaattagaagttatacttgtatataggctacccggccccataactatagcatctgcttcctttatggcttctaatgcctccggaagggcttttgcattctcaggaactattttcaattcttctattctagatttttgttcaatagcttcttctggaatttgtgattcaccttttactatgttaccattttgtaattttgcaaccaattgcatattatccaaagtaacaggtataactttacctgttacagctaatacagaactcattttctgaactgcttcctcaaagttatcagatattccagccatagctgctaagaacaaatttccaaaactttgattctttaatcttccatcagcaaatctatactgaagtaaatcctccattattggctccgtatcagctaatgccaaaatacagtttcttatatctcccggaggtaacattcccaaatcttctcttaaatctccagatccgccgccatcatctccaaccgtaactattgcagttatatttgatgtatagtactttaaaccccgaagcattgtagataaaccagttcctccaccaattacaactatcttaggcccttttactaataatcttttttcatatattagactttcaatttttctactatctagggacactttgatataacctctatttactaatgcaattattgatttcatcgtttcagtaattgatatatataaaacaaatattcctgtaatatttaaaaacacataaaaaacttggtaatataaattgtaaaccctatggttaactagttctgtaaatccaaacgatattaataatattccgaaaataccgaacgctagccatcgtttcactttaattccagccttaagccaatcttttatcctcatagcttcttttctcctttatgaagatcttcagctacatctctatgctctattttagaattatagttttctttatttaatctttcataaacttcatttgctattgcaactgaacgatgtcttccacctgtacatcctatagatataattaattgactctttccttcttttatataattaggtattaagtactttaacatatctactaacttttctataaaattcacagtctcctcttgttttaagacataatctttaactggttcatcattaccagaatactgctttaattcaggtatataaaatggatttggtataaatctaacatcaaaaaccaaatctgaatccactggtattccatatttaaagccaaagcttaatacagtaattgataattgcttttcaggataagtatgatctccataattcttgtttattttctctctcaaatgccttatttcgtatttagatgtatcaatgataatatcagctatatttttaacttctcttaatttttctctttcctgagtaatcccagtcaaaactcttccatctggagataatggatgacttctccttgtctccttaaatctcttaataagcacttcatcagttgcttctagaaataatatctcatatttaaattcatttttctttaagtaatttagggcttcaaaaaaatcatcaaagaaaattccgcctctaatatctataactaatgctactttttcaatatttccgccactttgcgtgcatacttctgcaaacttagagattaactttggtggaaggttatcaacacaaaaataccccaaatcctctaatgttcttgttgcttgtgtctttcctgctcctgataatcctgtaacaataacaaatctcatactacacactcccttttgccaaagacgttttctaggcacaactattacttctaatttaccttaacatcaaaattatatcatactattataattaaatcataaaaaacccaaaagtctctaaactcttgagttttatataatttagtgtttattttatagatatatttaacatcttcaacttctatttttattcatagttttaaaactaatgtagtcactaaaatgcttaatcttcaccccaaattctaacttcaggatataaatctactccaaattgttttttcacttcatctctaacatgacatattacatctaatacatccttagctgttccgttcttataattaataacaaatccagcatgcttctctgaaacacacgctccaccgatagcaaatccctttaatcctgcatcctcaattaattttcctgcgaaatagccctctggtcttttaaatgtactacctgctgaaggatactctaacggctgtctttcttctctccttttagttaattcatcaactctagcttgaattttttctttatcaccattaactaaattaaaagttgcgcgtaatactatatatcccttttgcataactacagactgcctatatcctaaattcaactctgacttaggaattattctaatttcttgattgtcatcaagtacttctgcactttcaataacaaatgaaatttctccgtcataagctcctgcattcataaatacagctccacctacgctacccggaataccacaagcaaattgaaatcctgctagtgatccttctgtagctgccttcgaaacgtccttaagcaatgctccacattctgcaataattttgttacctatacattctattttattgagctcgcataactttataacaacacctctaataccaccatctttaactaagatattagacccatttcctattacataaaatggtatattattttctttgcaaatagtgatagtttcttttacctgttgtatactgtttggagttaaaagtatgtctactggtcctccaactttaaagtatatatgttcactcattttcgcatctaattgaatttgtgactcttcgtataatttgctgaacaaattcttatattctccatagtgcttcatgccaaaactcctcaaacatttatattaatctgctttttgtttacatgatatagaataatttaaacattaatctaagacaagtaaatttttattccgtactattatagcataatttatttattttgttcatgtttttaatatatattcaaaaaataacataatgtattttaattatacagcattggtacaataatctaaggctaaaaattaggttgagatacctcaacctaatttctcttattttgtatttttgaaatactctaatatactattagctgctttcgtatcaattgattctgtctcaagaagttcgtctaatgtagcttttttaatattatcgatacttccaaacttcattaaaagagacattcttctcttctgtccaatattaggtatgtcatctaatattgaatgaagcgttctcttatctcttaaacttctgtggtaagttatcgcgaatctatgaacttcatcctgaattcttcttatcatttgcatcaaattagaatttctatttattattaattcattattattataaataatccctctagttgcatgataatcatctttaaccaatccacatacaggtatatctattcctaatttatctaatacttcaagagctatatttacctgaccttttccaccatccatcataattaaatctggaaaatttgaaaactttccactagaaaatttaatttctttattttgaatctctttaatctcttttaatccatgagtaaatcttcgctctaaaatttctctcatactatcataatcattagcactttttacagtttttatacgaaatcttctataatcactattcttagctttaccattctcaaatacaatcattgacccaacagaatctactccttgtatatttgatatatcataagcctcaattctaagtggcgtagtatcaagttctaataattcttgaatttcctttaacgaaatcatatttatctctttatctctcaaaatcttatctttaaattgatctaaagtgacttttgcgttatttttaactaactctaacatctcttttttctcgccttttattggcaccttgacgaagacccttgagccacgctttatgcttaaaaattcttccaacgcttcaatttcatcactttccggaatgtatatattctttggaacttttggtgttcctccataaaatgaaattataaattgtgaaattatcgttgtatcttcctcatgggaactattttcaatcataaaatgttctcttccagttatttttccatcccttaaaaagaatacttgaatacagcaatctttctcatctttatagatattaatgaagtcttcatcattttcttgagatttaaacaccttttgtttttctgctatattttctatagcaattattttgtctcttaaggatgcagctttctcaaattctaaatttcttgatgcattttgcatttcttcttttaacttatttaaaaggcttctatccttcccacttaaaacttccattatttcatctatcatttttttgtattcaattttagaaatacgcccttcacagggtgcattacatttttttatatgatagttcaagcatgctcttgtcggcttttcgccttctataatagattttttacaagttcttaatggaaaaattcttctaatcagatttattgtttcgtgtacgtctcctgcattcggatacggcccaaaatatttatttccatctttcgcataatttcttgttataaaaactctaggaaaatcctcattagtagtcacttttatgaatggataaaatttatcatcttttagtgaaatattatatttaggactatacttttttattagattacattctaatattaaagcttccatctcagaatctgttactatgtattcaaactcagcaatatttttaaccattgcctttactttttctgaatgatttttagaattttgaaagtattggcgcactctatttttcaatatttttgcttttcccacatagataatctctccaagtgagtttttcattaaataaacccctggttcatttggtagaatttttaattgggctttaaaatcaaacattccaacactccttcctataaattcaaatataaaaaagtgaagagtttaaggaaaatccttttattatttccaattcagtaattttaagaaatttcaacggttctccaataactattcactttttatctaccatatttaattttaatttccaataactgcttgcctaattaattttcctgctatcggtgccgctgcactcgctccgtatcctccattttcaactattacagcaactgcaatcttaggattacttgctggtgcaagaccaataaaccatgaatgaggtttagcgctttctccattagcaagattatagtcagctgtaccagtcttacctgctgcatcagttccttggaagtaactccaagtagagtcgattcttgaatcaactaaatttttcatatagtcttttataattgcagcattagctgaacttatgacttgtttattcactttgggttcaactgtcttaactacattaccatccttatccactacttgactaactagtcttggttccatcatcttaccatcatcagccactgtacttgcaaccaaagccatctccataggcgtagctaaaatactactttggccaatcccagattgagctatgctaccaatttcagctttagataactttggaaattgactctgatctattttaaatccatcagattctactgtattattaaaaccaaacttctctgcagtagcttttagcttatcatttcctaattccattgccaatgtaccaaatacaaagttacttgataatctatacgcatcttttaaatctatttcgccattaacttctccattatcattacttaatgattgtttatcattaaatactattttaccagtatcattaaaagttctatttgtaattccaggcatattttctaatgcgctactaagagttactgttttaaatgttgatcctggcggatattttcctgatactgccctatttataaacgggctatcttcattagaagctttcattgagccttccaaatcatttggattatatgttggtttagaaaccatagctaatacttctcctgtttttggatttaaggctaccactgcacccttattacttccaagtgcatcgtatgctattttttgaagtgttggatctaatgtagttataacaccattcccaactttaacctcatcttcttttctattcttaaacattgattttaacttatccatactaaaatctttagttaggtttaaaatattgttagtgagtttgttgtatgtggttaactcactatcatagtttgcctctaatcctgtcaatccatatcttggatctacatatcctagagcgtgaacatataaatccccgttaacataagttcttttttgtgttaaagcatctacccttgcacttgttgtaagcggatttttatttctatcatatatggtcccccttaaaacttcatttcttcttgcccaaagcctttgattaccttcactttcagctatagtaggcgccgaaaaaacttggaaatatgcaatatacgagataagagctacaaagcaaaataaaaaaactaccattacctgttttatactattagaaacatttttcaatttttagccctcctccgatatcttttgaagtattgctagtgcaaaaaacatagttattattgaggaacctccagcactaataagaggcaatgtaatccctgtcaaaggtattactgcaaacactcctcctattataactagaacctgacatgctatcatagcactaaggcctatggcattaagttgtgaaaatctatctttgattctaaatgaagctctcattcccctatagaaaaacaagaaatatattatcataattccaagtccaaataccattcccaattcctcacaaattactgcaaaaattaagtctgaggtatttactggcataaatcctgggtagccttgaccaagtccacttccaaacattcctccagaagaaattgaatataatccttgaactatttgatatccagtagtatctttatacttccaaggatctctccatattaatactctttgtcttacatgcgggaacagtttatatgctaaaatagatcccaaaacaaataatacaaatgttatcactacgtactttttcttcccagttgcaacatataacattgttaatgaaataccaaaaaatattaacgcagatcccaaatccttttgagcaaccaaacatcctaatgagtataaaacaaccagtgcaggttgccaaagttgtttaaaatcttctattatattatttttatcttcataatcgtgcaaagctgctgctaagtatatagcaaatgttatcttgccaaattctgatggttgaatactaaatccaccaattgttatccagtttgttgcaccgtaaacttcttgatgcgctaacaatgcagtaggcattataatcaaggttgctatcaggtataccttcttgtacttaacaaaatctcttatatccggaattatcactactaaagcaataaatataattattccagccgcaaaatacattaattgcctaatggcaatagcagtatccagtctatatagtacagctattcctattaccgacaatatacatgcaaatgtaatcaaaaatttgtccccgtgagggtaaaacttccgtattaatatttgggtagcagttattaatccacatactatcacccccatatatatagcgcctttatccatatcgtctttcaatattgccaaatttgtaaaaagtgctatacataacaaataagttagcagtaatagctttatttcgtctctttttatcttcaacctatatcaccccaccgtgctattcctttgatatttagatttccaaaatacttttgtaaagcccagcagaaaatataattttacaatactttcccgctgagcccaattcttttcaataaaaaaatacttttaatattttctttattaaaatatcctaaattaaaatcttaaaaattgctgtaccaattcttatctcatctttgttagatagttttgttttaccacttatcttatttctgtttaagtaggtaccatttgtactgttcaagtcttctataaataaggcactattccttatgataattcttgcatgacttccagaaacatgttgatcacataatacaatagaattatcatcttttcttcctattgtcaaatccgatctaataggaataatagatccatcttttaaatctttgctacttccagaatttataatttctaagccataactcccttttgctgcagtaggtcttcttttcttccctccgtttttaacatccctatacattatctttagtgcatagtatattattacatacagtataataataaaaacaattccaaaaaaaccagcaattattctcgaaaaactcatattttcacctcaatattcattcctgtatccattgtatatgtaaaataactttcagaaacttataagctgtaatttacatttacctcattaatgattatacaataaaaaagtaagtatgacatgcaaaagtgccacttaattaatatatattattatatcatctagattattttaatatctacttatcatattctgtcctataatgccccaattgtcaattttcaatataatttcttcataaaaaatttattatttttaattttatgttatatatatattgccaattaggcattataactaccaattataggttttaatattatatagttctaaatatgagtactcattccttaatattcataagttttatctaagcacatcttttaaatatttacctgtataagattcttgaactttacataattcttctggagttccacattttataatggttcctcccttgtctccaccttctggacctaaatcaattaaataatctgcacatttgatcatatctaaattatgctcaattacaactacagtatttcctgtttcaactaaactttgaagtatttctattaatctactaacatcatctacatgtaatcctgttgttggctcatccagtatatagagagtttttcctgtacttctctttgataattcatatgctaacttaattctttgagcttctcctcctgataattgagttgaaggctgacctaatctaatatatccaagtcctacatcatttaatgtcctcaacttattctcaattctaggtatgttttcaaagaattttaatgcttcttcaactgtcatttttaatacatcatctatattcttccctttatactttacttctaaagtttctctattatacctctttcctttgcacacttcacacggaacataaacatctgataggaattgcatttctatttttattattccatctccagaacaagcttcacatcttccaccttttacattaaaactaaatcgcccttgcttatatcccctcattttagcttctgtagtttgtgaaaataattctctaattatatcaaatgtacctgtataagttgctggattagaacgaggtgttcttccaatcggactttggtttatatctattattttatctatattttcataaccaactatttctttatggtttcctactggatttttactcttatttactaatctatttaaacctttataaagtatttcatttactagagtactttttccagaaccagaaactcctgtaaccatagttaaagtaccaagaggaattgaaacatttatattttttaaattattttccttagcgcctacaatttttattttttgtccattacctttccttctcactgccggaattcgaattgattttcttccagttaaatattgacctgttattgatttttcacatgccttaacttcatcaagtgttccagcaacaactacttctcctccatgctctccagcacccggtccaatatcaacaatgtaatctgcttccttcatagtatcttcatcgtgttctacaactactactgtatttccaacatcccttagattttttaaagtatgtattagcctgtcattatccctttgatgcaatccaatacttggttcatctaatatatatagaactcccataagtgctgaaccaatttgtgttgcaagtcttattctttgtgattctccacctgataaggttccagaatttcttgataaacttaagtaatctaaaccaacatctaacaaaaactgcaatctatttttaatctcttttataatctgctcacttataagtttatttttttctgaaaattccactccatttataaactcaagttcttcttttattgacatacttgtaaattcatatatattttttccaccaacagtaactgctagcacttctttttttaacctagcgcctttacattttgggcatgaatcattactcatgtattgctctatttcaccctttataagatctgaattactctctctataccttctgcttaatgcattaatttccccttcaaacgcataactataaatagctttaactccatctttcacatattcaattttaagtttttttccacctgttccatacaacaataaatcaacatgttctttatccaaatcttttataggcttgcttaaatctaatccatactctttagttagagcctgaagtattgcatatgtccaagaatcctcttttaatcttccgcttccccagcttgctatagctccttccataacgcttagctctctattaggtataacaagcttttcatctatctccataagacttccaagaccatcgcaatgatcacactttccatatggagcattaaatgaaaataatctaggcgatagctcatcaatacttattccacaatctggacaagcaaaattttcgctaaataaagtttcttctcctccaataacgctaattataactaatccttcgcccatctttagagacgcttctacagattctgtaagtctaccttcaatcccttcctttataacaattctatcaataacagcttcaatattatgctttttatttttatctaactttacttcctcttcagttaaatcataaatttccccatcaatccttgctctaacaaatccgctcttctttatatgttctaatatcttttcatgagttccttttctccctttaactacaggtgataatacttgaagtttagatctatctccataccccataattttatcaacaatctgatcaacagattgtttagtaatttctttaccacactttggacagtgaggaattcctactcttgcatataataatcttaaataatcatatatttcagttattgttccaactgttgatcttggatttttacttgtagtcttttgatctattgatattgccggtgataatccttctatatattctacattcggtttatccatttgtcctaaaaattgccgtgcataagaagataaagattccacatatcttctttgcccttcagcatataatgtatcaaaggccaaagatgacttacctgaccctgataatcctgtaagtacaactaatttatctctcggtatttctaaacttacattctttaaattattaactttcgcaccttttattactatcttatcgttcattaaactaacctcctacttaatggacaatacataattcatagttttatgcaatatatcatatattgattattccccattactttccatctttaatttcattaataatatctctgagctcagctgctctttcgaattgaagattttttgccgctaaaagcatttcttctgtaagatccttaattaacttatctttttctttcttagtaagttttttcttatccgcagctttatattcttcgacttcttctgcaacctttgttgcttctataatatctcttacatctttaattattgttgttggtactattccatgtctttcattataatctttttgtatagctcttcttctttccgtttccttcattgctttatccatagactttgttatattgtcagcatacattataaccttgctttctgaatttctagccgctcttcctattgtttgtattaatgatgtttctgatcttaaaaatccttctttatcggcgtccaaaattgcaactaaagctacctctggtatatctaatccttctcttaaaagatttattcctacaagtacatcatactcaccaagcctcaaatctcttattattttcattctttctatcgtatcaatatctgaatgcatataagttgttttaacaccaagttctattaaatatttagttaaatcttctgccatacgcttggttaatgtagttattaatattctaaatccacactctatcgttttattaatctctccatataaatcatcaatctgtcctttaataggccttataatgatttccggatctaacaatcctgtaggtcttataatttgttcagcgatttcttcagaattatctatttcataagccgatggagtagcacttacaaacacaacttgattgattttcttttcaaattcctcaaattttagcggtctattatcatatgcacaaggtaatctaaatccatagtctaccaatgtattttttcttgatctatctcctgcatacattgctctaacctgaggtaatgttacatggctctcatctatgaacataagaaaatcttccggaaaataatctattaatgttttaggtggtgttcctgaagctctaccatctaatattctagaataattctcaatcccactacaatatcccatttcttttatcatctcaatatcaaagttagttctttgccttaatctttgagcttctaaaagtttatcctgagcattaagttctctaagcctctcctctaattctccttcaattatgccaattgctttatcaacagtctctctagatgttgcaaagtgggatgctggagttatggctacatgatttctttctcctaggatacttcctgttaatacatcaaattctcttattctatcaatttcatctccaaaaaattcaattctaatccctttatttgaatacgaagcgggaattatatctaaagaatctcctctaactctaaaagttcctcttgaaaaatctatatcatttctttcatattgaatttctatgagtttctttataacctcatctctctctttttccattccagttctaagacttatagtcaactttttatattcatccggattacctagcccgtagatgcaggaaacagatgcgacaattattacatcccttctttcaaaaagagctgaagtagctgaatgccttaatttatctatttcatcattaattgatgcatctttttctataaatgtatctgtttgaggcacatatgcttctggttgataatagtcataataagatacaaaatattctactatattatcaggaaagaactccttaaattccgaacataattgcgctgctaaagttttattatgagctaatattatagtaggtctttgtaatttttctataacatttgccatagtaaatgtttttcctgaacctgttactccaagcaaagtttgacctctattattgctttttatggaattcactaatttatcgattgcttgtggttgatcccctgtaggtttaaatctagattgtattttaaattctcccattatattacctccgatccgaacagacattcgtattatatgtctattttacttttccttaagtattaagtcaataaattatcttatttattttaactgcttgctcatgcctttaatactctccatatatctaaaatattataattattagatgtttactttatttaaatcagttgtaattaaaattatttattaaaaaagattaaatctatcttataatatccctcaaataaaaatattgttattagctaaagaaaaaagtggccaagccaccttctaattacattttattatctttattcttaacatccttatcatgttttccatcattctctttttctattttatattcaactttattttcagaacccttttcggaaccctttaatgaattcaaaacatttttgaaatttcctccatcgactggcacaatatcttccttgcttacatttctaggcactaccaaaattccaagcctagtgtttttattatgtctaaattgaatatcttttaccattccatgagaatcctttatctttaaaactgcattatataagttttcctttaaaatagaataaacttccgcttcggaattaatttttttaccgttcactgataaaattttactttgaatatcaactccaaattcccgcatcctagaatccgctgacatttctaaaactaccagaccttcttcatcgctaacaaatttagccacttgctttttctctcgatctgcctgaagcttaagcattaattcgtgcgctgctggcatgaaaatcacaacaaatatttcaccaataattccaaacctagaaatttgagctgaagctattagaataattccataagctagtatgtgtactcctgaagatatagctttttctcttttactttttgtaaatgtaattgatgaataacctaataccatataaaaaggaactatagaaataatacttccagctattaaggcgagtccatatggtaatttaattaatggccaccaatctggattagatatagattctgtcatataactcaacatcgaattattcccattcatagcaataattattgctattggcaatgcccaatatctttttaatgcatatccacctaaaattttattatctctatttgtaaatacaggtacagctcctctatctccatcgacaattactaatatcccttcaataacatggaatactcctataagaattgctaaataaaatatatttagatcaaaaactcctaaactatgaggaatgaatatattaatcaatttaattataattactataccacctagaattgctcccgaataagaaaagcatattaaccttggtcttataagcattaataatattgatataacaaacaaatacgatattccagaattttcactaaaaactacacctaaacttgtaagtattatgcttcctataattccacctataattcctaaaacaagttgagatagtgtaagttcaatagatgaatttacactacctcctaaaattattttttgcatagttactacttttttgttctttgaatgtagtatcattattaagagtattaataagaatactaatggaggggttactatagcgccagatacgctccgtagcgtatatataaataaacccatttaatccctccctattgaatcttttctcctattttttcaaccgctgtctttagctgctcatcagcatttttatcatagctcttttcatcaataccaacaggtgttgtaacatcgaaatctggggctattccttttttatgaatattctctccattcggagtatagtatttagaaatagttactttaagtccaccgatattatcatcaaatttaactgtttgctgaactatacctttcccaaaagtagttttcccaacaattgttgctgctccataatctcttaaagcccctgtaacaacttctgatgcactagcgctattttcattaactagtaataccaatggcatgccttcagcatctccaccaattgataatgaatcatttctgttttcatatttatcaattgtgtaagttattatctttcctttcggaataaactgtgatgcaacgcctactgcttctgttaatagtccaccaggattttctctcaaatctactatcaagcctttcatcccctgagatttcaattcatcaatagtgtttttgaaatcttctgccgtattttcattcatgaaagtttttatacgaatatatcctattgaagagtctagcatatttccgcttactgattcaatctttactttttcaggtgttatattaacattaaattcattagtatctgctctcttaatagtcagttttaactctgaattatttgcctctgcaatcatagacgttgctttttttaaatcatcaccagacacatcgatatcatttattttttctattatatcattttcctgtagcccagccctatcagcaggtgctcctttaacagtatctaaaattgttacctgcttatcttttaatgttacagtaacacctattcctgtcatacttccactactttgtttcattaaatcatcaaattcgctttgattcataaatacggtatattgatcatttaaggcattagtcatccccttaatcgctccttctaaaagagcattatcatcaatttcaccatcaaacttttcaattaatttatctctcactgtaaaaagtgctgaatatttactcttatcatttatctgcgaagctgtactcttgacttctggcgatgttcttactagaaatatccctttagtagcaatatagtttcctcctaaaaaggatacacatataagaaatattataaagattactgttggtactaaaagtatttttctattttgccttctatttgcaaatatgtattttcttgattccttcacctataaagactccctttcatatgcatcatacatataatcccaatatatatctttatagattaaagtggattatattgtaaagtttttctcaagatttcatagtataaaatactatttttctttattcctatttttattatatttacacttatttgcaaaaattataccactaaaaatttccttaatgaaattatactagcaattccaccaactataataccaccaagcataaattgccataatagagttgagaatataaatgttgctggtacaaggcttacaaataccaattgcgaagcaatccacctaactagtccattatatgctgcaaataaagctccacatgctaatgttgctccaataaaccctattaccattccctctattacaaatggccatctaatgaaccaatcagtagcccctacaaatttcataattccaacttctcttcttcttgaatatacagttagttttgtagtattcattattaagaatattgaaacacctactaatattataaacaatccaaaaccaactatttttacaccatttactattcctacaatcttgtctactaattcttgttgatcacctatagtctcaacaccttcgaaatcttttattccttcacttacggctgacgcatattctggagattccaattttactgtaaatgatgctgaaaaaggattattttgcaatgtatatccttttagcaatccttcattttcattcgtagtactttgaaaatttttgtactcttcttcttttgattggtaaattacctctttaacgccttcaatttctcgtaattttatttctatttccctttggtcaataagttttatatcatccttaagaaatatttttagttctactttattctgaacagtatttattcctttgtttatattattagcaactaatacgaatattcccaaaacaaagaaagttataagaacagtaattactgaagcaatactaatagtcttatttctctttaagcttgtaaatgcatccttaataaaatgtgcaatagtattaattttcatcttcgtacttacctcttttctcgtctctaacgatttctcccttttcaatagctataactctttttttcatatagtcaacaatttcctttgcgtgtgtagccataagaactgtagttccagacttgtttatatcctcaagtaatgacattatttctctcgctgtatctggatctaagttaccagtaggttcatcagcaatcaaaacagatggattattaactagtgcccttgctaaagaaactctctgttgttctcctcctgataattcattaggaaacatcttatatttatgagataatccaactaacgacaataccattggaactcttcttcttatatctttttgagatgcttctactactctcatagcaaatgcaacattttcatatacgttaagagttggtatcaatctgaaatcttggaataccattcctatctttcttctgtaataaggtatttgctgcctagtaatagttgataaatctttatctcctattaatatttttccgttggttggttcaatttcctttaaaagcatttttataaaagtagatttcccagatccacttggtcctactaaaaatacaaattctcctgcttctatctcaacattaatatctgacaaggcttttacattattattgtaaattttagatactcctctaaactcgatcatactcaaacactccttctttattgtatattccgcaaattaattgcaaaacctacaaaattaattataacataagaatactttctaatgttatacaattttattaaattcggagccatttgttggtaattaatgttgttttatatcattaaatccttcacctaatacttcatgaacttccccaactgttataaatgcatcaggatctacatcttttataaacttcttcaattttatgaattgattcctacttaaaacggcataaagtatattagtttctttctcggtaaatgccccaactccatttataaatgtacatcctctatctaatgtatctattatatatctacttatctcataattgtttttactaataataaatatacttttacaagcattaaatccttctataactctatcaactattaaaccaagtagtattatacttagcatagaatacaacgcaacatccactccaaatacaaacgcacttgccaaggttattacaaaatctactactaataaagattttcctatatctaaatgaaaaaatatatttagcattttcgctaatatatcagttcctcctgttgatgcattttcattaaatatgatagccattccgaatgctgaaattaatgttccaaaaatagttgccatcattaagtcatttgtgattgcaactggctttaaaaacctctcaattgcccatattataactgataatcctaaactagcataaatcgtctttacaccaaattttccatcaatgaatacaagtgcgactataaataacaatccatttaaaacaaaactcactacacctattgaaaaagatggtacgactgcattaataattattgctattccagttactccacctgctgcaatattatttggagcgtaaaagtactcaatagaaagcgcaactagaattatcccaaatgttattattaaatattctctaaattttgattttttcattgtcatcttccccttttaatttttatttatattagaatttctctcatagtttcccttgtttatttttgattattcaaaaatagaaaatgcaagatcctcagctatttcataagctttgtatcttgcattttcggtatgttatattctattattctaggttgattatttctttaatgaaatagctttcttactatgctctactatggcttctactgttaatccatacgcttttaataattcgtttggcttaccactttcaccaaaagtatcttttatcccaacttttaatactggtactggacattcttctgttaaaacttcagcgactgctgaacctaaaccaccaattatactatgttcttctgctgtaactattgctcctgtttctctcgctgcattagctaatagctctttatcaattggttttattgtatgtatatttattattctagcatcaattccatctttagccaactcttttttagcttctaacgctaattcaaccattagtcctgttgcaactatagtaacatcgttaccttcggctaatgtcacaccttttccaatttcaaacttataattctctatgttatttacagtactaacagctaatcttcctaatctaacataacaaggtccattgtattctgctatagctaatattgctgcctcagtttctatatcatctgccggattaattacagtcatattgggaatacttctcattagtgatatatcttcgatagattgatgagttgctccatcttctccaactgttaatcctgcatgggttgcacaaattttaacattcaaatttggataacatatagaatttcttatttgctcaaaagctcttcctgctgcaaacattgcgaaagtactagcaaacggaattttcccacaagttgaaagccccgctgcaactcccatcatgtttgattctgctattcccatatttataaatctttctggtgaaacagctttaaaatcagctgttttagttgatttcgataaatcagcatctagtactacaacatctttatttaaatttgaaagttttactaacgctttaccataagcttctctagttgctactttatttcccattagttttcccctccaatttcctttaatgcttgctcacattgttctttatttggagcagttccatgccatcctgcttggttttccataaatgaaacgcctttaccttttactgtgttgcatataattgcagttggttttcctttaacttcctttgcttttgcaatagcatttataatttcatcataatcatgaccatttatagtcaaaacgttccatccaaaagcctcaaattttttatctataggaccaggattcataacatcttctatgtttccatctatttgtagtccattattatctataaatgcagttaaattatctaatttgtagtgagccgcagacattgatgcttcccaaacttggccttcttcaagctctccgtctcctaaaatagcgtatactctataatccttcttatcaagttttcctgctaatgccattccaacagcagcagaaattccttgtcctagcgaacctgtagacatatcaattcctggtaaatcattcatattaggatgtccttgtaatcttgaacctgtttttcttaggctctttaactcttctacttcaaaatatccctttctagctaaagcactatataatgctggtgccgcatgaccttttgataaaacaaatctgtctctatttggatcttttgcgttagatacatctatgttcatttctttaaagaatagtacagacataatatcagctattgacaaagaacctcctggatgacctgatgatgattctgtaagcatagaaactatatcttttctcattaactttgagatttcttcaagtttgtattcattattcattatacaaccccctattattaatttactcatttatattatgttttattttaacatatttattctagcatacaaaatatattttgtatacctcattcatcaatgtgttatacttttaagtgtatttacacaatatagagtattctcacgcataaaaagagtagtacaaataaaaaattatccataccactcctaatattaatagatataaaacccttttgttttctctttagcttaaattcaaactaaccgctaatgctttatcaacctttttcatgtccgcttcagtcatatgtccaattttttctttaagtcttctcttatctaatgttcttatctgttctaataagacaacagaatctctatttaatccatactcttctgatgaaatttcaacatgaataggaagcttagccttatttatttgagatgttattgcagctacaataacagtaggactatatctatttccaatatcattttgtattataataacaggtcttatcccgccctgttcggatcctataactggacttaaatccgcatagaaaatttcccctctttttaccacaatgtttgccattctaaataatcacactccgcaaatccatgcctcatactcattaacatcatctaacatatattcaaaacctaatttagaatattccaagtttatttcagccatttcttgataaccatttttcattagtttttcaaaatcagctgaaaatccctcgttaatatattgtattaacgatttctccataattccactattttttttaattttattattccctgagttaactatttttttatttttcatgttatttagattaattattgacatcttttcgcctccatagcagtaaaaagttcttataactatgattatattgcaaattatgtcaatttgtcaaaggatttgtattacttctttaccattctctagataattcttattaaatgttttctctacaaaatttctaatatgtactttaatttatatttagatttagtatatcgttttttaatattaatgttggcttgatttctaattaataaatttattcaaatcaaaataaatcatcacttaatgttttttcttttttaaaatcactatactttactattactctctctttattatcatcatctaaaatctttaataacactggaaccttcttatccttatctacatagaattcagctttatttaaatgcttattcttgctgttaaattctatatctatttgtaaatatactcctggtccccaatctgctttaacctcttttatttcatcggcttgcttattagatagtatattttctatgaatgccaaaggataaattacgtctatatccttatcaagtgtatatccctctttatcttcgtcaccctcaacttttatctctgaaccgttataaaccttaactctgttatagtcatttccaaattctattcttgaccccttatcaaaactatagtattgcattgtgttttcctcgaattccgacttagaattcttaaacagataatcaactttactactgtaatactttgtgtctttcagttcactaattatatcttcatttgaaggggtaattacgtctctacataaaataactaacaaaatcataagtactggaataagcaccaaaatacctataattatttttttattgaacaatacttttctaaaatccataaggcctcctaagatttattactacatattactatttatgaaaatcttagtgactttattcttaattaatcaataatactgttaatttctttaggtaattcggctataatatctcttgcatttactatgtaaacttgtttgcttaatttatcagctatattcccatgaatatatgcacttaaaagagcagcctgatttatgctagctccttgtgacagaaatgcatttattattccggtcaatgcatctcccatgcctcctgatgccatcttactgttgccagtaggatttatataaacttcttttccgttcgaaattacggtattatacccttttaataaaacaattattccatactgcatagcaactgattttgctatgctgactctattagcctccacgtcttcaatactcattcctagaaaccgtgccatttcacctggatgtggagtaataattgccctaccctttaaattatttagcaagtacttattttcccctataatagatatcccgtccgcatcaatcacaataggacatttactgttacttattatcttttccaataagcttttttctctttctccagccccaattccaggaccaaaagcaatagaacttgctctttttataagttctataaagttatcattatcttcatagtctaatgtcatagcttctgttaatctgcttgatagtatcttttgcacctcactgctgcatactagtgtagtcaatcccgcacccgctctaaccgtacattccgtagttataaaggcagctccagtaaatccgattcttccagctacaactactgctctaccgtaatctcctttatgaccataaacctgcctttttaaaagcatcttattatattcctttttttctagtatataaaaattattagagtttttcttttttatatactctggaatacctatttttaatattttaatttttcctacacaatcaatagctttataatctagaaagccctgtttgatgccctcaaatgtataagttatattagcatgaaccgcgattcctctctcaatacctaagtcacagtctaaacccgatggcgtatcaatcgccactacaaattttgcatacaaatttatacattctataatacttttaaacattcccattaaatctttattaagaccaaccccaaaaattccatctattaataaatcataatctttaatatcccttattacgttttcatctatatcgttctctgactttataaataatatgtcactcttttcaattattttttctaatatcccaaagttgatcttaaaatcttgactataattttcgtctttacttacaatataaacccttacctttttcccatctaatatcaaatgcctagctaatgcaagggcgtcccccccattatttccttttccacataatattaaaaatgattcacctttatctgaaagctccccaaataaacttatcgcagcattttccatcaatactatactaggaattccaatataaccaatgcattctctatccatttctctacattgtttagccgaaaaaatttctaacattatattgcctccataactgcataagctatcgcattttcattactatgtgaaatactaacatgcatattaaattcctttatctccaataggttatatattttatcacttaaattcactattggatttcccaattcatttctcaatatttcaatatcttttaatccaaatcctctaaatccagttcctattgctttactaatcgcttccttagcagcaaaatttcctgctactacattccccttaaatccttttaatttgaaatatgcaatctcattacaagtgaatgatctttcaataaaagtatttgttctttctatcgcacgttctattctacttatctctattatatctgttccaattccaataatcatgatttatcgcctttcttagtaatctcttaccatatattagcgtaaatatttaattatttctataccttaatattaatttataactttctctcctataccaatatcaaactcataagcatgctcatccacatacgtccctataatatcaattaagtgaagtggtgatacctgattattaaacaatttcataagtaattgttttactttgtacctatgaattgatattatatctatcttttctctctctaaatttacattttttagatcaatataatcttttctttcaacttcaattccatatgcagttatccccttataatccttttttataagcctatatgcatatctatactctacatcagcatcactattaattgatgtatattcctcaactaaattcataaccctttcaactccctcaagatagtaattccttgtttacaaacctatagtatcacataatgtatcaataaattgtcaaagcatgtcctctttttcaagatttatattttttttattgacaataaaacttcttcctttattttttacaacatatacattctttaaattttcacataaaaaaagtcttttgtcgaaattaaacgaataatatactgtatttatttttttaaaatttgatatggtttttatttacaattaaattcttatttattatcataaagaaataaaaaaagagccaatagctcttttttcacctcataatctcttttttgtttcaccataattgaaaaatatataatagatatcgtttacaacattattataacacatattcacataaatacaacactttttctacaaatatttttcaatataataaaaatactttttgcatttccatataaatactgcttatcttactttaatgactttattattcatttttagttttattaaattaaactaatattattagcatttttttgcaaccaagcattttattaaaagaatatttattttaaatctacttttatttataagtaaaaatatactttttatgttattacaaaggttatctaaacgcattaataatacctaacaattagataacctcttctacaataagtatacttattgttatatacttatttatccatatagcttatattattaaaatcaactagaccaatatttttacaacgcctcagtttgacttttcttattctcaagaaatttaaaatcttctgctataacctctgctatatactttctatttccctccttatcctcataactaccagtccttaatctaccacttaaagtaataaggcttccctttttcatatattttactataacttcagctttttttccccaaacttttataggtataaaatccgcttctctaattccatcaggtaatctaaaatttcgttgcacagcaattgtaaacttggtataaattttatccccactttcagtgtgcctaagttcagggtctttaactaatcttcccaataatattattttattcatcttttacctcctgaatatttttcttctaaagttatatccacttcggtaatttctattcaataaaaaatcaaactttatactaaaatagaaaaataaacttatacaaaactttcactattattatctacctatttctagtcattccatttctatcccttaactcagatgtaacaaaatttatctccactcctaagatgaatattattgatattaaaaataaccatgtcataagtataaatactgcgccaagacttccataaaacctagaataattgttaaaattatcgatataaaatgaaaaaacaaaagacactagcacccagcccaccgtgctaaatatagagcctgcgattacctctttccataccaactttttagcaggcgcaaatttataaacgcaaataaatatagatatcattatagctagtataaaagtatatctgaatatattccaaataattaatactatttcataaaacggatctatacttttaatataatcgcctattacatttccaaatactagcgccgttaaagctagaattatagttacagctaatgctaatattcctaacatagaaataattgagagtttaataaatgacctctcttctttaaagttgtacgccttatttatgctttttattatagctttaaatgcagatgatgctgtccatagcgttagcaatatagatattcctaacaatccagtatattgattgtcaaatatctctacaacagttgattgagttaattccaacacactcctaggaagcataacatttaattgtcccagtatttgtttagaacttatgctgctaaatccagctaaagtcattaaaaataacataaacgggaaaaaggataatattaaataatatgctaactgagatgctagtgcaaacacatcgtccctcttaatttttactataaggtgtataattaaattaactttgctacttaattttatatatttcatttaatcaccaatttctatctatattaattaaaaatctatttattttatgtagtacttattttattcgcttttcacaaattatatgtacccttaataaatgtaataaaagagcacatccataaaattatggatgtgctctttttataaacaatatattctatctaattgtaactcattggaactcatgtactattctcacatagaatcagcttatatacaccttgcaaaacttataatttataaatcttctctctattattaacaacatttttagttgcatttctagtatcataaacaactttagctctagacacaattgattcgtaatcataacagctatgatttgtagttataattactatatcagactcgtctataacctctttccaatcaacagaattataaaccttacctttatatttagaaattggacaataagggtcatttaccattaaatcagcaccattcttttctaacagctctattaccttgaatgctggagattctctataatcatcgatatcattcttatatgcaactcctaataaaagaactttagcaccatttaatgcctttttattcttattcaaaatcttcattacattatctaatacaaattcaggcatagaatcatttatttctcctgaagtttctattaatcttgtatgataatcatattcttttgctttccactctaagtaaaatggatcaagaggaatacaatgtccacctaagcctggacctggataaaatggcataaatccgtatggcttggtcttagctgcatctataacttcccatacatctattcccattctattacataaaatagccatttcgttagctaatccaatatttatatttctaaatgtattttccaatatcttttccatttcagctacagctggagatgatacagtatggatatctccctccaatatatttctatataatgctgctgcaacttctgtgcaatcaggtgtgcaacctccaacaactttaggagtatttttagtattaaagtccttattacctggatcaactctttctggtgaaaaagctaagaaaaagtcttctccgcacttaagtccactttcttctagtattggcttaagaacttcttctgttgttcctggatatgtagtactttcaagaataacaagcatacctttatgtagatattgtgcaacacttttggttgaatctacaacatatgataaatctggttgcttatataaatctaatggagtaggcacgcaaatacaaatagtatctacatctttaacaaaactaaagtctgtagtagctcttaaagtattttcttctactatcttctttaaattttcatctactacatctccaatgtagtttttcccttcattaaccatgtttaccttttgatcttgaacatcaaatccaatagtttgataaccagcattagctttttctacagctaatggtaatccaacataaccaagaccaaccacaccaacttttgcagttttattatttattttgtctaataattgttgttttaataatgacatcttatacctcctgtaatgtacggtctaaaattttatccacagaacataatttactaaaagttttattaacaaattacacaatgaaatgttaataaatataaatttgtttttctaatctatacattctactttttctttatctttactatactttttcccacaagattcacaagttgcatgttcatctttaaagtttaacttttctccacattcacatacatatcctattatacttgccggatttcctactactaaggcataatcaggtatgtgtttagtaactactgctccagcacctaccaatgcatattttcctatattatgaccgcacacaattgttacattagcacctatagaagccccttttccaattatagtttctttatactcgctttttctttcaataaagcttcttggatttactacattagtaaacacacaagacggtcccaagaatacataatcttcacaaataacccctgtatatacagacacattgttttgtatctttactccatctccaatttttacaccaggtgatattacaacgttttgacctatattacacttttctccaattacagaattactcattatatgagagaagtgccaaatcttcgttccgtcacctatcactacgtcgttatcaatgtaacttgattcatgtacaaaataattcttatccataattaaccctcgcacttatcaatattttccttaagtaaacctcaagctcaaaatataataggaattgcatattacaatattaatattatgcctttatattttcaactatataatttatttcattttctgttaattctggataaactggtattgcaaatgttctatgtgataaatattctgcaaccggcatatccccttctttatatcctagatctttatatactttttgtaaatgtagtgggactggataataaactccagttgctatacccttttctttaagtttatttatcatatcttctctattttcgcattgtaacacatattgatgatatatagtttcattttcttcatcaacagtaggtacaactacattagaatcttttaatttttcattatatatttttgccacttctcttcttctactattccaatcatctaaatgtggtaattttactcttagaattgctgcttgaatagcatctagtctagagttgaacccgattaaataattataatattttaaagcattatatacagtatcgtcaccatctttagatgtctctatctcatcatttatattatttagcaaattgtaagctttttgtccagtttctccacttccatgtgttcttaaagcttttgctattgttgctatattatcatcatttgtcactatcataccgccatcaccagcacatgaaagattcttagttgggaagaatgagaagcatgctgcattacctaaagttcccgccatctttcccttatatttagaccctgatgcttgagcagcatcctctactatctttaaattgtgcttcttagctatttcatttatttcatccatcttagcacattgtccaaatatatgaactggtataatagctttagttttatttgtaattttttcttctattttagttggatctatattaaatgtttctttttcaacatcaacaaaaacaggcgttgcacctactgctgaaatagcttcagctgaagcaaaataagtaaatgtcgaagttattacttcatctccatttcctattcctaaagattttaatgcaataaccaatgcatcagttccattcgctactgatatcgcatgtttaactcctatatattctgcaaattctctctcaaattcaattacattcttgcccataatataattcgcagaagaaagcacttctttagttactctatctaaatcttcagcaatagacttatattgagcttttaaatcaattaatggaatattcattatcctcgctccttaattctactttaatacgttattaatcatcaccaatatatctccgattcaaacttctgactgacgatatcaataactaaatattttttaaattgtagtgtaaatactaaaattattatgtagatatactatttcataaaactaccatgaatattttaacatacttatttttaattcacaatgcacaatacaatctagtagcttatttcatacaactatagataatttaatatttatttataggataccactcatttggtaaaagaacactatatttattatttatatatctatcatcaataagcagaactctccctttgtccgtctcagttcttataactcttcccacagcctgctgaattttatttattcctggaaatacatacgcatagtcataaccatcttctttataaaaatcctttataacttcatttgtcatatctaccataggatatcctactccaattattatgcttccaattaactgatcaccaggcaaatctattccttctgaaaacatccctccaagcacacaaaacattaataaattattgctattcttaaatcttcttaaaaattcacttttttcttcctctgtcatattaggtttctgtttcataagattaaattcttctagcttcgactcctccatatggctatacaactcttccatatatgcatatgatggtgaaaaaatcatgtagtttccaatttgctgctttataaaactacaaattttatctttcactgatgataatgtcctttttctatatgaatatctaatattaatagggctaatatgaacttttaagttttctttattgaaaggagatggaagctttaacctatatgtattatcatctccgcccagcatatttacataatattttattggggatatagttgcagaaaaaaatattaccgagtagcattttcctaagtattctcttaaatttttagctggatttacacaatataaagttaacttcacttcttgagaatccttttctacacaggtcctataattttcatcatagagctgtgtcgtagaagtaaaagcattcatatcaaaatataattttaatatatcttcatagccatcaaatctatttcctcttaccagcacctcttcactttcttttaagtataactgtaaatacttgctcaattccttaggatgttcctcttcataaaatgctttcacttctctatggtcgcattcattccttaaatcaatgaaataatcattaatctttcctaataaagaatgtagtttatttagtttacccttagttatctttttacaatttagaatttgacttttatataaggatgcagaatacatatttcttgatctatcaattaaattatgtgcttcatcgaccaaaactatatttcctttgctttctagaactctgctcaaagacactcttggatcaaagatgtaattataatcacctataattccatcacaataagtacttatatctaaagatagctcaaatgggcatacctgatatttttcggcatattccctcaatatttccgtggaaattctttcttccttttcaataacatttgtaattaccttttttactttaccataataatctttagcatatatacacttctctggattgcaatcaaaatcatcgttaatacaggttttctcttttgctgtaattgtgatagtcctaaatttcaatccttcttgacgcaatctttcaaaagtttcttcagcaacttccctatttatcgtctttgccgtcaaatatataattttttctccaattccttcgcttatagcttttacagccggaaagatggttgatatagtttttcctatgcctgtcggtgcctgaacaaataatatttctccctcttttatggtttgatacgaaacattaataagtttcctctgaccttctctgtatttttcaaaaggaaaattcagtacttttatagtctcatctctaatacttttccatttaaatattaaaacactaaatttctcatattctcttaataagtcagatataaattcttctaattctcctatagcaaatcttttttcaaagctcttaacctcattcgtttctaactgcatgtaggataatcgtacatgaatttcttcaagattattttgatttccataaataaaagcatacacctttgcctgagcccaatgaacctcattcaaatcatcaatgtatgcaaaattcttataagttgattttatttcttcaattataactttatcttcttctgttataattccatctgctcttccttcaatatatatcaaacttttactcatctcgaactcatgagttaaatatacttccttttcatagttcttataaattctcccattatcctcttgaagcttttgatgtgctcttactccctctactgccctagcacttccagaaaatctattatctatatcaccttttttcaagcaaaattccactaaatttcttacagactctcgtataagaattttatccataaattaattcctcactatagttaaaattacactttccatattaaatcataaacatagtcataaaacacttacttaattagcttaacaaaaattcaagttctaattaagtaagtgtttttagtttattgctattgtaactatttcatctcatataatttattcttcttcatactctttaactattttttgaactaactttttaataacacttgcttctgctattaaagaaagaactaataggaaaattttaattctttccttatcattatctttcaagtcaaatttttttattatctcgtctaatttatcatcatttgatataaacgtatctaaatagttatctaaactttccttttgtatttgtgtgaaagttttatatgtttcttcccatgatagtatatcatcacttctgtcattgatttcattaaatgcaagccgaaaaactttctttatttcttccgtcgttaataagggcctcatatagctaagcagtactaattgtactaaatgcattttggtatatcctctttttttgccatcttccggcttagttataacttcgcttttagtataattttgaactatattgttagtaaacttctcatcaacaaacttatcgttaagataatcgattacttgggacaaaaacaaatcatatttaggaatatcttcatatgaaacggaagtacttttagacatttctttagctaattcttttatataatctgaatcaaattttcctgccattatcatgcacctattctttctcaatctatattatatattatatagtaatcatgaacttgttacaagttattataaacattgtaatgcaaaaatttttctattagtttatactcttagtataataatagtattatacgacatatctaattttttttaaatatagtatttataaaaaatatctaatttatgtaatcaatcgacattattatttatagtatttgcatttctacaaaaaaagcggacatgtgccttatattactttatttgtaaatttactattatacaatcatgaatataattcatatacatttctctaaccattggtacatctagattcctcaaaattattaatttggattaatatgataattttacaaataaaccctcttgacttttctaaaatatggtagtatattttatataagatgtttattaaagttgaaatttgtaatttcttataaatatttaaaaatatacattgactttatattacatacttggtaatatatcatagtagaatgtcgaatcatggaattaggaggaattttttatgaaatcaacaggtgtagttagaagagtagatgaattaggaagaatagttattcctatagaacttagaagaacattagatattgctgaaaaagatgcattagaaatttatgtagacggagagcaaataatcttaaagaaatacgaaccagcttgtattttctgtggagatgcaagagacgtaattaactataaaggtaagaatatctgtactaaatgtttagacgaaattaaaacaaacaaatagtatctgatatattctaatttcctattatataattagttatatactcactaaataatagactatctcaagagttaatttgagatagtctattttcttaacttaattatatattagttgagaatttatacacttcacttttaggtaattctctttccttggctacaagctttattgcctctttcttactcgcaccaccattaatatatttaactatatgctcttcaatagataaatgaatccactcttccctttgctcttcttttatctcttcaagtctttttccttctagaacaagaacaaattctcctcttggtttattctctagaaaatatttaacagcctcctttaacgtccccctatatatttcttgataaatcttagttaattctctacatacggcaatttttctatctccgaacgtatctaataagtatccaagcgtatctatcagcctatgaggcgcttcataaaatataatagtttcctgactttgcaataattcatttgtgactgtcttacgttctttattttctcttggtaagaaacccctgaataaaaatttagttgtgtctaatccagaatagactaatgccgtagttatagctgttgctcctggaagtacttcgaaatttatctttttttctatgcaacgtccaacaataacacttcctggatctgatattccgggtgttccagcatctgaaactaaagcaacattattaccttcaattagtaaatctataatcttatcactttttatttgctcattaaacttgtgataacttattaatggcttttttatctcaaaatgatttagtaatttcaaagtttgtcttgtatcttcagccgctataatatcaacatcccttaaagtttccagagccctcaatgttatatcttttaagtttccaataggagttggtactaaatacaactttccattttccatatcatgacctccaatatattgaatctatttctttagtatattttccatcttcatcatagacatataatggtgcttcccacttcaaataggatcccccatctctttgaccttcaaccaatacaatattaggagcttttcctactttaggatgaatcatttttactcttttcggttctattttatattttctcattaagataaaaatatctgctaatctttcaggcctatgtatcataaatagtcttccattatcctttaataaaattcttgctgctgaaatcacatcttctaaattacataatatttcatgtctagctatagcaagcttatcatttggatttataattcctgaattgtttagtttataaggtggatttactgttactacatcaaacttatcaagcgtctttagataatctatattttttaaatcttcatttataaaacatacatttccttcaagctcatttaattttacgcttcttttagccatatctaccatatcttcttgaatttctaatccatatacacactcaggcttatatttaccatatatcaaaaatggaattatcccagttcctgtgcataaatccattaccttatgtttattttttatataagcaaaatcagataataaaacagcatctataccaaatttaaatccctccttcttttgaattagatttaatcccttaagttgcaaatcgtctaccgtctcatcatctctcacatattgcaatttattattcatattattcttcctttacttaactttacaatattctactttaaaatatctaatatcactgtttgcatatacctaatctctaaagtatatattccacattatatcatacaagtaaaataaaaaaagtccttctgatattttacagaaggacaataatttgaaatcagatattaacaactaatttcttatgttaactaattaagaactcttcttgccgcataaaagctataaactggcgcaactttaactacatcacctgtttgaggtgcgttaatcatttggccgttaccaacatatattccaacgtgacccggatgagtaaatactaaatctccaggttgaagctgatctcggcttactggttgtccaactccaatttgagaataagttgttcttgttatatctactcctgcagcatgctcataaacatattgagtaaatcctgaacagtcaaaacttgcatctccagttgcaccccatacataaggctttcctaactgtgcatatgcttcatttagaatagattgagcatttcctgctgatggtacagctactcttccgcctccgcctctacttggcgttgccacttttacttcagctgcttttttatctgctaccattgttttggccttttcaattttatcatttatttctgaagtaacaatctcactcttaatttgattatctctaatatttcttaattgattaattgctccttgaagatcagcagctgaactattagagttacctataacatcaaattgagattttacaagttctctttctaattgtgataagtattgtgaatcaaatttacttttttcatccttagcttgacttgataaagtttctgcttcttttttctttccatcgagttcacttaagctaacttgtatttctttattaagtttatctatttcatctttcttatcttctaaggattttattttgttatttaattcttcctttttacttgtaacatcttctatggcagatttgtctttccctataattttactaactgcctctgctctagaaaagaaatcacttgttgattctgattcaagtataaaattcaagtaaccaaattctaaatcacctgacatatacatagctttaactctttgtcctaaagctaaatctaatgtattaatctctttcttatattgttcaatgtcttttgtactactatcaataactttattgatagttgttatttcttttttattcttatctactgttaattgtagcggctctatctgcatatttaaatcatcaattttattctgaatatctgttatcttactttcaatttctgcatatttctgtcttgaatcactcaactgttgattatctggcgtcgcaaacgctggtatcgagctacctacaacgattacggttgctaacataatagctagaattttactcctcattaaatatcggttttaaaccttccctcctccattaatctatattactacataattataacaccttggataagaatgaacaattcatatatatagcgagaatttagtttatcctactattatctaaatatcgtccgtattccccactttttctagcttattctttgtgattcttattatagcttatatattaaaattttcatcaataaacttaacttaacaattttaggttccctcgttacaaaattatttattctaatgcctacaatcaacttctttccatatttattacatcttctaaagtccttgacataagatttacttgaatatataattaatgtataaccggggtgtggcgcagatgggagcgcgcgtggtttgggaccatgaggtcgcaggttcaatccctgtcaccccgaccaaatatattattagactattataacttaaggattgatccttaagtttttttatttagtaatttattaatctatcagatatatcgtcttactaattcttctaattcttattcgtgtctaatgcttcaattataatatttattgacactaaggtgcatctataaaagattaagtttggcactaagctatatcaatatttattcgtttatataaataacaattatttggaggtgtaaaatgctaggtaatataaaaggtgtaattttcgatttagatggaactattgtagattccatgtgggtatggtctcagatcgacatagattatcttaaaaagaaaggacatgctgtacctaatgacttaaaaaacgatattgaacacttaagtttttatcagacagcagtatattttaaaaatagatttaaaattgaagattcagtggatgaaatacttaatgattggcatcatgcagcatttcatcattacgctaataatgtaaaactcaaatcaggtgtaaaagcttttttaagatatttaaaagataataaaataaaaattgcattagcgactagcaattctattccactgcttgaggcttgtttaaaaaacaatggggtttatgactattttgattcaatcactattactgatgaagtcgctaaaggaaaagattgtcctgacatatatttattagcagcaaaaaagttaaatattaaacctgaaaactgtttagtatttgaggatatactccctgctatgaaaagtgcaagaaacgcaaatatgagtgtaatcggaataaaagatgatttatgtttaggacctatatctgaaatccttaagtattgtgataaatatatttcttccttcactgagcttttatagatattagttattataaatatttgttttatcgctcacatacaaataattaggttactaaaaataattcagcattctaaaatgcaaattcaagacaagctttttctcatgctgttaatttatagatctgtaatataaggacagcttaattcatttttataacataaaatcatatttcaatattgtattatattttaaaataaaaaaataaaggtaatgcatccatcattacctttatttttgaaactatactactattaaattgaaatttctattttctttcaactccgtatttagcttctaattccttcaatatttgatcatattttttatgttgattttctttaattaaattatctaatacactgtctttaacttcttcaaaacttttgattgaagcttcattttttgcgtctactaacactaaatgatacccaaattgagttttaaccggttcagtaacctttcctatttctgatgtaaaagcagcttcttcaaattctggaaccatcataccttttgagaattcacctaaatttccaccttgttgattagatgggcatgttgaatatttcattgcagcatctccgaatgaaatcttaccgcttaagatttcttctcttgccttatttgcttcctcttcagtttctactagaatatgtctagctgaaactgttgcaggttgaccaaaagcttccttattatcttcatagtatttctttacttcttcatctgttattgttacatcactcaatactttatttattgccattgaagttataacttcctttgatatattttccatggcgtctttatattcttgagttttatctaattgtatttcttttccaaacttattcattaattcaaatgaaatcaactgttctaccaattgtttcttcttttcttcgctttgtaaagctcctctttgctcttgtggatatctactaattattgcatttaaatctttttctgttatttcatatcctgctgcaacagctaacactttattttccatgtgaattctcctttataatcattttatattatttttaacagtttgttatatacacttcattttaacagtatctactacttctaacaataatataactaaataaattttagatttttaatcaaaaatacatagtatacataaaaccaccataaaatgttatactaatttaggggtgatttaatgtccgatatattaaaaaatgattggaaaaattatttgcagtctgaattccaaaaagattattatattaatctaagaaaatttttaataaatgaatataactctaagaccatttatcctaatatgtatgatctatttaacgccttacattttacaccttatgataaagttaaagttgttatattaggtcaagatccttatcatggacctggccaagcgcatggattgagtttttctgttaatccaggtgtaaaaactccaccatctttaattaatatctataaggaactacatactgatttaggttgctatattccaaacaatggctatttaagaaagtgggctgatcaaggagtcttattgctaaatacggtacttacagttagagctggagaagctaattcccacaaaaataaaggatgggaagaattcacaaatgaggttattaaggtgctaaacaaaaaggaaacacctatagtattcatactttggggtaataatgctatttcaaaaactgactttattactaatcctaagcatcttataataaaatccgttcatcctagtccattatctgcatcaagaggcttcttcggaagtaagcctttttcaaaaacaaacaattttctaatttctacaaatcaagaaccaattgactggcaaatcgaaaatatataattatttaatttactttccaatgcttacattcaaattaagcatttcttttataaagtaaattaaatgtttaaatatagttttgctaaacattgtgcatatgctggtgtataattgattatacactaattttaaggaggttgttttgtgggttataaatttgtttatgagaataaagaatacgtactaacagataataattgcgatgggatattttttgaaggcgaaaatgagattacaggtctttccttagatataatattgaatgctctaactgaaggagaagaagtaagtttttcaacagaatattatggtgataaatgtacatgtaatactcaagagcaaataaataaatcttatcgttacttagagtaccacttttacatatatacaaaggataatgaatatgtaataaatactatatgtaatgaatataaaaatacatcttttaataaactttttggtttaggaaaaattgatgatagctatatagttagtgtgactgtatgtcctaactgcggtgtctactcaatatatatagatcaatgtactgtttaaggaatttctatataacttctttacaaatagttaagattaaaaaagataacatttagaaatataatttaaatgttatctttttaacaaatataatttattttttattgctttaaaatagtaaactaagttaattaaaccattaaaaaaattgtatacaaattttactgaattataattttctaaagatatagaaaaaagcactaacttatgttagtgcttttatggtggctcgaactggaatcgaaccagtgacacgaggattttcagtcctctgctctaccgactgagctatcgagccatattacctggcaacgtcttactcttccacacagtctcccatgcagtaccatcagcgctgtagaccttaactttcctgttcggaatgggaaggagtgttacctctacgccgtcatcaccagatacaagtagtattatatcgagttatttatattatgtcaacacattttttatttttttattataaatattttaaaatgtttaatttatcagggcttatattttatttttctaatcaattgtgcaataattaaatatacatgataatgtgtttttaatacttaaaataaattctaatttggaggtttttctatgagcattgaaaagttatcagaaatattaaagaatagtagtaatatagtctttttcggcggagctggtatcagtacggaatctaatatacctgactttagaagttcaaatggcctgtttagcgagaaattaaatgctacattaactcctgaacagttagtatcacatactttttatattagatatcctgaagaattttttaaattttataaagcaaaacttatatacccagatgctaaaccaaatgctggacacttagcattagccaaacttgaagaaatgggaaaattaaaagctatcgttacacaaaatatagacggactccatcaaatggctggaagcaaaaatgtattcgaacttcacggatctattcatcgaaattattgtgttaaatgtcacgaatcttatgatgtgaattttatcctacaatctaagggagttcctatttgcactaaatgtggtggggctgttaaacccaatgtagttctttatgaagagggtctagacgataaagtaattagagactctataactgcaatttctaatgcagacactcttattataggtggaacttcacttgttgtttatcctgctgctggacttattaattactttaaaggaaagaatcttgtattaataaataaaagttctacctctgctgattccaaggctaatttggttattaacgattccttcggcaaaacattaagtgaggctataaaagaattataaattttttatctaaattatgtataaataaatttaatttggcaataaataataatgaagtatttaacttcaatatttaatcgcctctcccccatttttatttatatacaatttgtaaagccataatatattacttcgtttgaaatatattatggcatttttattttgcataatttatttaataagaattcttcttagcatatctaatcctgtaattgtagcctgaagccttactttgtttctatctcccttaaacaaacatttttgtatggttacttttccctgaacatacacacctataaaaaccaatccaacaggtttttctaaagtaccaccttctggtcctgcaattcctgttgttacaatgctaacatcagtattagctgtctttgcaataccaattgccatttctcttgcggtttcttcacttacagctccatatttgtttaaaatatcattattaacacctagtctattatgcttagcctcattagaatatgttacagcgccttctaaaaaaacttccgatatacctggataattaataagatggcttgctatcatgccaccagtacaagattctgctgtagatattgttagtttcttctctatcaaaagcctagctacaacttcttctatgttaatatcctcagttgcataaacattatccccaagtctgttcttaatttcttcctcaattggttctatcaattttagtgcttcatctttagtctcagcctttgctgttatacgaagcattactcctacatcttttgcatagggcgcaattgtaggattggtttgagcatctattaaatccttaatctcttctgcaacagcactttcccctattccaagtatcttaacaactcttgaaaccaatattgactctgatttctcttgaagatatggtttaacagattcttcaaacattggtttcatttcctttggcggtccaggtaaaatgatcattatcttattatcatcttctattataactcctggtgctgttccattattattatttataacagttgctccttctggaattaacccttgctttaaattattttgagtcattgctctttctctaaatttaaaataatttcttatttttttagtggaattttcatcctcaatcaattctttattaaaatatttagccgcaacttcttttgtaatatcatcatcagttggtccaagtcctcctgtagttattatgatatcacttctgctatatgcctcatcaaatgcatgcataattcttatttcattatctcctactacttgctgataatacatatctattccaagagctgctaactcctgagctaaatattgggcatttgaattaattatatcgcctaataaaatttctgttcctatggctataatctctgctttcatcttattaccttcttcttatttaatttgcaagtccacaataatattattaattagaaattatactactaaactgttactcattacaataatctctttttatatcataattaaagattgaaacctatccaacaatctattgaataggtttcatataaaatatactcttttataatacgctatctctaagtatatctagagatagcttatataaaaaattttttcatcccaatctattataggtaaatactttaaatatcaaaataaaagtctccctaattaagtaattaacctagaataaacttagtaatatgtatgagaagaaaaaatttattgcaaagagagctttttgttctaattttatgtgaaatttttaatatttattcacatctatctgtaattctattataaaagtctattctaaatgcttcaaagttctaggattaagctaaaaatccacactactttacttgattcattctttgcattacttatcttctgtttcaagcaatgctaatgctaccgcaccaattactcctgcatctgtacctaatcctgctggaacaatcttaactgattctgccatagatttaaaacatctcttatcaacaacttttcttactgtatcaaaaacaatatctccagcttttgatacaccaccgcctattattataatttctggatcaaatatagatactgcattagctacagctattcctaaataattcagtgcattattaattatatccacacaaactggatctcctgcagccgcctctgtaaacacctcatatgaagtaatagtatcatactttcttaatgaagtttcaactttgctagctaatgcttcctgccctctttttgcaattgcagttcctgatgatgttgcttctacacatcctatatttccacaattacatcttggtccatctggtgctactgtcatatgtccaatttctaatgcatttgaagtgtgccctctatatacctttccatttaagacagcaccgccacctactccagtgcttactgtgaagaatactacatctttagcgcctttccctgcaccaaacatatattccccaatagctgcaacgtttgcatcattatctaaaaatacaggaacttcaaactttttattcaaaggttccactaaattaaaattcttaaatggaaggtttggtgtatagattatagttcctttttcagcatctaaaggtccaggggaaccgataccaattccttttatatctttataagttactgatccatctttaattactttttcaacagattctataattctatttaatactggaatttctccctcgcttgcatttgtaggaactgttgtttgacataacacttctccatttaaattagataatgcagtacttatcttagttccccctaaatctactcctataacatatttttgcataatataactctcctttattttatttaatataccaataaaaaacaatttgctaatacatattatactatattatgctattccaataaaacctgtattttaaataatattttttcaagatcctttattggcgcttatgtaatagttcccaaaatcgtcatattgtgtataattgatattgaatttgttatcttgaagcatagaattaattaattctatatcatccttattatttctatctatccttattacaaaattatcatctttgtctattatatttaaatagtcaaatatattactataatcactcaactctatatttccattaatatccatgctataatctgacattgtacaggcctccttgttcaaattgtataaaatatactattactaaaatattatgtctttctgcacatgattttatcctatatatattaatgtaaaatttaccttattccttaattatagtaatttttattttatttctctttattaagcccataaataaaaagtaccctttatgtaatacctacactagagtactctttattcctattccttaaattttagctataactttccgtaatcttattttcttaattcattaatgctctctatggctttcgctacctctatctctggaacttcttcatatcttacaaattcttttgtaaatactcctcttccttgagttaaagatctcaattcagtagcatattttctaatttcggcaagcggaatttctgatataaccttttgcttgtccccttctggctccattccgattactcttcccctctttttatttatatcagctatcacatctcccatatattcatttggtaatataacttctactttcattataggttccaatagaataggtttagcttgctctaatccctttttataagctatagaagctgcaaccttaaaagccatttcagaagaatctacagagtggtatgatccatcatgaagagtcgctttaagacctataactgggcatcctgctaaaacaccatgagttatacactctcttaatcctttttctactgctggaataaaatttcttgggactgcgccaccaacaacgttatcaataaattctaattcttcctctccatctgctctacgttcaaatttaattactacatctccatactgtccatgtccaccagactgctttttatgttttccttgtacatctgaaaatccctttatagtttctttataaggtacctttggtaaacttaatactgcttctacaccaaatttactttttattttacttgcgattacattaatatgtgtttctcctagtcctgagattacaatttctgcgttttctacatctctatcaatttgaaaaacaggatcttcatcttttaacttggccaaggcttgagatatcttttcctcatcccctttagcttgagggattacagccattgagaaaactgttttaggaaaattcattttgtcatatattactttaaaatcagaactagctaaagtatcgcctgtatttgtatactgtaacttagaaatagcacctatgtcaccagctattattcttttagctggtatttgtgtcttacctctaataaaacatatatgggataacttttcattcttatctttattaacatttaatactgtcatatcatctttcgcttcacctgtaataactctaaaaaatgatatcctgcctacaaatggatctgcaatagttttaaatattaatgcagaaaaaggcttatcttgattgagattaacaaaaacctcttcatcttttaaaacgtctacagctttttgtggaatagcatattctggcgatggaaaacattctacaatatcatcaattaaagaatccattccaataacttttgtagcacttccacacataacaggggcaatatctccactagcacatccacttataaggcccttatatatttcctcatcactcaattcgccttcactaaaatatttatcaagcaatacttcatcagtctcagctacagcttccataatcatcttcttacaattttcaacttcatcctggagctcttcaggtatatccagtatttttatttccttggtctttacatcgtatactcttgcttgtttggatattatatttattacccctttaaaattgtcttcttctcctataggatactgaataggcaccacgctgatgccaaatttttctttaagagatgctaatactttattaaaatccgagttctctctatctaatttatttataaaaaatgttctaggcaatttaattttgttacaatattcccaggctctttcagttcccgccttgacacctgaaactccgcttacaactatcatacctacatccacggctctcattccttcgatacattcaccttgaaagtctgcatatccaggaatatctataagatttattttaacattatctaattcaattggtgctactgaaagagcaatagaaaattgtctcttcttttcttcagtatcaaaatctaaaaccgtagtcccatcctcaatattccctaatctatctgtaatttttgaataatacagaaggctttccgctaaggaagtctttccagttccattatgccccattaatcctacatttcttaaatttttaatactataatctttcataatgctgccaaacccttaatctaccctagagattggctcccacctgcctttcacttaataatgctatatgttatatttctatttctattcgttaaatcctccttattttcttaattttctgaaaatttatatttatcctatttttgaagtagccctttaaattaatttgatgttttcttgtagtattaaccaaaaaacattataattttatctgttaatatctttataatcatgtttattactttaaatctatctttgtggaggaaaatttaatgaaagcaaaaaagaatttaagaaacttctatatgttttggtttgctttacttgcaatttctataactatcggagtcctatttataaaaccccaagtgggtgttgctgaccaaggtgatttctatagaattatgaatatatctggtctgtcattattagactcagatacgaacaatcctaactctgtaggatattacaactttattgtgactgattataagattacccctttaaacaatactgattctaaaagcatctggaattgtagtttgagctatataataatacttgttaattatatatgcaaatcacttgatcataatatatttaaaactcaatatttagctgtcatctatagtattatatatattctttcatttatcataatattaaaatctttgaatataaaaaataatattaaatctatgattgttgtactaataaccgcattcattttctttgatggcaattatttaatttggtttaatagcctatatggagaaccaatgatgataactacactatcattgcttgttgcatccattcttaactatattcaatacaaatacgtagtaaagggaacggaaaaattaatgtcgaaaatactttatatattattttcagcatttttatttttaggttctaaattacaagttattacttctttacctattattataatccttgtatgtaaaatattattggataatagatataatctaaataaaatcagtttagctattttatatgttattacatgcttattgataatctaccctattcgcatcaatatgaatagcaacaacttaagtaaagacacccagtataactcagtcttttatggagtattaaacgaatctactactccagagcaagacttggtagatttaggcttagatcctgatttatcagctgaggctgggaaacatgcttatttggattccgatgaatatgtcaaatatattcctggttcagaaataactgatgaaaaattctacagtaaaataaataactttaaacttgcaaaattctatttaactcaccctactcgtttattaaatggcatgaaatataccgcaagtaaggcattttatactagtactggactaggtaagtactcaaaagctgatagttcaaccccagttagggatttccatcgtttcactctttggtcatctataagggaaaaaatattacctagaaatttatattttataggattaatttatattattgttctgttatgctcactgtataaatatattcgaaatagttctaatcctgaaataaagaacaaaattttcttgctttggactgttatatttataggtatgcttcaatttccaatgccttttgtaggcaatggaaaggctgataccgcgaaacaattatttttgttcaacttcacttttgatggattattaatacttattcttatttatattctatttaaagtaaatgatctatttaaaataaaatttaattcatctcataaataggtttaataagtaattttagagtaattgtaattttgtttaccctaattaaaccaatgtctatatttgtttctcactaacttatatttatgtttgcatcacatatttaatttctgttatagaaaatgaaggctaagtacacaatgcctaatttgcattatatacttagccttcacaatttttattccttattttcataccttaatataattaactcatttatattattttaaaatttgaataattaatttggttttaatcttaaattactatatctcaattattcaaattatcttttatttatcttcattaaacttggcaactatatgcattctaaatagattaatcaatattagtgtaatccccccaaccgtatctattataacatctctaaaagcaccttctcttcctaaaacaaataattgatgtatttcatcagaacaagcgtaaaaaaatacaaaaactactgtcaaaaaaataactcttctgatgttaaaatacaatctaaacacattaaatgctagtaatgataataccatatattcaagaaaatgtgcacattttctaactataaaattagtaaactgcccaaagattccattcatattgatacctatagcagaaagaatatttattacgccttcactttgagaatcagatatttgggcaggttgattagacataataaatatccctatcatccaaactattaataaaaaccagtaaataattttccttttgttattcatacgccatcctctttaagtacaattttaaaattcacagatattatattactcagacatatatctatttatataagcaagtgattcttctaataattcttgccccttttccaaaccatctattttcatctctaaactacagattctttgatcaatttgatacataaactgctttatatcttgtagcaactttgcttcataagtaacttgtacaccttcatcatcaatgtatattttttctggtggagcaccacacttagaacacttagcatatattccttgtttatccaaattattaaataccttaaatgtatcgttattacactctgcacaatttgataacattataaattcataataactcacatcataataataagtacttccacagtctttacagactaatttaagtttattatcttctgttgatatatgaaattcattaccgctacatccatcttttttgcagacaatagttcttaccataatcctacccctcgcaatataatttttatacaataaataaaaatactaaattacatttttacatatattttacatataaattatatattataattcattcattgtatactttaacaattagtatttttagcctattttatactgttgttctactattttctgcatcatataactcatgctagtaataaatattgttgttaaataatatttataataaaaaaataaaaaaactatgaataaaattcatagtttttaatggtggagataaagagattcgaactcttgaccccctgcgtgcaaggcaggtgctctcccaactgagctatacccccatggtggaccttcagggactcgaaccctagacctaccggttatgagccggttgctctaaccaactgagctaaagatccttaagttaaatttctttaacttaactcttgtaatctacaagattacctcgcaacgtcctactctgccacacagtctcccatgcagtaccatcggcgctatagaccttaactttcctgttcggaatgggaaggagtgttacctctatgccatcatcacgagatgctagttcattccaaatctttaatttggcttcatgaactgtactcctcaacttcgttgagcgagtttcctttttgaaaaaactttgttctttcaaaattgcacacagtttctttaatgtatttacaacttatgctattggtcaagccctcgacctattagtatcagtcagctaaatacgttgccgcacttacacctctgacctatcaaccttgtagtcttcaaggggtcttactagcttatgctatgggaaatctcatcttgaggtgggcttcacacttagatgctttcagcgtttatcccttcccgacttagctacccagctatgcttctggcgaaacaactggtacaccataggtcagtccatcccggtcctctcgtactaaggacagctcctctcaaatttcctacgcccgcgacggatagggaccgaactgtctcacgacgttctgaacccagctcgcgtgccgctttaatgggcgaacagcccaacccttgggacctacttcagccccaggatgcgacgagccgacatcgaggtgccaaacctccccgtcgatgtgaactcttgggggagatcagcctgttatccccgaggtagcttttatccgttgagcgatggccctcccacgaggtaccaccggatcactaagcccgactttcgtccctgctccacttgtaggtgtcgcagtcaggctcccttctgcctttacactcttcgaacgatttccgaccgttctgagggaacctttgggcgcctccgttacattttaggaggcgaccgccccagtcaaactgcccacctaacaatgtcctgtcaccagtttcatggcatccagttagaacttcaatactatcagggtggtatcccaacaacgactccaccaaggctgacgccctagtttcccagtctcccacctatcctgtacagacaataccgaaattcaatgctaagctacagtaaagctctacggggtctttccgtccaatcgcgggtagcgagcatcttcactcgcactacaacttcgccggatttgcagttgagacagtgcacaagtcattacgccattcgtgcgggtcagaacttacctgacaaggaatttcgctaccttaggaccgttatagttacggccgccgtttactggggcttaagttcacaccttcgcgatatttcgctaagtgttccccttaaccttccagcaccgggcaggcgtcagcccctatacatcagctttcgctttagcagagacctgtgtttttgttaaacagttgcttgtgcctattctctgcggcctgatttctcaggcaccccttctcccgaagttacggggtcaatttgcctagttccttaactgcaattcttccgtcggccttaggattctctcctcatctacctgtgtcggtttgcggtacgggcactacttctctctctagatgcttttcttggaagcatggaatcagatacttcggttccgtagaaccttccccatcacgcctcagaattgttggaacggatttgccaatcccaactccctaaacgcttagactagcatccaatagctagcacatcctatccttctccgtcacaccatcgataataacgattatagtggtattggaatatcaaccaattgtccatcgactacgcctttcggcctcgccttaggtcccgactaaccctgagaagacaaactttactcaggaaaccttagatattcggcctgtaggattctcgcctacatctcgctactaatgccaacattctcactcgtaatcagtccaccgctccttacggtacgacttcagcccgattacgacgctcctctaccgctcacgcataaacgtgaacccgtagcttcggtggtaagtttgagccccggacattttcggcgcaggatctcttgactagtgagctattacgcactcttttaatgagtggctgcttctaagccaacatcctagttgtcttagaaatcccacatccttttccacttaacttacactttgggaccttagctgacgatctgggctgtttcccttttgaccatggaacttatctttcatagtctgactgccggactgatagtatgtggcattcggagtttgataaggttcggtaagcgctatgccccctagcctattcagtgctctacctccactactcacattttccgacgctagccctaaagctatttcgaggagaaccagctatatccgagttcgattggaatttctccgctatccacagctcatcccatgctttttcaacagcaacgtggttcggtcctccacgaggttttaccctcgcttcaacctggccatggataggtcacccggtttcgggtctacagcatgcaactagtcgccctattaagactcggtttcccttcggctccgtaccttaagtacttaacctcgctacataccgtaactcgttggctcgttctacaaaaagcacatcatcacacacataaggtgctctgatcggttgtaggcacatggtttcaggttctatttcactcccctcccggggttcttttcacctttccctcacggtactgcttcactatcggtcatcaggtagtatttagccttgggaggtggtcctccctgcttcccacaaggtttcacgtgtctcgtggtactctggtgcagaactgattatcatagttttcacttacgggactattacccactgtggtccaactttccagttgtgttcaattaactatgatttctcgttatgttctgtccgcaaccccagagataaatctctggtttgggctctttccttttcgctcgccgctactaagaaaatcgatttttctttctcttcctccaggtacttagatgtttcagttccctgggtataccttcataaagctatgtattcactttatgatacatggggtttcccatgtgagtttcctcattcggaaatcttcggatctctgactatgtgcgtctacccgaagcttatcgcagcttatcgcgtccttcatcggctcctgatgccaaggcattcaccatgcgccctttgtagcttgacctaattattagtcatatcacaaagaatatttattcttggctttgttgtattttatatatacattaaatctatgtgcaattttcaaagaacatctgcttgcttattatcgccaattgcttcgtcagcttcaaattttactcatttacgtacgtaaagtacgcttcatttcataaaatttttgctttctcgcacttgtcgctactaagctacgcattttgaaagacttagtctttcaaaattgaacagaacaaatacttaagtaacctttgagcaagtattttatattttgatacataataatgtatctgtactagccaaacatcatgttggtctagatttctccatagaaaggaggtgatccagccgcaggttctcctacggctaccttgttacgacttcaccccaatcgctgaccctaccttaggtcgctgcctcgcttgcgcgttagctcacgaactttgggtattgccaactctcatggtgtgacgggcggtgtgtacaaggcccgggaacgtattcaccgcgacattctgattcgcgattactagcaactccagcttcatgtaggcgagtttcagcctacaatccgaactgagactggttttaaagtttggctccacctcacggtttagcatctctctgtaccagccattgtagcacgtgtgtagccctagacataaggggcatgatgatttgacgtcatccccaccttcctcccggttaacccgggcagtctcgctagagtgctcaactaaatggtagcaactaacaataagggttgcgctcgttgcgggacttaacccaacatctcacgacacgagctgacgacaaccatgcaccacctgtcttcctgccccgaagggcttccccgattaagggtaattcaggagatgtcaagtctaggtaaggttcttcgcgttgcttcgaattaaaccacatgctccgctgcttgtgcgggcccccgtcaattcctttgagttttaatcttgcgaccgtactccccaggcggaatacttaatgcgttagcggcggcacagaggtcatgacaacccctacacctagtattcatcgtttacggcgtggactaccagggtatctaatcctgtttgctccccacgctttcgagcctcagtgtcagttacagtccagaaagtcgccttcgccactggtattcttcctaatctctacgcatttcaccgctacactaggaattctactttcctctcctgcactctagatatccagtttggaatgcagcacccaggttaagcccgagtatttcacatcccacttaaatatccacctacgctccctttacgcccagtaaatccggacaacgcttgccacctacgtattaccgcggctgctggcacgtagttagccgtggcttcctcctcaggtaccgtcattatcgtccctgaagacagagctttacaatccgaagaccgtcatcactcacgcggcgttgctgcatcagggtttcccccattgtgcaatattccccactgctgcctcccgtaggagtctgggccgtgtctcagtcccaatgtggccgatcaccctctcaggtcggctacgcatcgtcgccttggtgagccgttacctcaccaactagctaatgcgacgcgggtccatctcatagcggattactcctttaattgctatgccatgcggcactacaatcttatgcggtattaatcttcctttcgaaaggctattcccctctatgaggcaggttacccacgtgttactcacccgtccgccgctaatccgttcccgaaggaacttcatcgctcgacttgcatgtgttaagcacgccgccagcgttcgtcctgagccaggatcaaactctcaataaaaagtttaatcttagcttactcaaataaaaattgctggtttacttaaatgtatttatcttattctgttcaattttcaaagaccaattttctttcctacaattctcattgtagttattaacttatgtcaccctcaagcgacttattcagtatatcatctgtcttacatactgtcaataacttttttaatttttttgaactctattagaaaaaacttttcttagttcaattgcagttatttatgtacctcagcgacgtttattatattaacatatatgataattgtcttattatattaaattatccaattaaatgactttatattcactatagtctaaaattcatatagaattctctctaatactattagtgatacactaggaatagttatattacataatataggagctttcactaactcttccttatttccactatgttcaagtacaacagcttagcgcatctgatacaaaaaaagcaaattttgcctacaaatatttttgtaaacaaaacttgctttttgtaacttatcttatatatcaatttatatcatttccaaattagttgcctattaatagtttatttattgttatatcctatcttctctagaataattaaagcggtatcttcaatagctctctctgtaacatctatagtcttgcatcctattttcctcattattttatctgcaaaatcaagctcttctaacactcttgcatctcctgcatattcaatgtcggacgtaattctatgaaacttatctaaccttcttttccttatttcaattaatctaagtggatttattgttaatccaaatactttttttctatcaatctcatatatctcatctggaactcccacttcaggcattaaaggaatgtttattgcctttacccccttattggctaaatacatacaaagtggtgtttttgaagttcttgaaagtccgatcaacactacatcagcattctttaaccccctataatctttactatcatcatattgcatagcaaattccatagcttctattctcttgaaatatacttcgtctgtttgcctcatagcacctgggttgtatgtaggatgtgtatttaatatagttgatgctacatttattattggtcctaatacattcataaccgatatatttttttccattgctttttgtgtcaaatgctcccgtacattaacagtaattatagtagatacaattattacactctcgcactcatttgcgatattcattacatcttcaacatcttctaaagattttacatatggaattcttttaacatctaccttttctgtaaattgacttgccgctgcaacagcaacttggtttgcagtttctcctatcgaatctgatactgctaaaattgttaacatatttataccttctttctcataatctcatgatactttttataccttactctttttttataaatatataccctgaccaaaactgacaatactttaattaattatgtacgtgttcctcttatctctatattaaactaaatttggtttatttaacagtagtgaatttttttttactatatgttacactttagtataacgtaatacaattacagttggaggtactcttatgaaaaataaaaaagtgttaactataagtattcttcctttgatgtgggctatatatgtcttattcgaacttattactggaagaatcaatgatcttagaacaattttatttaatatgatactaattatattatttgcactagtaggtctatttagctacataatcggaattaaatacgaacgtgggtttaagtctaatacacttgtaattctatttttctttctttttctatttgatcaaggaataaagatattaataaaactcttttggtttaataatgatttccctataatatccagcttgttatattttcgacctataattaatactgaaggttcttggctaaatgctagatttggagcatcagtgaattttccgattttaataactataaatatattggctatatttatttttattgaagtatatagatattatttatacaaaggaaacaaggatttttgggccgatatgtgctttatttttgtatgctgtggtgctacatgttcattaattgacaagattttttatggtggtagtttagattttataggaatcagtaatttattcattgctgatataaaagacttatatattaatataggaatattattctttgcccttactatgtttaacaatggataccttgcatctaatgaagattcatcagttaaggaagatattcaatcattaagaaagtttttcttatttataaaaaaggatatctcgcataagtttaaatccttctaaacagttatatggtaaattaataatgtctatgaatatttacgttaatgttatttactttataaatttgtaatctagtatgttttaaattttgataaggcaaatgaaaaaagagttttactttcagtaaaactcttttatttatataaatactaagcaagtttttcaataagattacttttaataaagtaattggtggctcacccgggaatcgaacccgggacaccatgattaaaagtcatgtgctctaccgactgagctagtgaaccatcttacctcgcaacgtcctactctgccacacagtctcccatgcagtaccatcggcgctatagaccttaactttcctgttcggaatgggaaggagtgttacctctatgccatcatcacgagattttaatcagtaattgatacaatcttcatctattactttaaatttataaaataatctttataagaactattttataatatcttgtcgaaaacttgtctcaacaagatattattatacatagtattatctattatgtcaacacttatttagaaataaaatttattttattttttcggtatattcttttattaactctatagattttttaaacttgcttaactcttcttttgtcatatgaatttccactacctctttaaccccatcagcatttaaaacagcaggtactccacaaaaaacatctttttctccatactcgccatctaataatgtagatactggcattatcctattttcatcatttattatcgcttttatgattcccacagctgctgttgctataccataatacgttgttccttttctattgtaaacttcccaacctgctctcgctgtttccagtactagtttatctaagtcaacttctcctactctatctttattgtcttttaatatctcgtagaatgactttcctccaactgtaacatgagaccatgggaccatctgtgaatctccgtgttctcccatagaatatccttgcacactacgaggatctacatttaataattctccaatgaaattttttagccttgctgaatcaactgaagtaccagtgcctataatatgactctttggcaaaccagatatcttataaacatgatatgctatcatatccactggatttgaaataacaataaagtgtcctttaaatccactcttcattattggccttacaatggattctactattttagctgataattctagtgtatctaatctagtttgcccttgcttaggcggtgcaccagctgttattactacaatatccacatctccgcattgctcgtagtttcccctgacaattcttatatttctattcaaatactcaatacaatggtttaaatccatcacttcccctagagccttttcttcgtttatatcaatcattagtatctcatcacatacaccttgagtcatcagactaaaggctgtactagaccctactaatcctgttcctataatagccactttacttttctttaaactcatatttaactccttttaagaaatttattcttacttatattattatttttattttacaatcatttattcacctataattacttatatatgcacgattaaatattatggattatattatacactatcctaaccttcttctaaaaatataaaatcagccttagtattgaatatttatctaattaataaattagcccaatcttttattcttaaatgtttataatactaaagataaattacttctttaataatttattttaaaacaaaaaaggttgttaataaaattaacaacctttgttatggtgcgtcatcagggattcgaaccctggacaccctgattaagagtcaggtgctctaccaactgagctaatcacgcaaatcttacctcgcaacgtcctactctgccacacagtcccccatgcagtaccatcggcgctatagaccttaactttcctgttcggaatgggaaggagtgttacctctatgccatcatcacgagatctttaatttgaaaaaactttgttctttcaaaattgcacacagtttctttaatgtatattacaacttgattatattggtcaagccctcgacctattagtatcagtcagctaaatatgttaccatacttacacctctgacctatcaaccttgtagtcttcaaggggtcttactagcttatgctatgggaaatctcatcttgaggtgggcttcacacttagatgctttcagcgtttatcccttcccgacttagctacccagctatgcttctggcgaaacaactggtacaccataggtcagtccatcccggtcctctcgtactaaggacagctcctctcaaatttcctacgcccgcgacggatagggaccgaactgtctcacgacgttctgaacccagctcgcgtgccgctttaatgggcgaacagcccaacccttgggacctacttcagccccaggatgcgacgagccgacatcgaggtgccaaacctccccgtcgatgtgaactcttgggggagatcagcctgttatccccgaggtagcttttatccgttgagcgatggccctcccacgaggtaccaccggatcactaagcccgactttcgtccctgctccacttgtaggtgtcgcagtcaggctcccttctgcctttacactcttcgaacgatttccgaccgttctgagggaacctttgggcgcctccgttacattttaggaggcgaccgccccagtcaaactgcccacctaacaatgtcctgtcaccagtttcatggcatccagttagaacttcaatactatcagggtggtatcccaacaacgactccaccaaggctgacgccctagtttcccagtctcccacctatcctgtacagacaataccgaaattcaatgctaagctacagtaaagctctacggggtctttccgtccaatcgcgggtagcgagcatcttcactcgcactacaacttcgccggatttgcagttgagacagtgcacaagtcattacgccattcgtgcgggtcagaacttacctgacaaggaatttcgctaccttaggaccgttatagttacggccgccgtttactggggcttaagttcacaccttcgcgttaccactaagtgttccccttaaccttccagcaccgggcaggcgtcagcccctatacatcagctttcgctttagcagagacctgtgtttttgttaaacagttgcttgtgcctattctctgcggcctgatttctcaggcaccccttctcccgaagttacggggtcaatttgcctagttccttaactgcaattcttccgtcggccttaggattctctcctcatctacctgtgtcggtttgcggtacgggcactacttctctctctagatgcttttcttggaagcatggaatcagatacttcggttccgtagaaccttccccatcacgcctcagaattgttggaacggatttgccaatcccaactccctaaacgcttagactagcatccaatagctagcacatcctatccttctccgtcacaccatcgataataacgattatagtggtattggaatatcaaccaattgtccatcgactacgcctttcggcctcgccttaggtcccgactaaccctgagaagacaaactttactcaggaaaccttagatattcggcctgtaggattctcgcctacatctcgctactaatgccaacattctcactcgtaatcagtccaccgctccttacggtacgacttcagcccgattacgacgctcctctaccgctcacgcataagcgtgaacccgtagcttcggtggtaagtttgagccccggacattttcggcgcaggatctcttgactagtgagctattacgcactcttttaatgagtggctgcttctaagccaacatcctagttgtcttagaaatcccacatccttttccacttaacttacactttgggaccttagctgacgatctgggctgtttcccttttgaccatggaacttatctttcatagtctgactgccggactgatagtatgtggcattcggagtttgataaggttcggtaagcgctatgccccctagcctattcagtgctctacctccactactcacattttccgacgctagccctaaagctatttcgaggagaaccagctatatccgagttcgattggaatttctccgctatccacagctcatcccatgctttttcaacagcaacgtggttcggtcctccacgaggttttaccctcgcttcaacctggccatggataggtcacccggtttcgggtctacagcatgcaactagtcgccctattaagactcggtttcccttcggctccgtaccttaagtacttaacctcgctacataccgtaactcgttggctcgttctacaaaaagcacatcatcacacacataaggtgctctgatcggttgtaggcacatggtttcaggttctatttcactcccctcccggggttcttttcacctttccctcacggtactgcttcactatcggtcatcaggtagtatttagccttgggaggtggtcctccctgcttcccacaaggtttcacgtgtctcgtggtactctggtgcagaactgattatcatagttttcacttacgggactattacccactgtggtccaactttccagttgtgttcaattaactatgatttctcgttatgttctgtccgcaaccccagagataaatctctggtttgggctctttccttttcgctcgccgctactaagaaaatcgatttttctttctcttcctccaggtacttagatgtttcagttccctgggtataccttcataaagctatgtattcactttatgatacatggggtttcccatgtgagtttcctcattcggaaatcttcggatctctgactatgtgcgtctacccgaagcttatcgcagcttatcgcgtccttcatcggctcctgatgccaaggcattcaccatgcgccctttgtagcttgacctaattattagtcatatcacaaagaatatttattcttggctttgttgtattttatatatacattaaatctatgtgcaattttcaaagaacatctgcttgcttattatcgccaattgcttcgtcagcttcaaattttactcatttacgtacgtaaagtacgcttcatttcataaaatttttgctttctcgcacttgtcgctactaagctacgcattttgaaagacttagtctttcaaaattgaacagaacaaatacttaagtaacctttgagcaagtattttatattttgatacataataatgtatctgtactagccaaacatcatgttggtctagatttctccatagaaaggaggtgatccagccgcaggttctcctacggctaccttgttacgacttcaccccaatcgctgaccctaccttaggtcgctgcctcgcttgcgcgttagctcacgaactttgggtattgccaactctcatggtgtgacgggcggtgtgtacaaggcccgggaacgtattcaccgcgacattctgattcgcgattactagcaactccagcttcatgtaggcgagtttcagcctacaatccgaactgagactggttttaaagtttggctccacctcacggtttagcatctctctgtaccagccattgtagcacgtgtgtagccctagacataaggggcatgatgatttgacgtcatccccaccttcctcccggttaacccgggcagtctcgctagagtgctcaactaaatggtagcaactaacaataagggttgcgctcgttgcgggacttaacccaacatctcacgacacgagctgacgacaaccatgcaccacctgtcttcctgccccgaagggcttccccgattaagggtaattcaggagatgtcaagtctaggtaaggttcttcgcgttgcttcgaattaaaccacatgctccgctgcttgtgcgggcccccgtcaattcctttgagttttaatcttgcgaccgtactccccaggcggaatacttaatgcgttagcggcggcacagaggtcatgacaacccctacacctagtattcatcgtttacggcgtggactaccagggtatctaatcctgtttgctccccacgctttcgagcctcagtgtcagttacagtccagaaagtcgccttcgccactggtattcttcctaatctctacgcatttcaccgctacactaggaattctactttcctctcctgcactctagatatccagtttggaatgcagcacccaggttaagcccgagtatttcacatcccacttaaatatccacctacgctccctttacgcccagtaaatccggacaacgcttgccacctacgtattaccgcggctgctggcacgtagttagccgtggcttcctcctcaggtaccgtcattatcgtccctgaagacagagctttacaatccgaagaccgtcatcactcacgcggcgttgctgcatcagggtttcccccattgtgcaatattccccactgctgcctcccgtaggagtctgggccgtgtctcagtcccaatgtggccgatcaccctctcaggtcggctacgcatcgtcgccttggtgagccgttacctcaccaactagctaatgcgacgcgggtccatctcatagcggattactcctttaattgctatgccatgcggcactacaatcttatgcggtattaatcttcctttcgaaaggctattcccctctatgaggcaggttacccacgtgttactcacccgtccgccgctaatccgttcccgaaggaacttcatcgctcgacttgcatgtgttaagcacgccgccagcgttcgtcctgagccaggatcaaactctcaataaaaagtttaatcttagcttactcaaataaaaattgctggtttacttaaatgtatttatcttattctgttcaattttcaaagaccaattttctttcctacaattctcattgtagttattaatttacgtcacccttaagcgactcatttagtatatcacttattttctattatgtcaacaacctttttcaaaatctttaaaatcatatttaaaatacaatctgtgatttatcattaagttatttgcatatctcagcgacgttttttatcttaacacgttctcgttatgctgtcaacatatttgttaaaatattatgtgatgcgcatactattatccccttattacaaatttacaatgaggttatactatttaatacttataataaattccagattaaatttaatttctaaatttctctaagactaacagtactgtgtcactatatcatgtttatactataaatttatacttctattagttccataaataaaatagtactccataatgtataaagtttttaacatacattatctatcacataatagacatattaaagttgtattgatatgaataaagtaagcatcataaaattatactttgctatcattgtttcttagttgcttattactatatcgttcaaattttgcatttaattttcctaatataaataataccaacttaatgaatcgcaaatctaattccctgatgcttacctaattaatattttataataatataattcttcaatttttaaaaatattattttctatatatatttacttagtaatactactttttttctttataaccaaaggatacataactgatccaataagggtctcaccacttcttatctcgctacctttatctgcaattacattatccaatactgcatcgtcaccaattctgctattttgcattattatacaatcttttaattttgtattttttcctatatatactcttctgcctattatgcaattttcaactgttccttctattctacaaccatttgctattattgagtttataacactacttgtatctgcatagtgagttggagcttcatctttagtttttgtatagataggtctttcatcattaaaaatttctttatttacttttctatttaaaaatcccacattactatcatataatgccttaattgaatttatacaatctaaatgtcctttgaattcgtaagcacttgctgttaacgtatttaaattattatgaatatactcttttacctttcgatacattccactacttacacattcatttacaatatttataaataattcagtttttaatatatacatctccatattgatatttgacttctggctttttcctatattttctcctacacttataacgcttcctgaatcgtcaaagtttaatacgccgcaatcaccaaaggcttcatctgcattgtttaccttcttatataccattgtaatatctttacctgtgctcttatggtattccaaaacttcattgtaatctatattacaaatcatgtagcttggtgctaataatacatattctcttctactatgtgttaaaaattgtatattttcagcgaaattatggacatcatcataaacaggctcgtcatttccaaagttaaaaacttttaatccatctttttttctatttaagtcccatggccttccatttgtcaaatggtctattagagaccttgacttattctttgtaaatattcctatacaattaatccctgagttagtcatattcgacaaaataaaatctatgattctatatcttgctgcaataggaactgaagcaagagatctattaactactaattcacccattctgttttcattttcatctaagttgattataccaatacaatttttcatttctttctcccccttagtgatatcgctaaactgctttattattttctataactgtacccatttttacttcttcttttgctgcaataatagctatttcatcacctaaagaaattttacagtcttttctaactattgctccacttccaacaattgctttttcaataactacattatcacctattttagcatccgtcataattattgaatctcgaacaactgagttttttcctatttgaactccttgaaataatattgagttttccacttgtccattaacaacacaaccttcaacaactaatgaattagatacttttgcattctcgcctatatattgtgccggccttactggattgactgaatatatcttccattcctcatcatgtaaatcaagttcattatcttctcttatcaaatccatatttgcttcccataggctatctatagtaccaacatctttccaatatcctttaaatggatacgccaccatcttatttccattgctaagcatacttggaattatattcattccgaagtcgttttttgaggtcttgtctgactcatcctctcttaaatatttttttagagttttccaattgaaaatatatatccccatcgatgctaaattgtttttaggatttttgggtttttcttcaaactcatatattgataaatcttcccttgtattcattattccaaaacgtgatgcttcatccattggcacttcaataacggctatagtagcctctgcttgtttttctttatgaaaatctagcatctttgtgtaatccatcttatatatatgatctccagataaaattaaaatatattctggatcgtatctatcaacaaattctatattttgataaattgcatttgcagtacctttataccattctccgcctttttcttcttggtatggtggtaatacatgtactcccccatgagctctatctaaatcccatgcttcccctatgccaatatgtgcatttaattctagcggtttatactgcgttaatactcctactgtatatattcctgaattcgaacaattgcttaatggaaaatctataattctatattttcctccaaacggtactgctggtttagctaatttttttgttaatacccctaacctcgatccttgtccaccagccaatatcattgccacaatttcatttttacccataatattatctcctctcatatgtgtttgttctcattagataaattttatattatatgctcctatcttcaaaaaaatgattattattatatttttatttaagtgaacttgcagaagcatattatatttttaataattattttgtaatatgattacccctagaatttataattatagttttgcatacaatatattatacattcattttccattaaattccatataagcatatatcaaaatatttgtcaattttttattatataatcaaactcaatgaactagatcctacgcaatatttttaaatcatatggaaagatagttataaagctatcacttcctataaacttatatttttcactaatatcaagtaaattcacataatctccacttaagttaatttctttaactaatttagtttcgcttgaaacatttactaatactattacgctctcattttcatattttctctcaaacgcaaatacatctggatcagtttcaaagatacttaactcccctttttttaaaccatcttcattatttcttattttaattattttatggtagaaatcaacaagcattttgttctctttcccccatggatagcttttcctgttatcaggctctcttccaccttttacacctgcttcatctccatagtatattagtggtactcctggcaaagtaaattgaattactataagtaattttaacagtgatatattttcatccagaacagttaaaattctttccgtatcatttgtacctataatatttagatttccataaaaactttctcttggataattctcgtacaatgacataatttttttctttaacttatctgactttatatatcccttgataaaattaattaaactttctcttaaaggataattagttgctgcttgcacttcattcccttgtaaatattttcgttttcttgaataacttatcttattagatgcgtcttcccatatatcacctaaaagtacagtatccttatttatttctccgattttctttcttattaattctataaattcatctggaagctcatctgtcacatttaaaaaccatccgttaactcccatatctgtccacttatttataatagaattatctccgcttataatatagtcaacatattctttttgcatcgagttaacattcggtctatcatccattccccaccaagattcatacctatatggatatgtaataaatttataccaatcataaaatctagaatttggcgaattatacgctccaacatcgtcgtaatttcctagtttattaaaatatttactatcagagcttgtatagctcagtacaatatctagaataattttaattcctttactatttgccactttacataattctctaaattcaccatttgtgccgaacatttcatccacaatttcatagtccgctgtatcatatttatggcaactaggggatttaaatattgggcttaactttattatattagcacccaattcctttatataatctaatttctttattatcccctttagatttcctccataaaaatcccacctagcaatttttccaaaactatctctaatatacataggactatcatcccatcttccgtatataaatgagttttcttttgtattacctataattttattttcatttccattgtaaaatctatctattagaatatggtatattacaccttctttataccagcttggtatgaatgacttttcatatacagttatttgatatggcacaggattataagtatatatttggccaactcctcccaaatgattgtcattatttccataatatactctgtcatacccatctattaaaataaaatagtattctaatatccccaaagcatcagatgtatcaatttctacagaatatttaaattcaccattatttaaatattccttgttcattcccatattcattttagttccattgaattttatcaattcgattgctacaattatgtctttattaatattaatagatatcttaaccttttgaccagcctctacagctccaaatggccttctaaatcttatgctttgagagtcatgtaatacctgtatatcattcattcagttaatcctcctatagattcttatagattacctctgatccccaaatacctgttgcatattcttctattgttctgtcagatgagaatatccctgaatgtgcaatattaattccacacattctttgccacttattagcattcctataaagagtatcaatcttatcttgagcttttaaatatgagtcaaaatcttgtaaaacaaaaaactcatcattataatttattagattttcatatatacttctaaatttatttttatcactatgatattttccgtttattaaatcatcaattaccctttttactctaatatcattgttgtatatatcaatagatttatatcctccatttttgtaataattcaatacttcatctgcagttaatccaaatatcactatattatcatctgtaacttcatcttttatttcaatatttgccccatctaatgttgctactgtaatagctccgttcatcataaatttcatatttgatgttcctgaagcttcttttgttgttgttgatatctgctcacttacatctgttcccgggattatttgttcagctagcgaaactctatagttttgaataaagacaacttttatcttttcatttactctagaatcattatttattttgtttgcaacacaatttattaattcaatagtatttttagctaaatagtagcctggtgcagcttttccaccaaagatgaatgtccttggaactatatcgtaattaggatcatcaattaatttattatataaatccattattcttagacaattaagtacttgcctcttataagcatgtattctttttacctgaacatcaaatatagaatcaggatctactcttacattatcattctttaagattatacttgctagcttttctttgttaaattttttaatttttcctaactgttctagaatcacttcatcatacaaatgcctctcaaagttctttagatcaagtggatgtcttataaagctatctccaattgtatctttaattagttttgtaagctctggattactttttaaaagccatcttctatgagtaattccattagttttattattaaatttatttggataaagataatagaagtctgtcatctcttttttcttcaatatttctgtatgaagttttgctaccccatttacactatgactgcctacaatcgctagatgtgccatcttgacttgctcatcagctattatcgccattcttctaactttttcaaggttgcctggatatttagttaaaagttctgcacaatatcttttattaatttcttcaacaatcatatatattcttggaagcaatttttgaaacatgtctattggccatttttccaaagcttctgccaaaattgtatgattagtgtacgatattgtattagttgttattctccaagccgtatcccattctaacccttcttcatccaataatattctcataagttctggtatcgcaagtgtaggatgagtatcatttatatgaatcgctactttttcatctagtaacaatatatcttttccatgttttttacagtgccttacaatgctttgaactcctgctgaaacaaagaaatattgctgctttagtcttaacattttaccttcataaaatgaatcttctggatacagcacttgcgaaattgattcaacagaatttttatacttaattgcttggagaaaatcacctctactaaatgatgaaaaatcaaactcgtttgaaaccgcctctgcactccataatctaagagtatttacaatttcattttcgtaccctacaattggagtatcatatgggactgccaatacaggctcataatttatatgcataaagcttaagcgtccatttatttcgcttacttttacctctccaccaaacttaacaatttctgctttttctgctttcctcttctcccagacatttcctagctttaaccaatcatcagatacctcaacttgttttccgtctataattttttgctgaaaaaatccatatttatatctaatcccacacccgtttcctggaatatttaaagatgccattgaatccaagaagcatgctgcaagtcttcctaatccaccattacctagtccttggtcttgctccaagttttccaactcttctaaatttatatttaaatctgataacgcttctttacatatatctcttatgcctatatttaataaagcatcaccaagtaaccgtcccagtaaaaattccatagaaaaataataaacttgcttctccccagtcttattatattttttatttgttttaagccaagttcttgtaacataatcccttactaaacttcccaaagcatcatacttttgttgattagttccttcttttaactcaataccatgcatttctaaaaacttatttacataagcttttttaaatgtttttttatccatttcaagcattgatatccccccctcataacattatgtcctaatcttaatcttgtcctgttaattctctatataaatctaaatatatttgagctgacctattccagctattatcagaattcattgcattttcgattagattttcccacttacccttatccttatatatccataacgcgtattttattatattgtataactcatctgaattgtaatttctaaaactaaacccattaccttctccagtatattcattatatgcaattattgtatccttaagtcccccagtttccctaactataggaatagaaccatatctaagtgctattaattgtcctaatccacatggctcaaaaagtgaaggcattaaaaacatatcgcatgctgcataaatcttatttgctaacccattatcaaatttaatatttgcagataccttatttccatacctagaatctagccatttgaaatgttcctcataatgcttatctccagttcctaaaataactagttgaacattttcttgtagcagtttatccgaaatatttactagtagatccattcccttttgacttgtcaatctagttaccatagctagcattggtatatttttatcaacagttagccctaactctttttgtaactcagttttatttattgctttatcttcaacagagtttatactatagttctttttaataaatctatctgtcttaggattaaattcatcataatctataccatttgttattcctcttaatgcataggatctatctcttaatactccatccaatctttgaccatactcaggtgtttgtatttcgtatgcataagtattactaacagttgtaataacatctgaatagtataatccacccttcatataacttacaccatcgtcaaattttaagcatgtgttattataaagttccatatcaaatccaaataactccggcaatatttgaggatcaaatactccttgaaatgctatattatgaattgaatatacgcatttcatcttccaatagaacatatcatttcttttatattcaaatttcaatagcacaggtaacatcccagtttgccagtcattgcaatgtataagatcaggctgccaatctatttgccttaacatatctaatacggctctatcaaagaatgcaaatctctctgcatcatcatagaatccatagatttcatctctcttaaaatatgcttcattatctaaaacataatatgttactccattgtaaaagcattcccatacgccacaaaattcttctctccatccaactttaacattaaaccatttaacaaatcttagcttgtctcttacttcccaattaatttctttatactttggtataacaactcttacatctgcatttttttgtgcaagtgcttttggtaatgacccagcaacatctccgagcccccctgttttaatgaacggactagcttcagatgctacaaataaaactctcattctttatccccctcaacctctagcaaataaatttatatcattatattataaatatttactttctcaaactgtctttataaccttttatttatctttctctttaatttcttgatctacattaatctcatttacttttaatattaatgttgccattggaggcacttttattttcaaagaatatggttgattatgaaatgcagtcttttcagatactaacatctcacccataacctgacctgaaccaccatatttactatcatcagaattaaatacttcttcatagctacctaaaaatggcactccaatttgataatcataatacacaatagaagtaaaattaattataaaaatcagtgtatctttatcatttctacttcttctagcaaaaattaatatgctttgttcattattatcagcctctatccaattaaagcctctgtagtcatgatcaagctcccaaaaagctttattactaaggtatagattatttaaatccttaaaaaataattgagttttcttatgaatttctacatcatcgattaggttccattctaattcctcatattctctccactcaattctctgagcaaattcgcaccccataaacgatagttttttgcctggatgtcccatcatataacacataaacgctcggagacctgcaaacttattccattcatctccccacattttgtttactagcgatttcttaccatgaacaacttcgtcgtgtgaaagtggtaacaaataattttcagcataattatacatcatcgcaaatgttatatttttatgattatgttttctatatttaggatctatttcgacatactctaatgtatcattcatccaacccatattccattttaagttgaatcccaaaccatcatagattgtaggttttgtaacattaggccaagatgttgattcctctgcaatcataagtgcagtcggatattctgcaaatactgccttatttaactcctttagaaaatctattgcttctaaattcccatttcctccatatttgtttggtacccattccccgtgcgatctgctataatccaagtaaagtatgcttgatacagcatcaacccttaatccatcaatatggaactctctataccagtataatgcattcgatattaaataacttttaacttcatctctacctagatcaaaattacaagttccccagcccttattttccgctctccattcttcttgatattcgtatgttggtgttccatcaaacttatataatccgtgagcatccttgcaaaaatgacctggaacccaatccattattactcctatattagcctcatgcaatttatttattaaaattttaagaccttcataatccccatacctacttgttggcgaataatatcctgttccctgatatccccaggaagcatccaatggatgttcaataagtggcataagctctacatgtgtatatcccatatctttcacatatttaggtaagtcttctgcgatttcttcgtattttaagaatccgccatctttatttgtcttccatgagcccaaatgtacctcatatatatttaatggttgctcaagtacatttattttatttctttgatcaatccattttttatcattccatttgaaagctttaggcttatatactattgatgcattatctggtctcaattcactttgtattgcatacggatcggctttgtattctcccatctctccatcgcttcccactatacaatacttatacctatttccagccttagcagtataaaaaaagcctctccataatccattttcagttattctttcaagcttgtattcctcttttacttcgaaattattaaaatccccaacaacatatacatcttttgcattaggtgcccacgttacaaattgcacacctttctttcttttctcagttttaatatgtgaacctaaaatattataagattcatagtttttaccttgatgaaacaaatatgtgttaagattagttatttcagatttatcaatactttctgttctctttttaacattaattttactatgttctgttttcgacttttcaatcttctccccttctgcttgaaattcctccattaatttttttgaagctggtttctttcttgtgcttgcttttgttgaagctactgcagatttctcttttgaagatttattagttgttttttttgtctttgatcgtgtagctaattcattagtcttggagggtttagatttattaaccttatctccatcttccaattcagttgtttcatttgaggaaattttcttttttactcttccctctgtcctacttatttttttcccaacagatgaattatcttcgatagatacttttccttcttcttctgtcaaaccgttcatatctctagaacccatttcatctttatctttaatcttactgcttttaggatcattttgcattaaactatacccccatccatatttatatccctctcataaactaaattaaatgcttctccttattataattctcactatatatatatcttaccaaattttatggtacttttcacttatttttctttatttttaataaaaattataattaatttaacttttatgataataaatatatatttttatccatatataatgtataatattcaatcatcattttattaaatttaaaattaattgatggaataacaatataattaacaccttaaaagctatgtataaaaaataaatcaagcaacttctaaattttatccttctaaatttttaacattagaaaaatgatttgaaactgatgtcactcatatatcttttttaaaatcagagttagaaaatgatcttcactatctaattaatgataataatgttgaatttaccaaaattgatactacaaaaaaagaggatccacatcttgaaccctctttttaacaattaatattgaaataatttaaatatattgccttaaaccttataattatttatatactttaaatgatacaatttaaacataggaatcaattaatatcatgaagactgcttattaaaagtataaaataaaaaagatagtcattacaactatcttttgcttacctcgcaacgtcctactctgccacacagtcccccatgcagtaccatcggcgctatagaccttaactttcctgttcggaatgggaaggagtgttacctctatgccatcatcacgagatctttaatttgaaaaaactttgttctttcaaaattgcacacagtttctttaatgtatattacaacttgattatattggtcaagccctcgacctattagtatcagtcagctaaatatgttaccatacttacacctctgacctatcaaccttgtagtcttcaaggggtcttactagcttatgctatgggaaatctcatcttgaggtgggcttcacacttagatgctttcagcgtttatcccttcccgacttagctacccagctatgcttctggcgaaacaactggtacaccataggtcagtccatcccggtcctctcgtactaaggacagctcctctcaaatttcctacgcccgcgacggatagggaccgaactgtctcacgacgttctgaacccagctcgcgtgccgctttaatgggcgaacagcccaacccttgggacctacttcagccccaggatgcgacgagccgacatcgaggtgccaaacctccccgtcgatgtgaactcttgggggagatcagcctgttatccccgaggtagcttttatccgttgagcgatggccctcccacgaggtaccaccggatcactaagcccgactttcgtccctgctccacttgtaggtgtcgcagtcaggctcccttctgcctttacactcttcgaacgatttccgaccgttctgagggaacctttgggcgcctccgttacattttaggaggcgaccgccccagtcaaactgcccacctaacaatgtcctgtcaccagtttcatggcatccagttagaacttcaatactatcagggtggtatcccaacaacgactccaccaaggctgacgccctagtttcccagtctcccacctatcctgtacagacaataccgaaattcaatgctaagctacagtaaagctctacggggtctttccgtccaatcgcgggtagcgagcatcttcactcgcactacaacttcgccggatttgcagttgagacagtgcacaagtcattacgccattcgtgcgggtcagaacttacctgacaaggaatttcgctaccttaggaccgttatagttacggccgccgtttactggggcttaagttcacaccttcgcgttaccactaagtgttccccttaaccttccagcaccgggcaggcgtcagcccctatacatcagctttcgctttagcagagacctgtgtttttgttaaacagttgcttgtgcctattctctgcggcctgatttctcaggcaccccttctcccgaagttacggggtcaatttgcctagttccttaactgcaattcttccgtcggccttaggattctctcctcatctacctgtgtcggtttgcggtacgggcactacttctctctctagatgcttttcttggaagcatggaatcagatacttcggttccgtagaaccttccccatcacgcctcagaattgttggaacggatttgccaatcccaactccctaaacgcttagactagcatccaatagctagcacatcctatccttctccgtcacaccatcgataataacgattatagtggtattggaatatcaaccaattgtccatcgactacgcctttcggcctcgccttaggtcccgactaaccctgagaagacaaactttactcaggaaaccttagatattcggcctgtaggattctcgcctacatctcgctactaatgccaacattctcactcgtaatcagtccaccgctccttacggtacgacttcagcccgattacgacgctcctctaccgctcacgcataaacgtgaacccgtagcttcggtggtaagtttgagccccggacattttcggcgcaggatctcttgactagtgagctattacgcactcttttaatgagtggctgcttctaagccaacatcctagttgtcttagaaatcccacatccttttccacttaacttacactttgggaccttagctgacgatctgggctgtttcccttttgaccatggaacttatctttcatagtctgactgccggactgatagtatgtggcattcggagtttgataaggttcggtaagcgctatgccccctagcctattcagtgctctacctccactactcacattttccgacgctagccctaaagctatttcgaggagaaccagctatatccgagttcgattggaatttctccgctatccacagctcatcccatgctttttcaacagcaacgtggttcggtcctccacgaggttttaccctcgcttcaacctggccatggataggtcacccggtttcgggtctacagcatgcaactagtcgccctattaagactcggtttcccttcggctccgtaccttaagtacttaacctcgctacataccgtaactcgttggctcgttctacaaaaagcacatcatcacacacataaggtgctctgatcggttgtaggcacatggtttcaggttctatttcactcccctcccggggttcttttcacctttccctcacggtactgcttcactatcggtcatcaggtagtatttagccttgggaggtggtcctccctgcttcccacaaggtttcacgtgtctcgtggtactctggtgcagaactgattatcatagttttcacttacgggactattacccactgtggtccaactttccagttgtgttcaattaactatgatttctcgttatgttctgtccgcaaccccagagataaatctctggtttgggctctttccttttcgctcgccgctactaagaaaatcgatttttctttctcttcctccaggtacttagatgtttcagttccctgggtataccttcataaagctatgtattcactttatgatacatggggtttcccatgtgagtttcctcattcggaaatcttcggatctctgactatgtgcgtctacccgaagcttatcgcagcttatcgcgtccttcatcggctcctgatgccaaggcattcaccatgcgccctttgtagcttgacctaattattagtcatatcacaaagaatatttattcttggctttgttgtattttatatacattaaatctatgtgcaattttcaaagaacattgaaagacttagtctttcaaaattgaacagaacaaatacttaagtaacctttgagcaagtattttatattttgatacataataatgtatctgtactagccaaacatcatgttggtctagatttctccatagaaaggaggtgatccagccgcaggttctcctacggctaccttgttacgacttcaccccaatcgctgaccctaccttaggtcgctgcctcgcttgcgcgttagctcacgaactttgggtattgccaactctcatggtgtgacgggcggtgtgtacaaggcccgggaacgtattcaccgcgacattctgattcgcgattactagcaactccagcttcatgtaggcgagtttcagcctacaatccgaactgagactggttttaaagtttggctccacctcacggtttagcatctctctgtaccagccattgtagcacgtgtgtagccctagacataaggggcatgatgatttgacgtcatccccaccttcctcccggttaacccgggcagtctcgctagagtgctcaactaaatggtagcaactaacaataagggttgcgctcgttgcgggacttaacccaacatctcacgacacgagctgacgacaaccatgcaccacctgtcttcctgccccgaagggcttccccgattaagggtaattcaggagatgtcaagtctaggtaaggttcttcgcgttgcttcgaattaaaccacatgctccgctgcttgtgcgggcccccgtcaattcctttgagttttaatcttgcgaccgtactccccaggcggaatacttaatgcgttagcggcggcacagaggtcatgacaacccctacacctagtattcatcgtttacggcgtggactaccagggtatctaatcctgtttgctccccacgctttcgagcctcagtgtcagttacagtccagaaagtcgccttcgccactggtattcttcctaatctctacgcatttcaccgctacactaggaattctactttcctctcctgcactctagatatccagtttggaatgcagcacccaggttaagcccgagtatttcacatcccacttaaatatccacctacgctccctttacgcccagtaaatccggacaacgcttgccacctacgtattaccgcggctgctggcacgtagttagccgtggcttcctcctcaggtaccgtcattatcgtccctgaagacagagctttacaatccgaagaccgtcatcactcacgcggcgttgctgcatcagggtttcccccattgtgcaatattccccactgctgcctcccgtaggagtctgggccgtgtctcagtcccaatgtggccgatcaccctctcaggtcggctacgcatcgtcgccttggtgagccgttacctcaccaactagctaatgcgacgcgggtccatctcatagcggattactcctttaattgctatgccatgcggcactacaatcttatgcggtattaatcttcctttcgaaaggctattcccctctatgaggcaggttacccacgtgttactcacccgtccgccgctaatccactcccgaaggagtttcatcgctcgacttgcatgtgttaagcacgccgccagcgttcgtcctgagccaggatcaaactctcaataaaaagtttaatcttagcttactcaaataaaaattgctggtttacttaaatgtatttatatcattctgttcaattttcaaagaccaatttttctttcttacaaccattgttgtaatgttttgttgttatctgtcgtttctgacagcttattcagtatatcaccgcttttgaagcttgtcaacaacttttttaaaaaaacttttcgaactcatttttcagtagttctattagctttaagttattaattctgcatctcttagcgaggattctatcatatcatcaccattcgacattgtcaacaacttttctagaaaatctttttccttttaagttgttttgtttatgtctcttagcgacgtgttttatcttaacatctctgatattttcatattatttgctttcctattactaaatgcgattattttcacctttctttataatccgtcattattctagattttatacatattgatacgctagcaatagttgtcattctaatctagttcaatctattgcatttatatatgtttttaacctaattatcttattcctaataattctaaatatctctattaataagaaattaagttgaaaataataaaagatcctatgataatgaaagtatccaattacccctcgatacataaaatttcatcaaacataagaacttttttatatagtaacagaaaatataccctacctaaatggttttttaatcataaaaaataactgcaaagttaatatgaaatattataataagattattctgcaaagttgttgagctccaataactactttatcgttcagaatagataataatgttatataagaaatgcactctataaaaaaggcttgtcgtaaaaatataccgtcttaaatatgtgcttaggatagaaattcagttgtaaaattaagaatacgctgaattaataagctcttttatgaatgatttagagaaatgagttatacgacatcgtcacatttattgagttttttagaaatacggcattaaataatccagctatacagcggcgaagcttattttcttaccattcctaaatattataaagtcaggaccacccgtcaaacgggtggcttgctctgcgcctgtaaggctaaaaaatacatagagcagtcttttctcgctgttagacttgctatatattttttaattgtgtggttattctatattttaaatgcagttatcaaacttaagttttttcgtaacttatagtttcgcattaacagtattagtttagtggtagcacagagtttgtggtaaaagcatttttttagaatactcatagtttttaacggtataaccaaacacccaccacccgcttagcaggtggttttcttacatgctaaagcataaaataaaaaaagatagtcattacaactatcttttttgcttacctcgcaacgtcctactctgccacacagtctcccatgcagtaccatcggcgctatagaccttaactttcctgttcggaatgggaaggagtgttacctctatgccatcatcacgagatgctagttcattccaaatctttgatttggcttcatgaactgtactcctcaacttcgttgagcaagtttcctttttgaaagttttgttctttcaaaattgcacacagtttctttaatgtatttacaacttgattatattggtcaagccctcgacctattagtatcagtcagctaaatacgttaccgtacttacacctctgacctatcaaccttgtagtcttcaaggggtcttactagcttatgctatgggaaatctcatcttgaggtgggcttcacacttagatgctttcagcgtttatcccttcccgacttagctacccagctatgcttctggcgaaacaactggtacaccataggtcagtccatcccggtcctctcgtactaaggacagctcctctcaaatttcctacgcccgcgacggatagggaccgaactgtctcacgacgttctgaacccagctcgcgtgccgctttaatgggcgaacagcccaacccttgggacctacttcagccccaggatgcgacgagccgacatcgaggtgccaaacctccccgtcgatgtgaactcttgggggagatcagcctgttatccccgaggtagcttttatccgttgagcgatggccctcccacgaggtaccaccggatcactaagcccgactttcgtccctgctccacttgtaggtgtcgcagtcaggctcccttctgcctttacactcttcgaacgatttccgaccgttctgagggaacctttgggcgcctccgttacattttaggaggcgaccgccccagtcaaactgcccacctaacaatgtcctgtcaccagtttcatggcatccagttagaacttcaatactatcagggtggtatcccaacaacgactccaccaaggctgacgccctagtttcccagtctcccacctatcctgtacagacaataccgaaattcaatgctaagctacagtaaagctctacggggtctttccgtccaatcgcgggtagcgagcatcttcactcgcactacaacttcgccggatttgcagttgagacagtgcacaagtcattacgccattcgtgcgggtcagaacttacctgacaaggaatttcgctaccttaggaccgttatagttacggccgccgtttactggggcttaagttcacaccttcgcgttaccactaagtgttccccttaaccttccagcaccgggcaggcgtcagcccctatacatcagctttcgctttagcagagacctgtgtttttgttaaacagttgcttgtgcctattctctgcggcctgatttctcaggcaccccttctcccgaagttacggggtcaatttgcctagttccttaactgcaattcttccgtcggccttaggattctctcctcatctacctgtgtcggtttgcggtacgggcactacttctctctctagatgcttttcttggaagcatggaatcagatacttcggttccgtagaaccttccccatcacgcctcagaattgttggaacggatttgccaatcccaactccctaaacgcttagactagcatccaatagctagcacatcctatccttctccgtcacaccatcgataataacgattatagtggtattggaatatcaaccaattgtccatcgactacgcctttcggcctcgccttaggtcccgactaaccctgagaagacaaactttactcaggaaaccttagatattcggcctgtaggattctcgcctacatctcgctactaatgccaacattctcactcgtaatcagtccaccgctccttacggtacgacttcagcccgattacgacgctcctctaccgctcacgcataaacgtgaacccgtagcttcggtggtaagtttgagccccggacattttcggcgcaggatctcttgactagtgagctattacgcactcttttaatgagtggctgcttctaagccaacatcctagttgtcttagaaatcccacatccttttccacttaacttacactttgggaccttagctgacgatctgggctgtttcccttttgaccatggaacttatctttcatagtctgactgccggactgatagtatgtggcattcggagtttgataaggttcggtaagcgctatgccccctagcctattcagtgctctacctccactactcacattttccgacgctagccctaaagctatttcgaggagaaccagctatatccgagttcgattggaatttctccgctatccacagctcatcccatgctttttcaacagcaacgtggttcggtcctccacgaggttttaccctcgcttcaacctggccatggataggtcacccggtttcgggtctacagcatgcaactagtcgccctattaagactcggtttcccttcggctccgtaccttaagtacttaacctcgctacataccgtaactcgttggctcgttctacaaaaagcacatcatcacacacataaggtgctctgatcggttgtaggcacatggtttcaggttctatttcactcccctcccggggttcttttcacctttccctcacggtactgcttcactatcggtcatcaggtagtatttagccttgggaggtggtcctccctgcttcccacaaggtttcacgtgtctcgtggtactctggtgcagaactgattatcatagttttcacttacgggactattacccactgtggtccaactttccagttgtgttcaattaactatgatttctcgttatgttctgtccgcaaccccagagataaatctctggtttgggctctttccttttcgctcgccgctactaagaaaatcgatttttctttctcttcctccaggtacttagatgtttcagttccctgggtataccttcataaagctatgtattcactttatgatacatggggtttcccatgtgagtttcctcattcggaaatcttcggatctctgactatgtgcgtctacccgaagcttatcgcagcttatcgcgtccttcatcggctcctgatgccaaggcattcaccatgcgccctttgtagcttgacctaattattagtcatatcacaaagaatatttattcttggctttgttgtattttatatacattaaatctatgtgcaattttcaaagaacattgaaagacttagtctttcaaaattgaacagaacaaatacttaagtaacctttgagcaagtattttatattttgatacataataatgtatctgtactagccaaacatcatgttggtctagatttctccatagaaaggaggtgatccagccgcaggttctcctacggctaccttgttacgacttcaccccaatcgctgaccctaccttaggtcgctgcctcgcttgcgcgttagctcacgaactttgggtattgccaactctcatggtgtgacgggcggtgtgtacaaggcccgggaacgtattcaccgcgacattctgattcgcgattactagcaactccagcttcatgtaggcgagtttcagcctacaatccgaactgagactggttttaaagtttggctccacctcacggtttagcatctctctgtaccagccattgtagcacgtgtgtagccctagacataaggggcatgatgatttgacgtcatccccaccttcctcccggttaacccgggcagtctcgctagagtgctcaactaaatggtagcaactaacaataagggttgcgctcgttgcgggacttaacccaacatctcacgacacgagctgacgacaaccatgcaccacctgtcttcctgccccgaagggcttccccgattaagggtaattcaggagatgtcaagtctaggtaaggttcttcgcgttgcttcgaattaaaccacatgctccgctgcttgtgcgggcccccgtcaattcctttgagttttaatcttgcgaccgtactccccaggcggaatacttaatgcgttagcggcggcacagaggtcatgacaacccctacacctagtattcatcgtttacggcgtggactaccagggtatctaatcctgtttgctccccacgctttcgagcctcagtgtcagttacagtccagaaagtcgccttcgccactggtattcttcctaatctctacgcatttcaccgctacactaggaattctactttcctctcctgcactctagatatccagtttggaatgcagcacccaggttaagcccgagtatttcacatcccacttaaatatccacctacgctccctttacgcccagtaaatccggacaacgcttgccacctacgtattaccgcggctgctggcacgtagttagccgtggcttcctcctcaggtaccgtcattatcgtccctgaagacagagctttacaatccgaagaccgtcatcactcacgcggcgttgctgcatcagggtttcccccattgtgcaatattccccactgctgcctcccgtaggagtctgggccgtgtctcagtcccaatgtggccgatcaccctctcaggtcggctacgcatcgtcgccttggtgagccgttacctcaccaactagctaatgcgacgcgggtccatctcatagcggattactcctttaattgctatgccatgcggcactacaatcttatgcggtattaatcttcctttcgaaaggctattcccctctatgaggcaggttacccacgtgttactcacccgtccgccgctaatccacccccgaaggagcttcatcgctcgacttgcatgtgttaagcacgccgccagcgttcgtcctgagccaggatcaaactctcaataaaaagtttaatcttagcttactcaaataaaaattgctggtttacttaaatgtatttatatcattctgttcaattttcaaagaccaatttttctttcttacaactactgttgtaatgttttgttgttatctgtcgtttctgacagcttattcagtatatcaccgcttccgaagcttgtcaataactttttcaaaaaactttttgaactcatttttcagtagttctattagtttcaagttattaattttgcatctcttagcgaggattttataatatcatcaccattcgacattgtcaacaactttcgtagaaaacttttaatttcttctttattaaaatcttttcaggtattaagttgtttttcttatgtctcttagcgacgtgtcttatcttaacacatagccacgtagccattctagcaaaaaacatcatttataccatttaaaacttaaaacctatactaaactctatttttcttctcatttctactattgatacgctaggtatagttaatagtcatttaagtattcttctaatatataataggtctcatgatcctcccaatttccattaattaatagatatttttcatttactccaattaatctgaatccacatttagttaatacatttttggattttttgttatttatcaaagctgatgcttctattctatgaagaccacattctttaaacgcataatttagtaacagttttacactctcttgcatatagccattcccctgctcattttcatctattgaataacctaatatgccattcttcaacgatccatatataattcttgaaagttttatctttccaatcaatttttcttctttaaaaatacccaaatctacacttgttccattcaaaaattccttataactcttatttaacaattttctttgtgtctcaactgtgtagaaatcactatctctacttggttcgaaaggagccaagtaattcttatttcttttataataatctaacatttcttgcgcattgctaggagtcagatttctaagaattatattttctccttttaattccactaataaatatctgcacatttggtcatattcgattctagttataccaaatgacagttcatcaagatattcaccttgaaaatattcattttcattaaatattccttctagagtaaaacctagatctaaaaatgcagttaagtctattttttcaagaacttttatattaaccttaaaaatattcgaatctttaaatattccctttaatataagcgatagtgtatcacttaataattcataattatattctctatagaacttaagattgacgttgcacgttttgcttctgctagttaattcatcagtactgaatctaccaatgataatatcatctatatctcttattaaatattctgttttattcgatctatttccttgtatttttactttcatgtttaattccatataattcccctctacaattatgaaaatatgttttttcattttttaatctattgcttattattttcaatttaactattcaacattcctaatataatcattcaacacttattttaattttcctttttgctataatcttagttacttttattaactatatttctctaaattttatataaaagattattactagttacatatagtgccatctcataaacttatacactcttcttacactagctcgaaattgataattagaaatgcaatataattatactctagtttcataaataaccctttcttttaaaatatatcagaaattatataattcatatttttatagcaacatatatactaatattcagacatcaaacgcaaatttactatatgtagccatatacttagatctaatacataaattttatccacaaaagtcggatttagtacatacttatgcacaaaacccacaatatattgttgatatttctacatatcatactaatatattgcgggttctatttttaaggaagtttactacattatctaatttaaccgtttatttaatattcatatatctactgtaatattccacaagctacgccaaaaatacctacagcaaataatccaaatattattagtaatggatttacatttttctttaatagatacatacataaaaatgttaataaaagtggaactaatcctggcattaagctgtctaaaacactttgaactgttgtaactacttctttcccatcactttgtgtgtatttagaaagtacaaatggtatatttatacttgtccatttagaaacaagaccacctataacaagtaatccaagtactgaagcaccttctgtaagatatctaagtttatttccacccatatcagcaactaattgagttcctttttcatatccatagaacattccataccagtttgttgcaagtcttattgcattgaatcctatgaagaaaattaatggtccaattatacttcctgtaagtgcaagtcctgcccctaatgctgcaagcacaggtcttagcgttccccagaatattgggtctccaactccggcaagtggtcccataagaccaatcttaacaccacttattgatgcctcatctatatctgccccatttgccttttgttcttccatggctgctgttattcccataattggcgttgccataaatggttgtgtattaaagaattctaaatgtcttttaagtgctgcacttaattcgtcacctttatataatttcttcaaagctggaattaatgtaacacaaaaacctattgcttgcattctttcaaaattaaatgatcccaataagaaatttgaacggataaacatttttactatatcacttttatttaatttcttttcactcattattttatctcctttctgtaattacattaactctgaatcatcaatgtcatcaatatttccagttccagccactgctactttaccttcattagctattgattttatgtggaatattgctgcaataacacctacagcaccaaagccaattaaattgaagtttgtaaatgctgctagtaggaatccaatgaaaaagaatggtagtaatgatttactattcatcatattcattaccattgcataaccaacaactactataaatccacctgacacttgaagtcctcttgtaataacttgtggtatagctgcaagtgctgcatttacggcatctgttcctgcaagtactcctacaatggctgctggtatagctacacgtattgcttgaagtgataaccctagtatatgacacatttctattcctcttgtgttacccttttcagcatatttatcagctaagtgttggaaaaatacagttattgttctcacaaatatagtaagaacttgtcctgctgctgcaattggtaccgctactgctatacctgctccaattgattgtttaccgattataacaagtattgctgaaattacacttgcaagcgcagcatctggtgccatagccgcaccaacattcatccatcctaatgctaacatttcaagtgttccacctaatataattcctgttttaatatcccctagtacaagtccaaccaatgtgcatgcaattaatggtctatgaaattgtgcctcatcaagtacacttgccataccagtaattgctgcaactattactaataaaattaattgtaaagtgctcatttgtaaattcccctctttcttttaatttatatatgaaaacttttttaaaattttatatatctaatcttctaacaggatttattattccttctatcaaaatctaagaatttttaaaaaatcttagatttggtcgttaggtaaaatttatgtctatataagttgtaattctttaaatttgtccatcaaatttattttaggatcttttgctagtttccttacctctaattcgatgcctttttcattaagctttttaaacgcctcaatatcaacatcattcatgcacaatgcatttgtaacctgtttatcgccagctttatagcacatccctccaacgtttacagatttaataggtactccaccttcaaccattctcaatacatctgtagggtttgtaaataaaaataaagttttaaaactgtcaaatttaggattattgtatgcttcaattgctttagctattggaagcacatatgctttaattcctggaggtgctacttgaattaccaattgttttcttaagtcatctgctgcaacttcatcactgcaggcaaatattctattgcagccactatactttgtccaaactgttgcaacttgtccatgtattaatctgtcatctattcttacaaaactaatttccatctttatatctcacctttcaaatttcatattataattaaattcatgtaattcttatactaactaatcataggttgctatattatctcatcatctaaatcctctgcaatatttttagataaagttcttatagcctcctttcccgaattttctgcaattgataaaagttctgacacacttgaaaaatctctgcttcctaaaacctctaatatcattggaagattaacacctgtcacaatttccatattctcatgtttcattgcaattatgctcgctgcattaaatggacttcctccaaaaaggtccaccatgaacaatacgccatctgttgaattcattttttctataagtgaattatatttttcaactagagcatctataccctcacctggctgaaaagtaacacttcccacattttcttggactccaaaaatcatttcagctgatttcaagatttcttccgagaatataccatgagtacctacgattactgctatcattatttcatcatcctttcctgcgacatatattatttctataccaatatacttagcaattcctatgccaaaaaaagtgtgtcaacaaatacttttatctaaacatgaattctaaacgcatacaatgcggataagttttcaccttgacactctaaagtattatttgacacacttttaattgtattttgacacattatttttcttatatggactaaatttaacacacatctataacatcgatcatatagtataactcatcatcggtcagctctatcgataaggcttctttaaatattaaatttgctcgccttaacacttccaaatatcttggattcagttctgaatcagatgaatcatataccaatccattatttaaaagcatcctttctaatgcacatgcaacatgaaacataattcttagtttagttggattttcatactgcacattcaaagatttttcaagagattttataaaatcatctaataacgaatatatcttttcaggattaagaaaggtcaaaatctctgttagagtttgtttacaaagattttttaagacaatctgattttctccttttataactggaccaatatcctttccttcaattatatttcttaaaatattttctccagatccatcaattaattcttcaatcgatataaaaggaattcccatattaggatttgctattcccacaagtgctaaaattttatttttttgggaaatctgctttattgactcatttaaattatttaatcctactgggattattctaacattatcattaattgaaatattctttgctacagcttcaactaactccttaagttttattgcagcacccttacctgttgagcaaattgtaattatagcattctcctctccagttttaccttctgtcatcatattattcgtatatcctctaaaatcagtaattaaatatgaatatactgaatttagatcggcatcaaaaattgagcattttctgactgcttctagtactagagccgttgataccatatcaatactcttaatatttatcttggtctttttcgttatggtttccccaaaactatttaaagatcccatatccactaaaagtagcactccttttccttcatctacttgcttaactttttcaataacactatctataatatccgaaggttttctctcaagcggcatgtcaactgctgcgatattatctgcatcaaaaagttttttggccacagcaaccatgcttgtagcagtgcttgtaccatgagatgcaactactattccaactctttcttgatgagataattcttgtattgagcttagaagtaaagctaaatattcaatttcaacttctggaattattaagttatatctatcctctattaacttatgaatctctttagctaccccgtattctttactattagatgataatgttaactcaatatttgttgaaaatgatactgtgtttttctttatacgattaaataacgcactaaaatgtaggcttatagcatatataaatctatcacttaactttctgctcaatctattttcagctaacatttttatttcttcagcaaaatcaacaatatctttatcaacaatttttaataaaccttctctacgatacgcatcattcttgaatctcgcgtaaaattgctttaaatgaacatttatatctgttgtaatataatttttaatatcttgatcgctcatgccttcttcttgtaaaacaaacgccttatcctctattatattgtaaatattaaatggtggctcataagcatcagtctctagaaaagttttgttaccatcaggtttaaccaccaatgtgctaggaacccttccccaaaaattggagtcgtcttttattttactttcaaaattaagtattccatttcttatgctttctgggagtaaatctaaatttatctcaatacatttatctgtattcatgcaattcagaaatcctgtggcacaaactagctgtatatttgactttaattggcctacatttccatatgttgtacttccaattaatgcttttatcgattccgatgaaattttaatagtcttatttaccctttgagcttccttagaaagtaaataatgtatgagttctaatttatcttgtaaagatctctcttcaaagttcggaataactatagttataggaattcttctaataaaagtatttaataatgtagaattaggatcttctgttgttgcacctattaacaatacattagctttgcgctgtctatctgtttctccaagcttattataggttcctgtatccatgaaatagaaaatcatttcttgcccttctggcggtaatctatgtatctcatctaagaatagtattcctccatcagccttttcaacgattccctctttttccttatcagctcctgtaaaagcacccttaatatgtccaaaaatatacgataaaagtaattgtggattattagcataatccgcacaattgaaaacaacaaaaggcgcatcttcaggtaatttttttatatattttgaatactggtacattatattaacaaataagcttttcccaactcctgtacttccaattatcaaagtgtgaagcccattaggcgggtataacagggctgcctttgcttgttcgatttgattttttaggctagtattagctccaattaaatagttaaaaggagattgttcttcatttcttaccacttcttcacttgaggcaaattccattatatctgatatctcttccaagtcgtctggtaactttacagataatatttcctcaaaactttttctatcgaaataaagaacgggtctatttttaatcttaatgattttcgaatctctgcaaagtgcattaagttctctcgacacattacttcttaatatttcaagatgttctcctatttcctgtgcactaaatcctttaacttctaagagcttatcctttgtaaattttttcgagttattttcgatataattgtaaatcctatcaatacgcttcatgatgctcaccttcttttagatttgtctataattaataaaaaactaactctttcaagtaaatatatagtatccttttactaaaaaaaatacaatatacttcaccaaaagagtcagttaaaatcaattactataaatttactatatacttgaaacttttataccaatacctgaatctagtgctactttatttctaatatatcttttataacttctccaccaattatcattcctgcaactggaggaacaaatgatatacttccaggtatttgtcttttaatagcgcacttcttagtaccaccagtacaaacgcatcctgttttgcatgtaacaacatcatcatagttaggttttatcggaacttcttctgaataaactacttttaatttttctattcctcttttacgtagctcagatctcataaccttagctaaagggcatatttttgttttaaatatatctgtaactttaaattgtgtaggatctaatttattaccagttcccatagaactcattatttttatgccttttttataacaatactctactaatcctaatttagctgatactgtatctattgcatcaactacataatctacatcatcaggaattatagacgctatattttcttgtgtaacaaaaatctgatgtgttataacattacatgctctatttatagataatattctttctttcattacttctaccttaggctgacttattgtcttataggtagcatgcacttgtctattcaagtttgttaaacaaacagtatcatcatcaacaattatcaactcacctactcctgctcttgcaagagcttctatcgtatagcttcctactccacctacaccaaaaacaataactttactatgttttaatttatctaatccatctttacctatcaaaagttcagttcttgataaagaatgctgtgctgtcatacatcttctctccttattatcttatactttcaattgatattataacacaaaaacaatcgaaaattggcagtataattattatatattataagctcagtaatgattatttacatatatatattaattaatactaaaacttttcttttaacttagcatgaggtacaaaaataattttacaaatttatctattaaatttgtaaactaatgattataatatatattagtgtcaaatatgtttaaccaagatatttatttttctataatttattcaatttagagcgtatataatcaaagcgacttgtttcgttcgtattaacaacttgtcatttttagcttttagatattactcaataaatttgcataagaattaaatatatacagagcggttatatcatatttattaattaattgttttaggaggctcacttttatatgattattggaataattgctgctatggcagaagaattagaactattactaaatgatttaactattgaagaaaaaaaagataaggctaatatgactttccacaaaggaaaattatatggaaaagatgttgtagctgtggtttgcggtatcggcaaggttaattcagctatttgcactcaaatattagcatctgaatacaaagtagataaaattattaatgtaggagttgctggtggaataggaaaggaaatttatcctggtgatattgttgttgctgaaaatttagttcaacatgacatggataccacagctttcggagataaagttggacagattccaagactagatacatttgattttaaatgtgataaggaaatggtttctatagctaaaagtgcatgcgagaaaattccagaattaaatagctttacaggaagaattgcttctggagaccaattcatagcaaatatagaaaaaattcattggcttgatcaggagtttggagcaatatcttgtgaaatggaaggcgctagtatagctcaagtttgctatctaaactcaattccttttgtagttataagatctatttctgataacgcaaataatggtgctcatatggattatgagaaatttgtcccaatcgcagttaaaaattctactagaataataaaacaaatgttagaaatgatgtagtaaaagtaatattttatatagagaaagccatcccttgaaagtgtctaaatatatttatatgcacttacaaaagatggctttctttatatcaatctctctctatttaaaatactattctacggtaaacctctttaattcttcttgcaatttatatgatatttgttgcaaactaccagcgtattctgttaattccgccattgttgcgtttacttcctgagctgatgctgtaacttcttcagatattgatgccgattcctctgaaaccgctgctatattttcaatttgtgtcttaacttcttctttatttaatttcattttttcatttaagactttaatattttctattgcccctgttaaaggaattatagaatcaactattttattaaatataccttctgttttctttattgcctctccttgtttttgtgacatttctctactttctttcatggctattttggtagaatcgctcttattatttatttctgaaacaattgcttttatttcatctgtagatctttttgattcctctgctagttttctgatttcttccgcaaccaccgcaaagccttttcccgcatctccagctcttgcagcttctatactcgcatttaaagctaaaagattagtttgttcagttattcctgctattacatccgatatataatttattttatttatactttctcccatttcatgaaccatgccaccagacttaattgcattttctttagacttttcagctttatatatcaagtcattaagtatagccaatccttgagtacctaatttctcagcttcactagctaactcattaatatgattagtctctccatcaacttcatctatcctatttgataattcttcagtactcgttgcaacctctgttgctgattgcgcttgatttgtagctccatttgcaacttcttgtattgcatttgaaacttctgatactgatgcatttgtttcctcagacatactggatatatttcccgatgcctctaataaatcagatgatgtattttgaattcctttcaataacttcgagacattctctaccataaaattaaagttatctccaagttcagcgaattcatctttagccgttacaattattcttttactgaagtctccttcagctactgtactaaacgcttcttttaatttatgtatttctttcacaatatacgatgctgaaatcattgatataattgttcctataattacacataataaattagcagcaataaccgttaccttcattgttaaaacattatttgttacttctttgccatcaattatacccaccattttccatcctgttaaagcatctgtttcttgacaggcataaaattctttcccattattttcccaattatatactcctctttcttcatttttagctgattcccaaaatgataatttactaatattatcatctatctctttattattattgttatttgctactacatctccatcgttatcaactaataatatgaatcccgtattcagtagctttatgttactaatatattcttgcatggaatctaaagacatatctattactattaccccagtgatttgtccattattatctttaacagcctgagcaactgtcattacttgctttcctgttacgctatctttatatggttttatgtatacaacctttccatcagcttccttagctttcttataccattccctttctttataattgaaatcattaatattcatcgttccactatctaatacaagctctccatattcagttgcatatcctgcattaataattccatttattgaatccttagtatctttaaacataccttgtacatatttagatattagtgcatgatctacttgcggatttgataaatctttgatatcggcatttttcgatatcactctcaattgagtatttaaaatttctagatattgcgaaaaacctttatcaacttctttaatagtttgcacacttgtagtctttaaattattctccaaaacaacattagacttaaaaattgctactaatccaacagttatagttggaagtagaagcataatgataattccaatcactatctttctaaacagcttactattcctattcatttcattaacactcctataaactttatctttttctagaataaactccattcatatacacagtactacaaataataaatataaacacaacttatttgtaataatatagcttaacagggtaaatataatattttcatgataacattgtattttactatattcaagtagtcgaaaataagctaattgaatatacttaatcttaatattcacttttactaccaaatataaatgttaagctaatcttatatctaatccaacctaattacgttattatcataaataattacttttgattacaaagatctttaatttttatcaataaaatagagtcatcttataccagaaacccgatctaagataactctatttttgctatatgatattaatttttatttccacgaaatatttgcatctcttcttggaacagttctaatatatttcacattgggatatccaacaaccatacatgttacaatttcttctttaccttttaaaccaagtaattctcttatttcatcatttccttgtgccgcccttgtaaagaatccactaaaaaatgttccaagacctaaagcattagtcataagttccatattggatgacgctaaagaagcattcacagtcgagtctgaaactgcaagaatcaacgcgggtgcattaaaaaataatttatcattcttcttagaatcctctttataatcattatacattttaatccacatttgtgcatatctcttgaaaggtaaagtttgtggatttagatttttaagcatttcttcccctctaagttttaggtttcttaaagccatttcctttaataattcaatgttatcttctacaaccacatacgaaacattttgactattagttccagtttgagtgaatctaccagcctcaataatttttaatatcttttctttttctacttctttatctttaaattgtcttgtagtcctcctaaatttaataaaattaagaagtttctctgattctatcttaaactcagactcattataatcttttacatcttccatattatattcatctgtagatactgctcctttaggacaaactgcaatacagtgtccacacttcatacatctaacatttttaatttctgccttgttcccatttatttcaatatcattaggaaaacaatctttaacacaaagcccacatcccacacacttttctttatctacaatcatcatagtataattactccttttatattaaattcatctattattatttttaagtgctaacaatatatttatataaatttgcctgcctatttcatcttagacattttacaatttgctagttcattaactaaattttcaattgttttttctctatcttcttttttatagaagtcaaatcccatttcattttttatattttctgcttttaaaaatatgtaatttagatatcctgcaatcaaatagttcttaatccagaacttatgcatgtcatctccataaagttctctaagacacttattatacgactcctctgaatctagtagatgtgctgtcatctgattactctccaggtcatctaaaatcgcaatcttagaaatttcagaattatctgcaataaagtttgcaacttcttttaatatgaaagtaagtctattaattgctgattcattattctttgatttcattttctcacttaaagatctcgttgcacagctcataaccttttttactgctaaacgaattaaattatctttactctggaaatgataatttaccataccattacccagtcctgctttctcagtaatatcttttacagtaatttcactaggctttttaccttcacatatcatatgtatagtaacagctatcaacttttctttagcatcattttctcccatattgtcacctcctatttctataatactttatgtgttgaatagcatactgtatatcatacagtatactattcaacatttatttgtcaagctaacgaatttttataaataaaaatcaccgcaaaatgcagtgatttttttatccctatttataaattctcaagagttaattttaaaaccttagctttaaaattaacttatttatttttattacataaatcttcgtgatagagatactacaaagcttgatgtaaaaaatactcctaaaaatgattctaaaccaacaaccatcttcatccaattcagtggaattatatcgccgtatccaaccgtcgtaaatgttattattgtaaaatataatgtattaccaaatttactaattaaaaaattaatatcaaaatttgaagtcttaaacatttcaaatactgctatgaatagattttttgaattcaattgaacatctttgcacataagcagattcggaaaaaaacagtatagtaaaaaaaatgatataatcaccactatcatagataatagtgttctctcccaacttgtataatacttcgtggttattccaattaaataatacagcaaattagaattacctttatttttactttttctttccagtctctcatacttcttaaaataatacagcgtttctagatattgatctatccttccgctcgatttatatatatctgatacaatcaaaaaattccattttgtttttttaaagtcattatcaaaaatcaaaggcttgtactttttattttccaacaactcgtactccagataacacttatctgagaaattagtcttgtacaaactaaacttacctttaagatcatcaaaattaatttctgattttttataaaaagaacattgtaaaaaacttaattctccatttatatctaactctaacttacttaacccttcgaacctacaatcaacaaaacacaattctttttcccctttgattttatccaaaataaaatcatttagtatattaacttcttgaaaaagtaaattttctttaaatatagatgcatttccatagaactttccaaactcagaattttccactactatgctttctttaactatagtttcacttattcttaacttatcacaatttatgaaccttacaaacatgttatttcttattaagcaattattaatttttattcttttataatctccacctaataattctatatcctcaacaaactcacaattattaaatatcaataacgaggaattatttatttcattattagaataactatcaaatctaaatttctttaaaaatatcgtattataaaattctcctaaaatattattacattcaaatgccactaataagccacttctatcttctatatgacctttatggttatcaagatattccaatagctcttgctctgtagaaatgactctatattctaatataactccatctttatcaatcaatataaaatcatctgtttctttaatatcttttcctagctctaattcatcaaagcctttagttaatacttctctattcattatctacctcatcctaaagtatatataacttttattttattatatattatttaccacacagcttccataataatgcgaactgatgaaaattaatatatcacttaatttatatttttgaatatattataaagatataacgaatatattcaggagtaaaaaatgctatcaaaacaagagtttattaaccaatctttagaattaaacttattctttctaagaattatgcgggaacactcgatatttattgaagcagccctaccaccaaagaacaaagatcttataagtcaagctgatgcttttaaaaatgaatttacaactttactatctcgtgccatattactatcagatggagttatccctttcgaaacattagattccaatgaaataatcacaaaatatactatggatgctgaaaaagctactcaatttgctactggaatttttatagactctaatataacttctatggaaaagtcattaatatctggtatgagaaatagtgatacatctatgctaaccgataacgtatatatgcttaaccaccaatctatagccgcaactaatatgattattaaatttaaaacaaaacttagaaatgacgtcttatcttgcaaggtatttacaactttatatcctgcagttctaaaccatgtgcttagtgaagcaataatatttacagaacttctaacacgattgcaaagtggtgtcggaattggtactaagagagatatactgatacttgaaaatttttgggatgataagttagcagaacattcatttactattagaggaatgctagatcctaccgaagtagaattattcaatatagctaataattttggaaaagaattcgagacattgagagatgaggcttccgatatggataaatcagcagaagatttgtccgaacttactgagactaccttaagtgcagccactaatctcagaaatttcaaagcccagagtactgaaggccttttaacttgtaaaataaaatcaataattctaccactctttgctgatcatgttcttagagaatcaaatcactatataaacttattaaaatccttcagcaacatttaaattcatttaatttgaagtaatttataactcaaaatagccaagacagttaaattaatttcgtctaaatatatctctcgattgattagtagaacatatatttatcaatcaaatataaaaatggcataagtattaaatatttatgttattgttcacacattataaacaaagttatcaacagaatctgttgataactttgtttataatgtggatctttttactattaataaatcttcttttcatcatagtttttattttataatgaagttaatcttgaaattttttcagatgtgtttataattagttgttgtagcaattatttgtaagccaattatatttacaacaattttatttactggaggtaattatatgtttgaatcttatgaccaagatattggaatgttaacaaataaagtttctaagaaattaacatcttatctaaataataaattagaaaaatttaatattacgactgagcaatggacagtaatattaaaactctctaatcagaataaaataagtcagaaacttttagctgaggtttcaggcaaagaccaatccactttagctagaatacttgatatacttgaaagaaaggctttcattgaaagacacccaagcaaagaagatagacgttcctttgaaattcatataacagatagtggtttaaatcttgttgaagaggtttctccttttttagaagatttatttaataaattacttaaagatatatctcctgaaaaactggatgtatataatgcggttcttttaaaaattgataacaatataaatgacttataatacaaaaggagaatttaatatggaaataaaaaagaatttaaaaacctcaaaactttggaccaaaaattatatatttatgctactttcaaatttatttatatacttagctttttatatgttaactccaacgcttcctgcatacgccaagctatgtggtggtaataatttagaagcaagcctagttgtaagtacattttcaataacttctttacttgttagattattcatagggaatattatggataggattgaaatcaaacctctactgcttttaggcgctctaatacttgctggaagcacactatcatatatctggcttccaatagatgcaataatattgattcgcgttattcaaggcataggttggggacttgcatctactggtgctgctgcaattttttctaatattgtgccaaaagagaaacgcggtgaaggcatgggctactactctctttcaatgataatatctatggcattatcccctatggttgcaatagtaataatgaatttatacagttttaaaaacatagttcttatttcaataactttagtaggtattggtattatatttctcagtcaagttaaatcaactataaaaatctcttcaacatctaatacgatttccaaatgctcgttaaaagattcctttgaaaaaaaagctgccttaccttctttattatgcttttttcttgtaatcacattatgtggaattatgagttatataatgttatacgggcaggagctaaaaatatcttctatttggatttattttattggatttgttgcaatgattttaataacacgacctcttgttggaaaaatatttgatgaaaaaggacatgctatagtaatattaccaggatcaatttgcttaataataggtcttataacgctctcctatgcaaactctattttaatgcttatactctcctccttattctacggacttgggtatggtgccgttcagccttctcttcaggcctgggctataaatcgatctccttctaataggcaaggagctgctaacggaactttcttatcttccatggatttatcctatacacttggatcaattcttctaagtttcattgctgaacataaaagttatgcaattatgtatagattttctgctatttttataattttgcttttattgatatacacctattatatttttatagataattctgaagaaccagaaattatagaagagaaactttcttaaattaaaaggttgttgcattagtggaattccactttgttaacatccttcagttcctttatcaattctaattttctatttattaaattctgaatccttttatcttatttaaagtctgtataaatttatccacaaagccttcctttttaccttcaatatatccacattaatcacagtttttttataataaagtttgcggaaaactgaactgaaaaaaggcatgagaaaagggataagatctatcaatatcttatttcaatactctctcaagccttgaaaatcaatactttaatcttatccctttaattcttttctatttaaatttcaatataaaaatcaatattcttgatccttttttcttgtccctttgacctaatttagtcaatcttttttatcacgtaagcaatcttttttatgatgtcgtcaaagatttttgttggaggacaactattttaattcatgaataaataatccacttcttaatttaggctcaaaccatgttgattttggtggcattacctctccaatatcagcaacatccataatatcatgaacctctgttggatacatagaaaaagcaatcttcatatctgaattaactctcttttcaagctctttgattcctctaataccgcctataaagtcaattctatctgatgttctgacatcttcaattcctaagattggtgttagtacattactttgaagaattgcaacatcaagttgcgctataggattattttcatcaaacgtcccatcttttgcctctaataaataccattctccttcaacatccatcccaaatgtatgcttcttagcaggctttacaggcacattattttcagatttagttacaataaagttttcctctaacttcgtaatcaattcttctttagtcattccatttaaatctttaacaactctgttataatccataaccattagatcattatcagggaatgcaaccgctaagaaatagttaaactcttcctcaccagtatagtttggattttcggctcttctcttaagcccaacttttacagcagaagccgatctatgatgaccatctgcaatatataaataatctatttccttaaataggtcaactatttcgtctataataatttcattatctacaacccatacaatgtgcgttataccatcttcggctacgaaattatatataggttttcttttactttcattctgaatccaagcatctattatttctgatgcaatttgatcttccttgtatgttaagaaaattggcccagtatttgcatcacaataatcaacatgattaattctatcttgttccttatccgcccttgtaaactcatgttttttaattatattattcatataatcatctatagatgcacagaatacaattcctgtttgagatcttccattcattatttgcctatatatgtataaacaaggttcttcatcttgaacaaactcaccatctcttatcattctatcaagattttctttagcctttgcatatactttaggatcatgtacatctatttctggatctaaatctatttctggtctatcaacgtggagaaatgagtgtggatttccaaccaccatttctcttgcttcatcactactcattacatcatatggtaaagctgctatttttgaagctaattccttaactggtctaattcctctaaaagctttaactatcgccatcaaaaattcctcctaaattatagattaaagaattcctttattactgaaactacttcttcacctattcttgtttgagcttctttagttgcagctccaatgtgtggtgtagcactaacttttggatggttaattaattcttcattcttagttggctcctcttcaaatacatcaataccagctccagcaatttcacctttattaagtgcttctattaatgctgcttcatcaacaaccttacctctagcacaattaataagatatgctgtattcttcattaattccaattctttttttcctattagtgaaccagccgctttatcataaggtacatgaagtgaaataaaatctgaaacctttaatacttcttctaaagatacaaaatcatagtctaaatcatcatgttttccttcaattgtataatatacaaccttcatgcctaaagcagttgcctttttagctaaagattggcctattcttcccattccaacgattccaagtgttttacccgcaatttcagttccttcatatttctttttattccattcaccatttctcatagtgtagttagatatcgcaataaatcttgcaagtgcaaacatatgaccaattgcaagttctgcaactgaatctgagcttgctgatggagtatttcttactgttactccttttccttctgcagcaggaatatctatgttatctattccaacaccagctctaatagccaattttaaatttccgcctgcttctgcttgaaatacatcagctgtaagcttagtagctgatctgataacaactgcatcaaattcctttaatttcgcccccaatacatcttggttaaagtgttcattgacaacttctactcccaatccattcaatgcctcaattgatgcattttctaatccatcgtttgttaatactttgatcatgtttaaaatcccccttaatttaaatacgcttattgctaatatttctaataaaatttataagcttcaaacaataactaattgttatatcatagttattaactactaatattattagtcagataaattatccgccttttcataatagctaacataaattcacacaattaattataattccactactaaagtgccataaacaatatccaatttccatatcctattaaacttatctgaattgtagagctaaaaaaattgcatagacttaaattccttatatttctatataattctaagcttctgcactatataaattactctataataaactttaaattttatctttggacttggaatatttatttcacttcttaaattctatcttttttattttactacttatttggctttaattcaatactttatgaggcaaattatgattttaatattgatgcttttataccgttaaatctatgtaaatatatcttaaaaattgcttactataaatcttaaagtatatattttcaaaatcctagtaatcgagtacttatacttaattcagctggaaacgtaaaaactcgcttgcaacagaatatattaaatagttttctttataataaaaaaactagcataaaacataagcatattttatactagctcttttaacttatttacttaaagtttcttattttttaccctctatataagcttctttaaagtataaagtatttaataatgatactcttaaacctttaacataatctttaatacctatagttttagtataagtgtataccggaataattggcatatcattcattaacatatcttctgcttcatgcattaatgcaaatctctttgtgttatctgcttctttctttgcttctgtaacttttgcatcatatgctggattgttgtatcctgggttattttggtctgtatttgacataaattgatctaagaatgtcattggatctacatagtcaccattccagccatctcttgacattagatattgcttcttaactcttgttggtattaatactttaaattcttggctcttaagttcagtatttacaccaatctttttccacatatcttgaatagcctgcattgtttcaccatgcccgctttctggattaaacattacttggattgttggtaatccttgtccatctgggaaacctgcttcagctaataacttcttagcttcatctatatttgcttttgaatcaaagtaagtttttgtggctgtataatcttttcctgatggatctaagcagccctttggtacaacaccagtagaaggaacttgaccagcctttaatacattatcacaaattgattgcctatctatagcaaggcttaatgcttttcttacctttgcatcgcttaacactttagctgctgctggatctacatcttttgctttatctgaaacgtttattgatatataccaagttgcaaaattaggaaatgtcttagcagttccatcttttaaagcaccttgtacatccgattttggaactgtatcaactacatcaaattgacctgattttaaacttgcccatgctgatgtttcttctgcaacacacttcattgttaatttatcaagttttactttatctttatcaaaatagttttcatttttttcaaatactatttgatcttttatcttgtaatctgcaaatttgaatggtccatttgatactaaagttttcgcatcagttgcccaatctttattggcttcaacaactttttgatccactgggaagaagtatgcttgccctattaattcaggaaaatatggacacggattttctaaagtaactgttaatgtagtatcatcagttgcttttacttgaacttgatctgcagttgcttttcctttgttatatgcttctccattcttaatatagtatcccatatatgcatattcagaagctgtttcaggatttaataatctcttccattcatattcgtagtcctttgcagtaagtggatctccatttgaccattttaaatcttttcttaaatggaaagtatatgttaatccatctgcagatacatcccatttttcagcatctcctggaatagctttttcatttttatctaattcagttaaacctgtaaaaccatttgctattaccatactacttacagtatctgagtttaatgctggatctagagttcttggatctcctcctaaattataagttaattcttgcttgcttgcagttgctgctttatctccgttcttagaaccaccacaaccaactaagattgatgctccaagagttgctgctaaagccactgcacaaagttttttcactttgcttgttttcattttatattcccccttaattaattattatttattataatacctgtttaagttattattgctaaaaccccttaacagtatactattcaatttaatttcatactgcatttttgaaatcacaccataatttcccacacttagtgcttttgctaaaattaattatataaatgacatgctacaaaatgtcctggttctacttcctttaattctggatcaacctcagaacaaattggcttcgcacatgtacatctacccttaaatctacatcctggtggtggatctattggcgatgggatatctccttctaatactattcttttattattcttagcaaccgctgggtctggtattggcactgctgaaagcaatgcttgtgtatatggatgtaagccttgtgtatacactttatggctttctcccttttcaaccattcttccaagatacataactcctatatgagttgatatatgtttaaccattgaaaggtcatgggctataaataaataagttaatcctaactcttcttgaagttcttcaagcatatttataacctgtgcctgaatagaaacgtcaagtgctgatattggttcatcacatactatcaatgatggttcaactgccaatgctcttgctatacctattctttgtctttgtccacccgagaattcatgaggatatctgttaatgtgatcactcataagaccaacttttgttaagagacttcttattctttctgttcttgcttcacctgttagtaatttatgtatatcaatagcttctccaattatatctccaacagtcattcttggatctaaagatgcatatggatcttggaaaatcatctgcatatcttttcttaatggaatcatttccttttttgaatgctttgttatatctagtccattaaatattacctgtccagatgttggttcatagagctttaatattgttcttcctgtagttgtctttccacaacctgattcacctacaagccctaaagtttcccccttgttaattgtaaatgaaactctatctactgctttaacataacttttaccttgaaataagcccttatttgcagggaagtatttacataaatccttaacttctaaaattatatctttcttagcttccactacttcatcctccttataggtgattcaacttctggtgcatcctcatggcatagccaacatgctgctttatgtttttctcctacttcaaatagtggaggctgcttttgaagacatatcttcattgcataatcgcatctagctgcaaatggacatcctactggcggatttaataaatctggtggttgtccttcaattggaacaagcttttccttcacatcttctttaggatttggtacacttcttaaaagtccccatgtataagggtgttttcctctgtagaatatatcctctgtagttcctgtctctactattattccgccgtacattacatttattctagaacaaacgtctgcaacaactcctaagtcatgagttattaatataatggccgtatggagtttttctcttaaatctttcattaaatctagaatctgagcttgaattgtaacatctaatgctgttgttggttcgtctgcaattataagctttggttcacaaattaagctcatagctatcattgctctttgcctcatgccccctgaaaattcatgtgggtattgtttcattctcttttcaggacttggtattccaactagtccaagcatctttatagcttcttttttagcttctgccttgctaatctttctatgttttaataatggctccattaattgatcacctattgtaaatactggatttaatgatgtcatagggtcttggaatatcattcctatatcattgcctcgtatagtttccatttgagactctttaacgtttgaaatatctttaccgtcaaagtatatttgcccgcccgaaattctcccattgctatccagtaatctcataattgacatcatagtaacacttttaccgcaacctgattctccaactattcctaacgcttctcctttttccaagtaaaaagatacacctcttactgcatgtacttcaccagcaccaattttaaaggaagtttgcaaatttgttatgtctaataatttttccattattctttcttccccctatctcctgtttttaggatctaatgcttgacttaatccatcacccacaaggttaaatgctaatattattatacaaatcgttactgctggaaatattaattgagttggatatgaataaatcacctgcattgcctcatttgctaatgtaccaagagatgctctgggagcagctattccaagaccgataaaactcaaaaatgcttcagtaaatactgcttcaggaattaatagagttaatgtaaccattattgatccaatacagtttggaattaaatgtcttatcaatattctggtatttgacgcacctaatgactttgctgcaagaacaaattcctgttgcttaagttgaagtatatctcctcttactattctagccattccaatccagtaagatattgaaagtgctaatacaattgtaagaagaccacttccgcttgatcctggtttatttaaaatagccataattattattacatatatagttaatggaattgcatatattatatcaattattctcattaatatattatctatctttccaccaaagaaaccagctattccaccgtagaatactcctataactaagtttataacagctgctaatactgcaataattagtgaatatctagctccataaaagtttctaacaaacaagtctcttccaagattatctgttccaaaccaatgctctgctgaaggtgttagattagtttgtgctaaatcattagctgcataatcatattttgatagcattggaataaaaatagctccaaggactacaattactattacagcaagtgatataatagcaaatttatctttttttagtctcatccaagcatctttccaataactaatgctcggtctaactataactgcaatcttcttttcgtcttcgcttagagaagtaaataaatccttttctattttcaattcattttccattcttgtttcctccctaaacttctgtatcttctaattttattcttggatcaattagtacatatactaaatctacaaagaaagcaaaaaatactaacattgttccatagaacgcagttactccaagtaacatagtataatctctatttgtaactgattgtacaaattcatttccaagacctggaatagcaaaaatcttttctactataaaacttcctgtcaatatgcttgctataagtggcccaacatatgtaactactggaattaacgaatttcttaatgcatgtttaaatataattgtgaatttgcttaaccctttagctttagctgttctgatatagtcagctttcaatacatcgattaatttacttcttgtaagtcgtgtaacaaatgatagagataatgcagataatgctatacatggcattatacaattcttccagtcactgaaccctgttgctggtaacagtccaagttcaacagcaaatacatatattaaaactgctccaattacaaaacttggtatagtcgtacacaatgttgctaaaaatactatcaatttatctggccatcttccacttttaagcgctgcaagaacaccaaaaattataccacctaccacagctattactactgctattgctccgatcttagcagatgctgggaaagatttagctatagcatctgttactcctcttcccttaaaagtcattgattcaccaaaatctccttgaaccacattttttaagtacattgcatattgttctaataccggcttgtccattccatacttagcttccatatttgctttaatttctggcgtcattttttcaccatcaaatgggccccccggcataagtctcattagaaaaaatactattgtgattatagcccatatcgttaagaggcttataagaaatctttttccaatatatttcaacatatatttctctccttcttttttattttatataatttattttttaatacttggaaattctgtatgattatttaaaatttttaataaaattttaaatattttttgttttcttggaagcgcttccacattcgcttaaaaatttcaatatattatggcaatggagtcattaaacaaaactaaaatgtctaataactccgttgttatctatttatcaatatttaatttttactccataaaatttaatttattctcaatttaatactataataataatcttattctctaaaaatgtcaatattatatttgaaatagataatatcaattctatataaattttataaaatattaccattatgatgaactaaatatatgcattataaatctaaatattcttgattttaactagtttccaatgattaatatcatattcttctcatcctaaagatataacttattatctcgattataatttctttgtattttaaaaaaatatagagcgtttttattaaactccatactttttttgatatcataatctaaaatagcatctatgcttgttgtcctaatttatttatagatttaaattattattatcattagactttctatcttttacttaattttataaatttctataatttatatttgtttcttctatatttaatctatcgcctcttacttgatgaactttttacaattagtttgcataatagattttctacttgttcaaacacttcgctagtatcgcactctaacaaatttgcaaaaaatccactcaatgttctaatctcactatcaggatatataccctgataagatttgagcatttccacaaacgtaatataattagcttctacatacgtacccgtattatctttttttcttaatgcctgcttaattaaatctaaatcctccccacctgtatttgcaaaagcaatttctgaataattgcctgctaaaagaaaatcatctaatatatgactactcataaccatttccttgtttataatatttttatagcttgtaaatagtatttcaacggcttttaaagaaaaaagcctagtatattcagttgctctgggagataaatacgattcaatggcatgaattaatgcatttatagagctacttataagcaggtctagtggtaatttgcttagtaattctgttatcataactgtactatcagcatataattcatctgcaacaaggcttactttcatattattttcttttaattctaatgcagaaacattatttacttcacttccgataccaagtttagttggaactaatactaattctttttctttaattatttctaacttattattgtataaatctacaactggagaaatatttgttaaggaaaataattttccaatctctaaaatacatttctccccaatagcaataatcctttcatgagatattcttctaacatgttcatacatactctcaactatatcctcagacatatctccaattccatagttctccttaaacagaactgctgcttcatttacattaaatttcaagcaattattgtatatttcttttcttgtaattatcagatcatctttgcctatgtgaaattccctacaaaaagttttacaatcattatatttatatatcacaggacctaacattaattgtctcataagcacatatctccttatcatgaaaaaaatgctatatatattgatatatagcatctttacttctaaatattaaattccctttttgtatcttccaatgctgcatccattctctcaataacattatccatatctttttttgaaataacagctgccggttcaaaacggatgcatttagcatttactaaagttcctgcagtcataacgcctcttttaaataagcccttagcaacagagtatcctatatcactttcacgaaactctactgctaacataagtccggtacctcttacctcatttataactgtaggatacttcttccataacatttctaaccctgactttaaatattcacctttttctttacattgtcctggaacatcattttctagcatatattttattgtagcaagcgctgctgaacagcaaactggatttcctccaaaagttggtgatcctaaaagccatggattgtccactaattcttgtgtccacattttaggcctgcatataatacctgttattggcattattcctccaccaaacgccttaccaaaagtcatgatatcaggagttacaccttctgcttcgcatctccacattgttccagtcctgcccattccagtttgaatttcatcaaatatcagagcaactccatattcatcacatatttcacgaacttcttgcaaataaccttctggtggaatgataatccctgcttcaccttgtattggctctagtataacggctgcaactttctctcctactgcatatagattacttatagctttccttatatcttctgcattgccatattcaacgtgttgaacttgctgtaccattggtgtatacggcactctgtatgtgctcttcccccccattgaaatagcacccattgatttaccatgaaacgctcccactgttgaaatgtaccatcttccacctgttgcaattcttgcaagctttaatgccatttctactgcttctgcgcctccattagtgaaaaagcaatattctaaatcacccggtgtaatttcagcaactgcttttgcaaggtatcctcttaatggatctaataattcttgtgaatgtaatgcttgatgatcgagctgtgcttttacaacatcaagtatttcctcatttctatgcccacatgtataaattccaaatccacctagacaatctataaattcttctccatataatcctgtgcaataggctccctgatctgtccattctacaactgctgcatttgttgatactgattttctgtatttaagccatcctggacttacatagttatcaaaataatttattgtatcctttgtaattgattctttttcctcgtttgttaatccatcgctttttatatatcctataactctgtttaaatcttcaataatttgttctctttgtgccataataattactccctttctaaaattaaaacgacgcattacaatgattttaaatcagtaatacgtcgttgtatttaatctattttctttattgatattattataaatcagatgccctagttaaaacaattctctcaatgtatggttattgcattattttagaagtacgtatactactttataagtatcttctttccttgttagtatatacttacaataatatttaagtattataaccgcatgtacattttatgtaatttatggtaaaatacctttaataatctcgcatatttatagaatatttgtgcagatataaatattagtaatatatagttatggaaggtatctatatgcaaaataatgaatttctattaataaataatataatttatcagatatatagcattccggattttgatacaatgaaaataacatttttgaacctactaaaaatgttaattcctaatacagcctccagtattttaatggctgaccatactaattcgaagaacttggtatgtgatcccatctgtgtccctgaggtttactcagatactgaaaaaaattaccttttaaatgaagatgaagattatactcgttgggtaatgttgagtggacaatgcctacttattcgtgaaagcgatttaatgcctgaagaagagagagttaaaacagtactatataagaaatgctacgagccatttaggcttcattactcattacaattaaatctcgtatataatgatttatttttaggagttctcacaatttatcgtagacgagaagagggagattttacctcctatgagatgttcattgtaaaggcctttagcgatcatctcaatcttcgcttttatgaatattatacaaaggattcaaaaaattcttccaatatatctttctctatggcaaatctagcctcgaagtataatttaactaatcgcgaagtagaagttttacaattaatctttcaggatatgaataatgatgagattgcagataaactttgtataagtggatatacactaaaaaaacacattcagaacttatatcgtaagttcaatgtgtctacaaaatggaacttattaaaatttagagaataactgaatacttaaagtgaagtgcgaacaacaaaaatagaacatatatgtactctatttcggttgtttgcacttcactttatattcttcacaaaaccaattttagtgttcgtaccagccaattggtcctggggttaaattgatgtttatttgttttatttcttggtattcttctaaaccgtggacacctagttctctaccatatccactcattttatatcctccccatggtgcttcgttgaaagttggattataacaattaatccacgtgatacctgctctaatttcctttattacttttaatgctctagttccatctgatgtaaatactgctcctgccaaaccatatatggtatcatttgccaatgctatagcttcttcttctgttttaaatgtttgtattgtcacaacaggtccaaagatttcttcttttacaattgtcatatctgaagtacagttatcaaagatagttggtctcacataatagccttctgcacattccccttctgcgtatcttttaccaccacaaactagagttgcaccttcttttttacctatctcaatatattttaatactgtttccatatgctctttcgaaactaatggccccatgtcaggattatttaccggattacctatagtcattgcattagccttttctgaaagacgtgcaacaaatttatctttaattgattcttcaataataatacgtgaacctgctgagcaaacttctccttgattaaagaatataccaaccatggcccattcaacagctccttcaaagtcagcatcagcgaaaataatatttggagatttccccccaagttctagcccaacttttttaagatttcctatagcagctcttgcaatactttgtcctacttctgtgcttcctgtgaaagtaaccatgtctacatcattactttcagctatttcctgccctacagttccacctgaacctaatactaaattaacacatccttttgggagtcctatttcatcaaatatttcaaataatgcaattgttgataacggagtatttgagctaggtttaaatacgacgctgtttcctgctgcaattgctggcgcaagcttccaaacggccattaagaacggataattccatggagtaatctgtccgcaaactcccactggttcatgcactgtatatgaatgcatttgcccaaaaccatcatttacatcataaactccaccatacggtttagtaattaatccagcataatatctaaaacaatggattccatcgtcaatatccccctcagcctcacgaagaggctttccattgtctattgtatcgagcattgcaaatttatctcttttttctgatatcttatctgcaatttgtaaaagaatatcagcacgagcttgtgcattcattctcctccattcaccttttccataaaaagattcttttgcggctgcaattgctagcttagtatcctcaatcccgccttctgttgtctttgcaattacttgtccattagctggatttattacatctctcgtctttttagaaatagcttccacccattcaccattgatgtacatctttttaatttccataatatctcttcctctcatttaattaatataagatctctcaacttatttttgctaacaatttattttgctgtgaattccacagattaatttctattaacaattaatttcaaagtctaataaatatctgtaaagcctgatttcttaagcatattctgaagaatatatatggtaaaaaatacttattcttaagaatatttatggtaatattccgaagaatatatattctaatattctcaagaatatttgtggtagaccttattagtttattccatacttctcattgctcccaattccacataagacacctatctttaatagttttccctgcacttatatccaatacttctttaccttttagtgtcatgactccatttacaaaaacatattcaatgccttctggccttgtatctgtggctccaaagcatggataatctgctttatcttctattatttttgcatcaaatattaaaatatctgcatcagctccaactccaataaatcctttatttattaatcctaagcgttttgccggcatatatgtgcatcgtcttatagcgtctattaaagtgattctatgctgctctcttaccatagttttaaagaatttaggatatgtccctgcatcttggggatgacctggaactccagcctcgtataatgtccctgcatctgtagagaccattacataaggtttttctaggatttcaaatacttcatattcttctcctaccatgcctatgaccgtatcatccggataatttcctctaagttcttcatacatttctttggttaatctcttacctttatatttaccagtcccagctattaagctgctataatcgcatccccacttttctatgcagccttcatcaaaaacagcacttccaatggaagtcgcaaatccactatacattccgctatctacggatatatctagcccttcggctaaagcttcttctatcatatgaagagctgctgttgccattcccattccaaactgataagttaaatgagatatatttacagctgcacctgtttttctagttatgtcaatagcttctcttaagctagaaaggccaccataagagtctgaccttgtatgaattgatactaactttccatattgggctgcaacttttgctagttctaatacttccttccttgagcttccaggaacatattcaagtccgaatgataatccgctgactccaaattcaaatgcttcttcaaggataaccttcatcttttcaatttcttcatcactggatgatttatatctatcagtaaccccaacttgttctctcagagtagtatgtccaatttgttctatttgattgattaaaaaactatcatacttattgtagaattccttaatattttctggagacattccacaattaccattgtatactgtagtaactcccatggctgctagcactctagcacaatctaaatccccctctacatgagcatgaatatctataatacctggacatactattttgcctcttacatctaattcaatgttacctttcatttcttctcttgttatagcttttatttttccattcaggattccaatattagcaatagtactcttttttcgctttggatctattatggttccattcttaataacaacatcatatttaatcattaactcaccctcttattcaagttagtaaacctttattccttattatctttatgaacgtgaagataaataacaggtaaacatactgttctactattctcttattgtgccttaagcttcctaacttgaaatgcagtatttaaagctataattataatagttataaccattattactgtggataaagcatttacttccggtgttactccagtctttaccattgagaaaattttaagtggaagtgttgtacttcctggtccagctgtaaagaagctaattacaacatcatcaatggataatgaaaatgccagcatagcaccagacaaaactcctggcattatgagcggtaacgttactctccagaaagttacaatcctatttgcacctaaatccatagctgcctcttcaagatatttatcaaatccagcaagtcttgctctcactgttattacaacaaaaggaatactgaaagtaatgtgagataaagtaatactaattaatcctaaaggaatactaagaactgaatatattgaaagtagagcaataccaagtactacttctggaattactatagggatgtataataatttatctattacatctcttcctctaaatctgtatttacttagccctatagcaccaatagttcctataatagttgaaataatagtacttataatcccaataatcaaagtatttgaaagcgcctccattaaagttctatttttgaagaaggtcccataccattgaaaagtgaaattttcgaaagtaatatttaactttgaagtattaaatgaaaaaataattacatagaagataggaagatataagaataagaaaacaagataaatataaatatttttaaatattctagatatattctttttctgcatctttgtcattttacatacctcctaagtcgtccatattaccacctgatttttggtataaccatacaagtaccaaagtaattacaattaaaaatattgaaattgctgatccgagtggccaattcctggcggttataaattgagttctaataacattaccaattacttgagttttacttcctccaagtaagtcagtaacaaagaaatatcctaatgaaggaataaatactagaatactgcctgcaaatattcccggcatcgtaagtggtaaggtgacttttataaaagaagtaataggttttgctcctaaatcactacaggcttccaaaagcgatttatccaatttttcaattgagctatataaaggtaaaatcatgaatggtaataacatatatactagacctatcatgaccccggttgtattatatactagttgaagtggttcattaattaatcctaatttcaacaatagtgaattgataataccgtccttgcgaagtaaattgatccatccaaaaagtctaattaacgaacttaccaagaaaggaactattaccatagccataaaaacagtcttctttatagttgttttttgggctataaagtaagtaaatggatatgcaattactatacagattatagtcgtaaaagtcgaaatcaaaaatgattcaccaaaaacctttaaatataacggatcaaatacttgtataaaattatttaatgtaaatccaatgacaactccgccgtaagcccccttattcataaaactcataacgaaaacataaacaaatggaatagctactagcaaaatcatccatgctgaaactggaccaactgtggttataagaggcatgtttattttctttttacttttcatttaagcacctccttattttgtttggttctctactgtaaatacgggattatctacaacattgaagacttcttggctttgtgatttaataacaactgcatcttccttttcccaatacacatatacttctgaacctattggtagtaattccacttttggagtagtattcatctttatctccattcctgttggaagcataattattgttttattaacattcccaatatagacatgctcttttacttttcctacaagagtaaatccttctatcggttccttagataattttatattttctggccttactagaacataaattatttcattatcgataacctgagaatctaatactacaccatctccattttctagctttacttttagtacatcattttctagcttattcgcaactccataaaagatatttgactccccaataaaatctgccacaaatttagattttggcttttcatatatttcctttggtgttcctatttgctctaaatctcctccatacataattgcaattctatcactcattgtaagtgcttcctcttgatcatgagtgacataaacaaatgtaattcccaactttttttgaagacgcttcaattcaaattgcatttgctttcttaattttaaatccaaagcgcctaaaggttcatctagcagcaaaacctttggtctatttataagggctcttcctattgcaaccctttgtttttgtccaccagataattgatctggttttctattttcaaatcccactagctgcactagttcaagaatttctgtaacacgctgtttaatttctgctttgttaactttcttgactgataatccaaaagctaaattatcataaatagtcatatggggaaatagtgcatagttttggaaaactgtatttacttctctctcatagggttcagtgttttgaacctcttcaccctcaatataaatgcttccactagtaggtgtttcgaagcctgctatcattctcaaggttgtagttttaccacaacctgaggggccaagcatagttaaaaattcacctttttttatatcaataaatagatctctaactacatgattatctccatattttttatttatattatctattttcacgataacctcagacatttaatcccctccaaagtcttatttttcacccttatcctttaaacttagtccataagtcagttatttttgatacattttctccaatatcttgtaaaccctgacttttcttcatttcagcctctgggatattcataatattgttatttttaaagtcgtctcctagaatctctttagctgctttgtttggatttacatatgggaaagtctttgaaatagtagcacttacttctggatctaatatatagttcattagtaagtctgcattctcagaattcttagctccgttcactttcatcatcatatcaaatgtgaaataaatgccttcttctggataaactactttaattgctggattctccttagctgctagagcgcattcacctccataaacaaggcctaatgaacactcaccatttaataataatgtttttggactatcaccgttgaatgcatgaatatttggtttcaattgtgttaaaaagtcctctgctttctttaatacttcatcgcttgtatcatttatcttatatccatttgtcattaatccaatcccaactattggtctggcatcttcaacaacaaccatggtatctttatacttaggattcaataaatctttatatgattttatattatccttaattttatctgtattaactgcgattaatatgcttgtacccagataaggaatactgtattcatttttaggatcatttgcttcatgtaaatattgctcatcaatatttttgaagttctctattttacttgtatctaatttttgaatcaaatcttgagattttagtatattaatatcttgagccgggccaataatcatatcatatgtccctttgcttcctgacttaacttttgcaagcatttcatctggatcagtaaatgtagtcatattaactgtaactccatacttttcttcaaaaccttttaggacatcatctggtagatattcggaccagcagataacatttaattccttactttcaccagaattttcacctgtacttccattagaagttgattgagtatttgaaccacagccagataagctcattgttaccatacatcctattgttatacttaatataagtttctttaatataccttttatcatctaaatcactcctctaaataaaaatagcttttatgcttataatttcctaactcttctatcatgagctaaaacaaaaaagtgcataaagatattcatacctttatgcacccttgcatctaaatatttataattataaagccttacttcctctttcacctgtcctaatacgaacaacttgttctatatttctaacaaaaatttttccatctccaacattgccagttcctaccttgtctattactgataagataatatcttctattatattgtcctctactactgcctcgactttaattttgggtaataaatttatatttgtttttaaacccttaatctcatttacaccttctagcgagcctctttgagttccacatcccattgcagttgatattgtcattccaccacagtggtattcatccaaaatacttttaataatttctaatttttccggtcttataattaatactatttctttcataacctctctcctccctaattgcaaaattatatacaaacttccatctaaacaactatttcactacttcttgtgaataatatactatcaaaatctttttataacaattcaccaaaaacaccattttaattatcctttttaatatatagatacccctaaagtagtattctcatcctctttctttaaccatcttaaatagctgaactctattcttaatacctagctttctatatatattaagtacatgtttctttaatgtattatttgtaatgcataatttattgctaatctcactgttctctaatccattcattagttcacataacacagcttcttcccttttggttaatccataagtatctacacactgggaaatagatattttttctccacccatggaattattatttagatcctgatataacctaaaggctaaatgttctttaataatatcaagtacaaaagaatcctcatatataaaatcttcttttccttttattctaaagaaacatactacaccaacaaactgatttttgtgtgccaatatcatatttagtgtatgatgccaattgttaggttcaaagtactttttatagtattccgtctctactctctttttctctgaaataatatcactttctctatatactttgcttttaccaccaaacattaatcccctgctataatctataccgtcatacttgtccatgtaattttcatctgctctaggcttataattgtaaaatactggtttaaccaatgtatggctatttaattctgatgcaatataaaaatcagcactatcaaaatctaaaactaaagccatctgagtaaggaaattttttcgcatagtagtagaattctcaatagaattaatctgatatactatattgttaataaccatccaatcatttgtttctaaactacgcatttgctaaaacttcctttcctaaagtattaaataatataaaataagaggcatatgtaattctcttaatgagatatttacatatgcctctttgcacatatcaatttacttatatattattttactcgttcactattcgcctttcaacattatcatttgattattttttatactaaacatactcctttaggagtacatttaaagtaattataaagctatattttaattgtcttcatcaaaatataatactgattcagtttctctacaatatttaacacacatacactgtgctaattttcttggacatttataacataaacaagtcagatcctttccattacatcttccttgctttagttctccacaatctccgcaatttactccatttcctgctggcataatagtatcactactcctttaattaaactgtataatttaaatattatctcaaagttagttaatgtcaacttcttaacctaattatttgaaattacaatagtaatataatttaatgattattatcatagaaacatcttaactaccaaattcctattctatcccccggcttaacatacataccatctttttcagtaattccatatgtgtcatagaacttttgaaattgtggcaggactgcatttactctaaccttattaggagagtgaacatctatgattaatgcatatgttgcatattcttttgttgttatctgtctccaagtgactgcataactttcaaaaaacgctttataatttgcattattcatttcacctaatatatctaaaagacaggacactccacctatatctgcaatattttctcccacagtaaggttgccatctaacttctcacctggcattgcttcaatctgactataaaaatttgcaaccttttgagttttttgcataaattctttataatcctcttcggtccaccaattattaaggttaccatcagaatcatattgagccccagtattatcaaaggcatggctaatttcatggccaataataactccaattccacctaaattaacttccttaggtgcatttacatcataaaaatggccttgaattattccgcctggtataataattgaattttctgttgcactataaaaagcattgactgtttgaggtttaaactgatcttcatctttatccactagtttgtttattttattaaacatcttatcacgctcaaatattctaagtgtcattgcattttggaaaagtgatccaccttcttcgtatgatttaatatctaactttgaataatcattccaactgtcaggatacgctatctttatctttaacttatctagtttatcaatagcattttttttagtttggctactcatccaatcaagattatcaattctctttttataaactgctataatatcctttgttatggactctacatcttttttagtcttttcaggaacatatttttcagaataaagtcttccaatggccattcccatcatagaatttacattatcaacggcctcttcctcttttgatacattaccagttatgcctagcatattacttgcgtattccttattggcattttcaaaatcctcacttaaataatttgatgcatatagtaaattaactatttcaatataatttttaatgagaggtaaattttcttgattatataatttattaaatgctttcagccattctggatcttctaaaataatcttattagctttgtctattcccacataattcataatttctggtagatttaaattgggagctaaattatttaattctgctactgtatatacattatattcttcatcaattaaattcttagttgtagccttttccttttttcctttaatatacggagccaccatttcttcaaatttaaacatatcatcgacttttttctgagattcttgttgagtatatccacttaacatcaatattttattataataatcttccgttaacttacgctcttttttgctattctctgttggattagtatattcatctgaatttcctaaactaagcgcagtaggacttatataaagtatattggttttcacatcttttatatctttttctacggaaaactttattgttgagtttaatattctcttatccttccagagcttagtaatatcatctattgttccaattgatttaatttcatctaaattttcctttactggttttatcccttctctatttcttgcttctatatttaaagtattattataaatatttattattttcttctcatcactattttctttatacacatccttattaatcaacaaattgttaattatatctttgatttgttctgttactttattctcaacatcatcaaacgtagacgcagtagattttccatcttcaattttagcatttttaatccaatcactatttactgcatcataaaaatcatcatttaatcttactccttgactattgtttgttactgatgactcctctgccattgcaacattatgtgacccattagatacaaccagtataaatgctaccatacttgctacgatacttaactttttaatttttttcattactacacctctctttcaggatagttttttataattagcgtttataacttactattaacctctatttatattacatgcgtaataatatttattatgtttcactaataaaaactactccctagcccctttagctcataaaattcttagtggtttggcttgtctagatagatatatccatataaataattggtatcatatatttctctatacctaaaagttacaccattccaagttgattctgatatataaattttaccgccatctattttttcaactattgctacatggccatcgcctccagaattaggcatgttagatttccaaaccgcaatagctcctactctcggttgagaaccatactgatatttaccgcttttttgatttgcgccccaccattcataggcatttcctataaatcctgcatcacttggcttcactcctgtaatttcccaagcacgtccccaagcataccatgtgcaatttcctttgattggttttcctccactataaaatggtggtgaaagtttaactttataaaaaagattatcatcagaatagtaatacttattatccgtacttggctgtgtattccttatatcactaagtgaactactgatcgtattagaatttttattatctattgatggagtatctatacttgaattagatgtattagaagagcttgtattttttgttgtatcatcttcaggtttattaaaagtaacccatttagagcttacccatcccttttttccatttattattataggatagaatccattcttttcatcattaacaattttgatctgtgcacctttatatatagtatcaattatatctgatgaagttgatgcatctgatcgaacatttaatgaatcattatttgttgcaacatatgcaatacgggaatttgtgtcatcctttacaccatttacattctctgatccactttctatttgctcagtattaccatttagcatttctccgctatcagagaaagtataaactttgccatttatgcctaatgttccagtttccatttctccattgaaattagtataataccaagtgccattgtcatttacccatcctatgctcattgccccatcattattaaagtgataccacttttcaccaacctttttccaccctatagtcatctctccactattagataagttgtaccattttccattatcattaagccatactgttttcattattccatctgcattaaaataataccacttttcatcaatttctttccaaccagtagttttaatatctccatctaaccagctccaaccattgttcttatcattaatccacttggctgatgctgagatataacacatgtttgttaccattagagttgtcattcccgttattataatctttttaagaaattctttgttcactttcttttccccttcataaattatttcttatacgtaactcataatatactcttttattgtttatacataaaaattactaaatcaatttcaatataaaactaatctcaataagctaaaagagtccccccttggaaaataaataatactctaggaattttaatccttatacattaaatattaactcaaaatcacttaattaacaaacataattataattaaaaataacaaaatctgtatttagaaacataataaacttttatatttctaaatacagacactctttgaacaattattaaattttgcaatgtcaaaatcctctaaatgaaaattctaaaactcaattaaagaaataaccttattataatcaacacaataacaccaggaactccaaaaaagcctgctattaaagcggtaattggattaatcgccagcgaaaaattaacatttatgcctattaatccgagatttgcaataataaaattagctaaatataatattacaacgcctatgataccatttataagtatttttatcggccattttagtaatcttatcattaaaaataataatattatccctgctaatccgtatattaaatattgtccctccatatttagctcccccactttatttattcaacaattcgtacattattttctactacataattatgttctactcttatccccttttctcttgctattgataataagtaatcatatctttttcttgcaacattctctgaataaatagctacttctattaatttgtcatcgttaacattattaaacatgctacgagccacatttatttccatttttgcaatttccatatcatgtaataacttagcatacatacttgagtcattagtcttgttcatcaggtactctacaatattttttttattcatgtaaatccctccaaaaaacttcttactaccattttatccatccaatggtaaaaatatacataatttgattccataatttatttcaataactgtaacactttttcaaatctatatatatattatacttaagaagcttttcactaatgcagatagaaacttctaactcccatctatgtaacactttttttaggaacctaatcttatttaggttcctctattttatatctcttttcttccctctagtgctttggacagtgtaatttcatctgcataatccaaatcaccaccaacaggtatacctgaagcaatcctagtaactttaacatcaagaggtttaagtatcttagatatgtacattgcagttgcctctccttctatattaggattcgttgctaatattacttcctttacatcttcgttcattctagaaacaagctctctaattcttatatcttgaggacctcttccctgcattggagatatatttccatgtaatacatgatatactccattgtattctttaaccttttccattgtcataatatcttttggctgctctacaacacatattgtacccttatctctattaggattcccacataatgcacaagggtctttatctgtaaagtttccacatacggagcaatatttaaccgttccttttgccttaactaatgcatccgcaaattccttaacttcatcatccggaagatttaagatatgtaatgttaatctttgagccgtcttttgtccaatacttggtagcttggcaaattcttctatcaacttttctatggctactggataaaactccatcataatttataattctcctttatctatattttagcctattataaaaagcatacaggctgaagttttttctacactcctgtatgctaactattataactattgaaattcttagaataacccgcctggcattccgcctgttagtttacccattttgcttgaagtttcctcttcagcttttcttagtgcttcattaacagcactcattactaggtcttcaagcatttcaacgtcatctgcatctacaacttctggttttatgttaattgatgatacttcttttttaccagttacttttacaactacagcaccaccacctactgatgcttcaaattcctttgtctcaagttccttttgcatatcttccatttgcttttgaagcttttgtgcttgcttcataaggttattcatatttccgccaccaaagcctcctggaaatccaccttttgccataaaaaatcctcctctttcttgaatctcattcattaattataaaacatcttttattaatactcaagtttaatgaataagtaacttcctattcatcatatatttcaaatggtattccttctattgtttcttttaataactcttcttgatcttttacttcattatcattttttactacataatctacaattactttttcctttagaacttctgaaaatacggtattcacaatttctctgtattctgccttctgcaacctatctttattaaatgcatacattgaatcatattcaagtgtaactataccattttttaagctatatggctttgctgtaacaattgaagcataaacaatcattgccctctttgccttgaacttttctaatatttctgtccatactctcccaatatcatctattgttaacgatgagtttggattagcttctaaattaacactattactatttatgttacccttattaatagcatttctactttgattattatttgaattagttcctatattattatgtgcagattttaattcttcattaatattttctgattgaaccattcgaatcttgccactttttaatgattcctccaacttgtttattcttgataaaataacctcatttgaagtatcatactcaattttacacatctttataatagcaagctctaaatataatctactttgcttgctagcttttgaatttgcttccgaatcctgaagtattctaatagctctcattatttcctctactctaatctttcttccctgctctttaatcaaatgaatattttcaagagacatatctaaaacttcttctggattatttgtaacctttaccataagtaaatttctaaaatgtgctattaaatctttaatgaacaattgcatatccttaccagaataaacaagcttatcaattataatcatcgacttttcaatacttctatctataatggcgtaagttatgtcaaacaaatattcattagttacaagtcccaatatactaactaaatcatcgtagttaattttatcttcacccatagcaatcgcttgatctagtatacttaatgcatctctcatcgcaccatcgcagactcttgaaattaaatccaaacttttttgctcataagttattccctgtgaatctgttatctttttaagtctactagatatttctttttggcttattctcttaaaatcaaatctttgacatctagatagaatagttataggtaacttttggggatctgttgtagctaatataaatattactctcttaggaggctcttctaaggtttttaagaacgcattaactgctcccactgaaagcatatgaacctcatccattatatatattttatacctagcttcttgtggtggatattttgtgtcatctataatatctctgattttgtctataccattattagaagcggcatcaagttctgttacatcaattgctaatccctcatttattttcctacacatctcacactcgttacatggttctccattatgtaaatctagacaatttaatgcctttgccattacttttgcagttgatgtttttcctgttcctctagttccacaaaaaagataagcatgtgcaattctatcgtttaaaatttcattttttaacgttgtagttatatgttcctgcccaacaacgtcttcaaaattctttggtctccactctctatatagtgctgtataacccacgggataccacctcgccatttctcttaaatataacattattatacactattgcttgtgcaatgcaaaatacacaattagtcttatattacatatatttgaataaatatttttaatataaaaatatttaaaaataattgctaatagtttcttcaacttgcactccttctgaagaccatgtacttgtaatatgcttttatataaaatatattggatgacttgttaaatactttaggttaaaatgtatattgaataattttattataaaaatagtttttaaatataaggaggcatatctataatgagtttgtatgatgataaatatttagccattgctaatgatatattagaaaatggttacttcgataataacagaactggagtcaagacttataaactacctcatcaaattatgcaatttaatttagaaaaagaatttccaatactaacaacaaaatttgtggcatttaaaactgccgttaaagagcttctttggatctttaaagatcaatcaaacagtgtaaaagaacttcaatctcaaaacgtaaaaatatgggatgaatggatgatggaagatggaactatcggaacttcttatggttggatagtaaaaaaattcgatcaaatggataaattaatagatgcattgaaaaataacccccaagatagaagaatgatgattaatttatggcaaattccatatctagatagcgctccattatatccttgctgctttcttacaatgtgggatgtaactgatgggaagctcaactgtatgcttgttcaaagaagcggagattggggacttggtgttccatttaacacatctcagtatgctgtattagttcatctattagctcaagttactgggcttaaaccgggattatttactcatgtaataaataatgctcatatatacgaaaatcaagtagatggtttgaaacttcaacttacaagaaaaaatgatgcatataatgcaccaaaactttggatcaatccagaaattacaaatttctatgattttactcctgacgacataaaattagaagattataagcatcatgaatctataaaaatggacgtatcagtataattaaatttaaggcatatgaaagaaaataatatacttttgattatgcctaagataggtgggataataaatgatttcaataattgttgctattgctaaagataatgtaatcgggaaagataacaaattattatggcatatttcagaggatttaaagagatttaaaaaaataactacaggcaaaaaaatgattatgggcagaaaaacttttgaatcattgcctggaattttaccaaatagagaacatatagttctaactagagataataattttaatgtagattcagataaggtgacaatagagcacgattttaattcagtacttcaaagatatttagaatgtgaagatgaagtctttgtaattggaggtgctgaaatttataaacaatttctcccttatgcaaagaaattatacttaacaaaagtagatgaagaatttgaaggtgatacatatttccctggaattaattattcaaattataatactgaatacacatcagagaaatttattgatgaaaaaaatggattacattatacttttgtaaatttaatacaggcgtaaatatacaataatattagttttaaattcatattactctatcataattacaaagaataaaattctattttatacatgggctaaaatacaactttaaaataaaaaatctttagaattggggaatgtattatgaaatttgtaacttttaagcatgaaggtatagagcaagtaggaatactagctctcaatgagcaaggagtttatcctataaaatctcttggcattaattatgatagcatgatcaatttaatagaaaacataacagatcatgaaatgggccttttacaaacatcattaaataataacgataaggaatatatctccatggaggatatttctaaaatgcctccaatacctaatcctaatcaagatattatttgtttaggtatcaactatatggaacatgcggttgaatctgctcgatataaaaacgaagcctttggtggggatagaccatatgcagtatatttttccaaaagagtgaatactgcgactgctgatggtgattatattcctagttatccacaaatagttgatagtctagattatgaggctgaattagcagtgatcattggaaaagacgctaaagatgtacctaaagaaaaagcttttgattatgtttttggttatactataataaatgatgtgagtgcgagaaaccttcagacaagacataaacaatggtattttggtaaaagtttagatggctttactccaatggggccttgtatcgtcactaaagatgaatttacaaatcctccaatattaaggatatgctctagagttaacggagagctaagacaaaatagtactactgatcttatgattacttcaatacaagacgtaattcatgaattgtctcagggaattactttaaaggctggaactattattgcaatgggaactccagctggtgtgggcatgggattcataccgcctaaattcctaaagtctggcgatatagttgaatgcgaaattgaaggtataggctgtcttaaaaatattgtaaagtaaatagtaaatttaaattaaataggataagaaaatgagggtatttcattactgaaatgccctcactttcttatcctattgtgtcctatgttaatcctattgaagaataacctaattaatttttcatttccatgctataattaaacattaaaataaaccatgcacctcgcttcgttattagttttctatacgttactaatgcagttagctcagaccagattgatccacggcacatggaaggaaccacttatcgctgcttccttccagatctgacgaggttcatgggcttccattgcgtgggacccagtcatcaacaccacttacaaaagtcagactataaatcgctaatacctaagcgaggaattcaatcctgctatagcggattgcaggttacagggcaccgctaactccccatctagcatggcaatggtggaatgataagggtttgcaccttaatttctcctattgagaaaatcgtctcttctcagacgtcaaaccatattaatcattgcttttatcaaaaacacatttttaaaattattattaatttattaaatgtcattttcgatacttgttaatgataacacataaaaagtctaaattcaagaacattattactgtctttatgttaaatttattccatgactagtatttctcttctaaatcataaaaattagctttctaagttaaataattcatacctaattaccaattaattcttaccaataatgtactctaagacaggatcatttttattaacataatcatctatagatatttctattttcttatctggtataaatgaatcactttcatcatcacatatctcaacgtaacttgtagaataacttacattaagctttgaattaggaagcgtaaaactttttatttctccataatgatttggttttccacttgttggctgacctataaatgtagcattggtttcttttctccaatcaacagcatcaactattgaagctgaaaatgttgctcttccaactataacataaaagttatctttagtatttaatttgctattctttattccttctataatatcctgtaggttactggcgcctccaccagaattatctctcatatcaatcacaaatttattcacatcattattatttataaaacttaagacctcattattaaagtcacttagttttcctgatttattattctcttcacataaattatatttaagatataaaactttatctttttctaaatattgataccaataattcaaatctcgtttttgcatatatcatggatatgattcatcaaatgtattatttatgataaatgttaaactattattagcatcactatctataggtttcacatttacatcaaatatctttccttgtttatcttgaaaagtaaaaatagtatcttcatctatattatctatgatatttactccacgaagaatttctggtctggataaatatgtaggtacaaccttttttattgtttcttcattctcttgtgctgctaaaggcgacaatttattttcgatttctttaatatcttgtccatttatttttattaacttgcaatttaaggcatccttatattcatctattgtgtcaatggcacatattccatccttaaaataataaaattggaacggatatgccttcgaaaactttcttgtaacttttgtatgtccatcccctacagctgcaacaattttgtacattctatctattatctcatcatcatttaggttatcaactgagtttttcaaaccatctatttctttattaaattgctcttcactaactttaaagaataaatttgcatgtttatttggtaaagcttcttgcaaataacttaaatccttcttccatttttcgtttctatccccacccaaatactgagtctcacagccagtagtaagtaaaaccataaatattaaaagaaagcatataactatatttataaactttttcatttttaactccttaatataaaatattatttaaatacgtgataataaataatagataaacatattgttctattattttttgattgctccttaagcaatatcatgtttattataatgatagatacaaataaacattgatataacgaaacagcatatcccactaattacactataatttaaatcaatcaagtttggttcgtatagctttttgataaaattgaaaggtattgaaaaaggaaggtactcaccaaatacaaaactatcgtgaactcctgatattacaattcccaccgcaccatatactactggaagcattatgttcctgcttagattcccaattagtattggtattggaattattagaaactgaaaaaataaagagtataaataaaattttatatgattacttacaaatgtaaactccggatgttcatgatataaaatgtaataacctaagtatatagatacaaactccactaaatagactaaagaaattaatatgcaaatggttattagtttaccaataaaaattttaatcttgctcattggatatgtatatactatacttgaagttttatcggcaaattctctggaaaatacatacgctgatattaaagaaaataaaatagtataaaatataacaaaattaagttgttctacattagatgcatagctctcaaaacttctttgtttttcagaacttactactaatactgctaagttcattaatattgttgaaaaaactccaccaattgtaatcaataacattatataagattttttcaactttaagagctcacaatatattaaatttaacaaataaatcactccaatcttaattcacatctgcatttttgctgtgataaatacatagaaacatagatataccaaaagtaatcacagcacttcccacaactgcaatgtaatcaataggatctcctctgtgataatgataaaatggtaatgctggtaacaccaacggacaaagctgaccatatatactgccactcatcaatatcgtcataactcctaacccaataattcctcctaaagctccatacacaatcggtattataatatttttagtaatattagcaattaacactggtattggtattaatattagctgcagtagtacagaatatatatttacttttatatccttaataataaactctgctggaggcagtactccaaattcaatatatacaactaagtatgatataaaaaattgaattaaatacgtaatcataattagtatccctactgttataaacttcccaataaatattttaattctactacttggataggtatataaaatattcgctgttttatctatgaattctcgtgtaaaaacataccctaccactaaagaaaaaactataataaatagaaattgaaatgataatgtttctgcatttatcatttgattctttataaaatgttgtatttgtacttgtgacaaattactaaaatcatttgttatggcattaaaaaaattaacccctggcaataaacatccgctaataaaaactataaccaaaatatacgacttcttaagtttcatgaattccgaatatattatattaaacattaacgttcctccaaacataatctaggccctaattactattataaaaaattgcattaaactgaattactctattgctttccagtgagctttaagaaataatcttccaaactatctgcttttacgcaaagctcatctacacgtaaatcatttgaaactaaaatcttatttatatctgaggcttgctctaaattttcatatactcttaaattattcttttcccatataacataatcgtttattttgagtttttgctctaatataatagaagctttcttatcatcatcaacctttatattaatataatgtcgattccttttttgtaattcatcatatcctatttcctcaagcaactctcctttatgaattatccctattgtagttgccatctgttgaatttcacttaatatatgacttgaaattaaaaatgtaattccctgagtatgacacaaatctaaaatcaattctctgatttcctttattccgcttggatcaaggccattagttggctcatcaagtattaaaaattccggatgatgcaaaatagccctagcaattccaagcctttgcttcatcccaagagaaaattcttttacctttttgtttttcacatcttgtattccggttatttttaaagcattaattatactttctttatcttgaatccccatcattcttctatgtatctctaagttttcgcccgctgttaaattagggtaaaatccaggatactctatcatagaaccaattctttgaaataaatttctattttgttttgtgatcccttgagaaaataattctatttccccaactgttggtcttattagtcccataatcattcttatagcagttgtttttccagcaccattttccccaagaaagccatagatttctccttgtttaatattcatattcaaattcttaactgctgaaaaattcttgaaactcttagttaagttatgagttcttaaaatataatccatttctattcctccataaatttcttacatatcattttagctttattacatatgacattcctaaaaaagcatttattttaaatatctattatttattcgattgtgcctaaaaaggactatgttataaatatacaacatagtccttacatcgaatttaataggttcttacatatttcttaacttttgaatatcaattaccataaattcatctcgacaatcttaaactttttaggatgcttacaaaataacattcttgattactctttaacgagaataatatgttccttttctacatccgctaaagcttcaaaaatttcaaataattttttatcatttacttcattcttatatctttcgtaatagcttacagcatgctcttctttctgcctggccaactctaaaagagcactatcactactatatttatcataatttactttatttaagttaggtgcttccgtaaatcctcctaacttctgatgtaatcttgaatgaaacttttctatgtttgctaatgcttcaaatacctttttaacctcactattctttgccatggttgctgcagtactataaaagtcaccattaaaaagttctagcttaacagcatgatctaaaatctttaatgtattctcatcaagtaaattactttctactctaataatttcatcgctttcacttaaatattttttccccgctccacagaagggacaatatataatatcatccttagaattcttatttgtaaaagctaattcattaaaatcatagtttctttcatttatctccatgccacatattttgcacttcaaataacccaccgcctttaatcttatataaatttttgcatattatcttattaaattatctcttctcattatttaatattttttaaatctaaatttcgaggcagtgtaaatgtaaatgctgttttttcaaacggaatactagaaactgaaatggttccattcaaagcctttaccagcttctttactatagctagtccaattccactgctccttgtattaattcttcttgatttttcaactgtatataatctatcgaatatataatttatctcgttttcgggtattccagcaccattatcatatacttccacagaaattttatctttctgattaattaagctgatacctattactgtccctttcaatccatattttatagaattatttataaggttagttaaaatcctgtttaatgctctttcatctcctaaagcgtaaacatcatcttctggaagatttatttgaggctgtatgttaagtttctttatttcataaaaaaagccaataatattctgccttataatttcagaaacatttatctcttttatttctaaattaatatcattagaatccaatttagaaagttcaaagaactcttccattaaattatataaataattccctttattataaacaatttttaaatattcttctcttttgtttaattctgtagcatctatattatcgtctaatataagctccatatatccaagcatggaagttagaggtgttctaagatcatgagacatattagatatcatcctttttcttgattcttcattcctcttatttttttcatatactttttgaaattcttctattactgagtttacctttatacttaatgtactcaaagattttatattgttctgcaatcttattctttgatttaaattcccatctgaaacttcatctagcaccttacaaatattatttagttttttgaaaaaagaaataaaaagcattataaaaataactataacaaatattaatatataatttaatgtattcatattattcaccaagtttatatcctattccccataccgtttgtatatatttaggttcatttggattatcctcaattttatttctaagccttttaatatgaaccattacagtattattatcatttaaatattcattatcccatacactgttaaatagttgagcttttgtaaaaaccctactagggttagacatgaataattttaaaagttcaaattcctttggtctcaaacttaactcctgttcatttttaagcactttataatttaagatatctaatttcaaatcattatgtcgtaaaatagtatccttactttctatactattataatcaacatatctcctcaattgtgcctttgccctagccaccaattctcttacagaaaatggctttatcatataatcatccgcacccatgctgagtccaattattctatccgtttcttcatctttagctgaaataataattacaggtacagtactcagctctctaattcttcttaaaacttcaataccatcaagatatggaagcattaaatctaatatcactaactgatactctttgttatatttttcaatagcctgtttgccatcaaaagcctgaattatattataattttcttttattaaagcctcgctaattaagttatttatttcctcatcatcttctactactaaaatattaggtatttccaccttcatgccccctattaagcttaacttagatatctattctacatattaatctagccaaaacaactccacctaaactcaaaaataaattcaaaaaaatattagccattccaatcaaatactttccatcacttattaaatttattgactcaaggctaaatgtagagaatgttgtgagtccgcccataattcctgtagttaaaaataatttcaaattaggagatataagctctgtagacatacttaattccactatcattcctataagaaaaccaccaactacatttactattaatgtacctagtggaaaattagaattaatcatttttgaagattggattgtaaccaaatacctaattactgcaccaatacctccacctattccaacaaataaaattttttgcaagtaattcactcctttttgcacattaatatctttcaagaaaataaacattttcttgtaatttaaacttctgtggtaacttaccgaaattataaatttttttatttctagtatagtaatacattccaagtataagttcactataagcttgtttatatatattatagatatcctaactattaattagatttatactattaattatttaccacactagaaatggattgaactcttttgcgcagtgttgcatttaaaatctggttgtagatatttcttcattagaagttgttccatttcggttggctcatgcataaatctagattacgatttggatacctataatagaatctcctcttttaggctcttgaaagtattgagtttatcttttgaaagtaacacttttctttgattttttcaatctaaaatttagccattttatagctaatgtgaatattattagtactcctattatactcattaattcaagcataaaaaactcttctggtaatgcatttattataggatcagttctaggatcaaatatccagtaattatttctaaagaatattttatgaaaataaataaatgctttagaaaaatcctttgctgatattgcaccaacaaatatgaatattactgccatcatatttacaccactattaaaatttgctataagcttcttttttaaatcatttgatttattagccaatactttaaatattataacgccaataaatattatactaaatacatatagcgctataaatattctcttcacctcaaaaaagtgtatccttccgaattcactcataggtatactattaaactttaattccttaataaacggattctgaacataataaattactcttttatagttatccattaatatttctgttggcaatccagtgtattcatttaatttgtatctttgtattgcataactatatatactagttgtatttaaaacacttagaactataacggatataattgatatcgcataaaatatatctctagaaatccccaaagctattcttaaaacttttgaaaatatactcttatttatatgaattcacttccttaaataatctaattcgcctttaataaaaccacttatgattcaaaatcacaaatggttttattataaaaattataaatattctaaattgtttttttctccattgaaatgttaacctcaatattcatatctccaacacccatttgcacacatacaactttatctgaacttgcatttgcagtaaagtttccatggacaagagttggcgtagatatatttatattaatatcttcttttgaaaaattagttgctacagttgcagttaacatatttgtaagttctgaaattgcactttgagccaattcatcaaattgttcaactggcattcccatcatcattgtagatgctattcgttttgcatcatctaagcttaacccataaataacattacctttaatgtcacctataataccaacaataatgacaactccaggactctctatgaatctacctcttaagcttattcccttcttctctacatcaggtaaccctaactgtggcaatacacttgcaaaagaatttaatattggatttatataattgacatccattctccttcacctcttccaaagcctatactaattgataaatctccgaactgagttttcgcattcgcagaataagtagtttctaattctgctttcgatatactaattgattctccatggaatgtggttggcggagcaacccttaatccaaatatcctatttcttttatttatcattgaacatgcatttcctgccgccatatttgttatctcagacataacattaagcatttcttcagtattctttacctctctcttaagcaatgcttttcctatgctattagcagtttcaaatgacatatcgaaaattattcttcctgaatactttcctataacccccatgacaattgaaattcccttgctaattttctcaacattttcattgctttcatgtgtaatcaccggtactgttttagtaagcttattaaatacatctaatagagcctctctaaatactgatgaatatagaccttccaattctaaaaacagttcttcatctgccataactctatttattaataatgttaattcttctgcatctactggcttttgtgcgtacccacatacgtgattctttttcgcttttcttactatttcatcatccatcatagaactaacaattataactttaatattaggatcaattttatgtatttcccttgtacattcaaatccatcagttcctggcatagtcatatccattgttactaaatccggcttcatatttgtaacaacctcaatagtttcctctaaagaacccgcttcacccacaacattaaatccactttctgtcaataagtctctcaataaagcaatttgaaaaggcgagtcatccactataacaatattcacatttttcataattacaccacctacccctttatttataaatacaatcaacctacctaactttaatatcaatctgtctcacaattctctttttaaaaataaccattaaaattaatacgctttgtaagttaatcatattatcattatattttaaaatctactaatactcaacgaaatttctacataatataataaatttatcatattaatacatattctagttaagataaaaatcagtaaattactctatttcttattttatatttatattatattttaagcttgtcattttctgtattctcagataatacttatgcttacaaattcttaatttatctatatttattatccaaagagtattttaatataaaaaaataaagccaattacagtaataaccttttatgcaatattccatccattataaatagccctataaactatcttatagggctattcatatatacttattatttaagttttactaataattcacctgttttaacttgttgtccttcacttactaaaacagattcaatagttcctgcactagatgcaacaatatttgtttccatcttcattgcttctaccacaagtaaactatctccttctttaactgtatctccagctttaacaagtactttaattatagttcctggaatacttgcaccaatttctaacttattatcagtatcagccatcttggaagcattaactgaatttaaattgcttattattctttctgttttatcttttatttttatctctcttctatttccgttaatttcaaaatctaaagttctatttccttcttcatctaacttgccaatttcaactagttgaacaatcattgttttaccttctgcaacttcaatttcactagtttctccttctgcaagtccatggaagaatacatcacttcccatacggcttaaatcaccatactctaatatagcttgaatatatgcttcaaatacatctggatataatgcataacttattatatctttcatgcatggtgtaaatttgtatttatcttttaaatatgcttcaattttattaaaatcctctggaggtagtaattctccaggtctaacagttataggctcttctcctcttaaaacaagttcctgtaattccttagggaacccaccttctggctgacccatcattcctttgaaatatgaaactattgaatctgggaatgccatattcttagccttttcaagtatattttctggtgtcaaatcatttttaaccatgaatatagccatatctccaaccatttttgatgacggagtaacctttattatatctccaagcatatcatttacttttttatacatatgttttacatcgttaaatctatgcccaagtccaaaactttcaacttgtggctttaaatttgaatattggccaccaggaatctcaaatttataaatttcagcacttcctgacttcaaatcagactcaaattgattataaactggtcttactgtatcccagtaatcagatactttttgaattccacttaaatcaatacctgtatctctatctgtatttccaagagccgctactattgagtttaatgctggctgacttgtaagacctgacatactattgaaagttgtatcaactatatcaactccagcatctgctgccattaatactgtagcaacaccattaccagtagtatcatgcgtatgaagatgaataggaattgaaacttcattcttcaatgcagttataagtttcttagctgcataaggtttaagtaatgcagacatatcctttatagcaagaatatgtgctcccattttttcaatttccttagctttatctacataatatttcaagctatatttgtctctagtttcatctaaaatatcaccagtataacataatgcaacctctgccaccttattacattttagtacttcatctaatgacacctctatgccttttaaccagttaagtgaatcaaaaattctaaatacgtctattccattctctgccgattcttttatgaatgctcttattacattgtcaggatagttcttatatccaacagcatttgcccctctaataagcatttggaacataacattcggaattctctttcttaatgagtcaagtctcttccatggagattcctttaaaaatctataagctgtatcaaaagtagctccaccccacatttcaagtgagaataagtcatttccataaacagctgttgccttcgctatgttcttcatatcctgagttctaacacgagttgccattaatgattgctgtgcatctctcattgttgtatctgtaagaagtagtttcttctgatcttttatccatttaactacgccttctggaccctgagcatctaaaatttgcttagtaccacttaatccatctaaagaagttatagttggaatatccggtacatcatattctttcttctttcctttagtctcatttacaactttttctccaatgaactttaaaattctatattcttcgtcacttctcgctgttatatcaaataattgagggttatcagctataaaattagtatcacattcaccttttttgaacttttcatgatttaacacgtttattaagaaatcaacgtttgtcttaacgcctgaaattgttaattccttaattgcacgtatagactttctaactgcatcatcaaatgttctcgcatatgcagtactctttacaagtaagctatcataatatggacttattattgcgccactatatccattccctccatcaagtctaataccaaaacctgatccagttctgtacacatcaattttacctgtatctggcgagaagttatttgtaggatcttctgtagttattctgcattgtatcgcatatcctcttggctttatatcgtcttgagaatttattcctacttccttagaacctaattcgtatccttctgctattaatatttggctttgaactatatcaatacctgttgtcatttcagttattgtatgttcaacttgaattcttggattcatttctataaagtaatgatttccgtgcatatcaactaaaaattctaaagttcctgcacttctatatcctacagatttagctattttaagtgcatctgcacatatttcttctctcttttcttgcgttaatgataatgccggagcaatttcgacaaccttttgatgtcttctttgaatagaacaatctctctcataaagatgaactatatttccgtacttatctcctagcacctgtatttcaatatgttttggtccttcgatatatttttcgataaacatatcgtcattgccaaaagcttttttagcctcatttttagcatttctaaaagcaacaagaagttcttcctcgttccttactattctcatacctctgccgccaccacctgcagcagcttttatcattacagggaaaccgcacattttagcaacttcaaaagcttcatcctcagatgctataggtttttctacccctggtattactggaacaccaacacttttagctactatttttgatttgatcttatcccctaatttatccatcatttctggttttggaccaataaattctatacctgcttcttcacatcttctagcaaagtctggattttcagataaaaatccatatcctggatgaatagcatctacatgtttttttaatgcaagatttattatttcgtcaatgtttaaataagcttcaactggccccttattttttccaatttggtatgcttcatgagctttagttctaaaaagagcaaacttatcttcttctgtgtatatagccacagttcttattccaagttcatgacaagctctgaaaattcttattgctatttcgcctctgtttgcaaccagtactcttttaaattttttccccaattaaaatacaactccttcaatgcttatttttttatttcatatgaattatcttttactgcatggattagttcttaaaaaccaattatgcaatttttataactcataagttgtcataatacaaattttgttcattaaaaaattaatatattgattataacatatttgacgctaaatgatacatattatttatcttttctattaatttttacacgatttttactatggctataagttattttttttcataaatatgaaatttaaaaatttttttctttcatttttctgtatttatataccatctcatttatctatttttctttcaattcagatgtacaattaggacatcttgttgccttcggatcaatttcagtacagcagtatttacattttttcttatcaggaataatattttcttcctttttcttggtaagtttgcttatttgctgtataataataaaaattgagaatgctacaatcagaaaatctattatattatttataaatatcccatagttaactgtagctactcctgcatcttttgcttcttgaacagttttaaaatttccacttcctaaactaaaaaataaattagagaaatcaactcttcccatcaataagccaactagtggcattataatatcattaactaaagatgtaacaattttgctaaaagctccaccaataacaactcctatcgctagactaaccatgtttcctttcatagcaaattctttgaattccttaaacatttttccttaacctcctctatattaatttattgtttaggtgccaactgaattaggattgaattactcattcatataacttactttattatctgtcactttaacttttttattctgttaccatattcgctttcaaactttacttcataattttcggctcttaaaaaaataagttaacttataataattctttgctgaaaaagtaaaaaaggtatatatctcttttatttttacagatatataccttaaagcatttaatttctgaaagtagtgttatccgactattctatatagcttaaattccataggacctaaatacattttggtaccaataaatgatgattccaaagtaaaaatatcctgtacttcagcattaatacgaatactaattatgctactctcataatcattattaattgctacaattacttttttatttttatattctctttcaaatactatattatttcctttacaatataatactttgaatgttccatatacaagaaccttattgttttttcggattaaaataaactttttataaaaattaagaagttcattattttgattttcctggttccatatcatgcactttcttgattgtggttcctctccaccatttagaccaacctcatctccataatatatatatggaactcctatgtatgtgaattgaaagacaattgctaatttcattcgctcaatcttctcaccacattcagttaaaaacctttgtgtatcgtgactcccaatcaagttccacatttgtcttgttatgctatccatataaatatttctattaatagataaaatctcactaaacatttttgcatctatggttctgttaccaaagaaatctaccaacgcacctttaaaagggtaattcataattccatcaagctgatctccttttaagaaagagctagcctcatgcataatttctccgataactatggcttcttttttatggttttttacagccttcttaaaatctcgccagaagctatgatctacttcgtcacacacatcaagtctccaaccatctattcccatttcatctatccaatactttgctacatttaatagataattttttacttcttcattatgcgtattaaactttggcattgttgcaacattatcagcaaaagtatagtaattcacttcttctaaatttaccggaaagctatctataaaataccagtctttatatttagatttttcttggtttaaaagcacatcttcaaatgcaaaaaaatctgcaccagaatgattaaataccgcatcaaaaaccaccttaatatttttatcatggcatttctttactagctctttcacattttctatattcccaaattgtgaatcaatcttataataatcagccgtattgtatttatggttagaagatgacttaaatataggcgttaaatataacagatttacgcctaaatcttctagataatctaatttattaattattccttgtatatctccaccaaacatcgatgtttcatttacttcactaccccatttagcaacattttcaggatcattactcttatctccattgcagaaacgatctacaaaaatttgataaactatagcttcctgaagccatttctcttcattatatacatctggtttcgctatataaggatactggaacgccgtcgcttcttttcttcgtatctcttctcctctgagccctctttcatctaaaaagaacctattcccttcattatctattagctcaaaaaagtatctatacctatttctctctatagatatatcggttgagaaaaaatcgaataaattattagtatctttaattttcattttttttatattgaaactattttcccaatcatatctgcttttatagtgtatattgcatatttttatatcatttttagcggctctaagcgtaactgataaagtgtctatatcttttgcatatgcatatggtgtatctaatatgtgatatattgcatgtttattcaatttaaaattcctcctctattatccctgcgattgtcctattcttttactgctcctgaaactaaaccttttgaaataaacttttgaatggctacaaaaagtattgcaagaggaactgaaatcattatagagcaagctgaatacataggccaatccgttaaatttcctgctgtgaatgatcttaaacctatcactaatgtttttaaatccttatctttaagtagcgatgttgaaaatacaaattctccatataccgcaataaatgagaagaaaaagattactacagacatagacttagttaatggtaaaattattttagtaaatacctgccacacagtagcaccatcaaccttagctgcctcatctaattctttaggcaagccatccatgtatcctttcataagccagatattatatgcacttccagcacaaagtactagggataaaaatatcagattatccattccaaaaggcagtctatatgcaactgctaatattgctggcacactcattattgttggaaacatttgaagtattaataatagcattaagcctttttttctacctataaattttaatctagaaaatgcaaacgccgctggtaatgtcattgctaattgaataattgatactaacactgcaacaaaagtagtattaaccatccatttaataaaaccaacattatcacttaatgctttttgatagttttcaaaagttacagtagtaggaataagatttttttgcatgaagcttgtcccagtggaaagtgatgctgatacaatggcaaacaccggaaatattattattattatggacgctattaaaaatatgcgctttccccataactctattctttccgtattagtaattcttttcttatatactagtttttcctccaataatatagatcgtttatctatatttacattaacttttgccatcagttttccacctccttaaattgtcctgaaatcttcatattaataagtgataatgtacctattattataaataatagtatagacatagctgctccaaggccaaaattccctttatctactgacattttaaaagttgcagaacctataatatcagtccatccagcgaaagatgaacctgcttttgctggtcctccctcagttaacaaataagcagcattaaaattattaaaattaaatgcaaaatttgatatcaaaaggggatatgagacacttgctaatgatggtaatgttatctttttaaatttttgccatctgctcgctccatcaatatttgctgcttcataataggcatctggtattgctgttaatgcaccaatacaaatattcatcatataaggaaagcctaaccataagtttactataataacagccactcttgctgccattggagtagttaaccataaaataggatcattaattaagtggaattgcattaaaatactattgatggctccatattgactattaaataatcctttaaatgaaattattgttattgctccaggcaatgcccaaggaattactaaaagtcctttataaatgaaagcttctttcatattcttgtctgacaatgccatagcaaaaattagtccaatggcaaatgcgcctaatgtagagactattgtaaaaatcaacgtccatccaagcagtggaaaaaattcgctttttaagggacccactaatacctgttgaaactggtaaatcccaaccattttccatccactaacagtgccataaccataattctggttttttaatgtataattagtaaatgctatgaatattgtatataacattggtaatacacttaatatagctatacttattatagctggtgaaagatatctataaccctgcatgctatttcttaatgtaatactctttcctgctttagccatattttcaccctctcttaatgttttaatgtgcattattccaagcttagttaaaaaaacaatttacttatataattcagaaactaaagcttggaatcgtttaagtattttaattattactagctttaatattgtcctgaactgctttttctatatctttagccactgtagctggatcttctccgtttaatattcttgacatgttatccataggtttccatatcgcttcaatttctggtatattaggaattggtactgctgaacttgtctgtgatataaacccttgtgtaaattcattgttctttatctcatctttatttaattctgtcttaagtactggtattctatttcctatcttatatagtctttctcctgaattattagctaagtacttcattaatttccatgcatcgtcttgtattggtgatttgctacttacaaatccagcttgcactcccattagagtttttgcttctcctccgtttatctttggaagcttgactactccaaagtttacacctgcatctttaaaaccgctaatatcccaaggtcctcctatataaaatattgcatttcctgatttaaatgaactattagctatatcagcagttatatctgctggcatgaatttatccctttgtactaaatcttgtaaaaacttataagcttttattgctccatcatttgcaagtcctatgtcatcaacttttaaacttcctttgtctcccccaaatatatacccgccataggattgaacaaaagccgcaccataataaaactcattcattgaaaattgaaatccagatgggccataagcttttgcttgacttactaaatcttcaattgttttcggaacttctttaaccttatctttgttgtagaataaagcataagtttccatcgatagtggaacaccatatgcctttccatcataagatacagcatcccaaacagcactatttacataatcatctctgtttgcaaaatcttgtggaacttctgcaagtaatccagcttgatgaaatgttcctaagttgttatgagttaatccaaaaactaaatctggaccttttgatgaatttgcagcttgcaaaaaagattgaaacggggaattatccttaactacttttaccttttttccattttcttttgcccattcttgagcaatattatttaattcttcaacttcattatccattaagtatgaccaaaccactatttctttactatccttttcagctgagccctgatatggttttccacatccaccaagcattgatgtaaaacaaatacctacaactaacatagttataatcttcaattttttacgcatcttaacccctccagatcattgtataaaataggacatattgttaaacgattgcaatcttcacaggtttattatatcaactttatatttaataattggttttaaattaaccttttttgtttttaactatccaaatttctatatattagtatataatttaactaatatacaaacttaattatcatttactaagggggattttcatgtatgatgcatatgattctgatagttatttctttagcaatgaaattgcttttttgctggaacaaaaagataaacaggcaattcttaacataattgagcagaaacataaggatgagaataaagaatttattccaatagcaactaaaaagaatgatttaatgatttggaacgttatatttgctagagaaataattaagcaaggcacatccaagcaatttatacatacgttatataataaatattatagaacaattcaaacattaaataacctagaactccttcaaaagttagaaattaatattgctacatcatatttagatatattaattaattttgttgaagtaactgataattttattataaataaggttattggctttttatatatacatttggaagatcacttaagtctcaatgaaatatctaatgatttaaatgtttccgtgggatatatctctaggtgctttaagaaaaatatgggcgtatcaataatggcttattttaaaaatataaaaatagatagagccaaaactttacttaaaaatactgataagacaatcctcgaaatttcagcacaactcagcttttgtgatcaaggaaacttctcaaaagcctttaaaagtatagttggaattagtccaatggaatacaggaatacctatcacttaaaagataaataatgaataaaaaagtgcctatgttaacaaatactcgttaactaatagacacttttgtttatgtattcatgacttctgttttttatattctttgattgatagaccagtacactttttaaaccaattgctaaaatagttaggatcatcaataccaatcttttttgaaatttcataagccttcgcatttgggtttttgagcatttcagtaactattttcactttagtatttacaatatattccgaaaaagtctcatcagttttttccttaaaaattctgcttaggtaacttggattaacataaaaatattcagctaccagttttaaagatagatctcgattagatatatttttcactataaattttttaatttgttctatacttaagtttttatcctcagtttcattagcatcatttaaatttattatattgttgtatacaaccatcttttctttaatatccttgtattcctttttctttagatattcgtcttgaatctcatcttttagctttaatactgaatttcttaattcatcttcatctataggcttaaggataaaatcatttataccaatctttatacttcttttagcatattcaaattcattgtaacctgtaattacaataacttttatatctggatatctttctaatatgcttttgctcatatccaatccatctgttacaggcatatttatatctgttaaaataatatctggcttttctttatttattagattcaatccttcaactgcattagaagcttcagctactatctccatgccaatttcattccaatcaatgcaattttttattagatcccttataagatgttcatcatcaattatcataacttttataatgttatccataaaataatccacttccctttagaatattcgttagaaatcttaatctatttcttaattctaggcatcttaatagttattctggtaccaacattttttttgctttcaacaataaattcgtgttcatctccatagaacactcttaatctttcctttgtagttcttactccaatgccagtagttttattttcatttatatttctaacttgtgattcatccatgccattcccattatcctctagggtcaatataactttttcttcctcctgaaaggtagatatccttattcttcctttattcttactgcttctaatcccatgataaatagcattttcaactaacggctgtaatactaactttattatcttaaaatcgtcgcatcgtggatctaaatcatattcaacctcaaacatatcctcatatcttatattttgaattatcagatagctttttacagtatttatttcttcttttacagtaataatatcttttccattatttaaacttgttctatagaatttacccaaggcttttatcatttcatatattgttttattttttccgagtagagctaaagaattaatagtatcaaacgtattgtatagaaagtgaggctttatttgtgacattaacaaattcaattcattttgcctttttatcttttcatctttacgtattttatccaaaagtaaatttatttgagaaattgcaatgttatatcccttttttaattctcctacttcatcattgtacgtttttatattaacaatattaaacgctccactttgaatccccttcattgattcactgagcttctttaaaggcattgttataaatttagatattactatagacccaataataattaataggaaatttattatactaaaacacaaaagaaaataattagtatactttgtttgctctggagattcattgtattctgctacagtcgtcagattccagttgtagtctgaatttttaagatttgatattatataatctttatcttgtattctttcctctagaaaaaacacttttgatttagaatcattataattttttattctacttagcattttagaatcagcctctgacccggttatcaattcacctttatcattctttataatcagtcttgttccatactgattattcagcttcaaacttaaattatagaacgcattctcgttcatatttataattattaaaccaattttttcaccagtatttatatcatttatttctcttatgagggatacataattattaccataaccctcaaaaaatcctccaccatttaatcttagtatatatttacccttaccctctaataattcattataccattcagaatttttaatcttatccatctgaaaatccttataaaagacattttcggaataatacttattgccatagttatctaatatatatattgaagatatattagagctaaaattagtgaattgtatcagataattactaatattatcataggcatttccttctttctgaactctctttaatgtattttgaacattgtcacttgatataatcatctttgagacgttattaacattatcaattatcatgctcgtattagtttctgcactttccaaaacctcaactgaactttgtttcatcttttctatattataaatagaatttattttcttatatgcaaaggtaagtatgactgttgaaagcacaaaaattattgaaaaatatacaataatctttatacttattttcgaatttaaatatttatctttcaaattctttaatataaaaaatttattatacatttaatcatatcctcatcattctattttcaccatttcctttgtgaattcttcaggacttatttgtcctttaaacaactgactaactaattccttttctttgtttcctttttcctctcccaagtaaatatcgccatataagctatatgatgcgttctctgttaatgtctctaattctttagataatttatttaccttactcttatcatcagtgtatttccatgctggaagtcccgaaccgaattcaaaatatctttttgatattctttcagctataaattttgccgcatcaacagcctctttcttatattttgtattattacttaccattaagtgatccactgctccacctaaaaattctctatcattcccatctccttctttaactatcgggaatttcttaacgattacattctcctttatagatgggtccatattccctatctcaccgatgaaccagtttcctgtatagtacataggaatctttccttgtttaaataaaatttcagactcatctcttgtaagctccatacttgattcattaaaagcctttaaatctattaattcctttaatctatatgcggcctttaatattgtatcacttttatttgcgcctatatgtggatcactagttccgcctattcctccttctcgtagcgctaaaatatcataatagagaattcctgtccaattatctttttcccctactaaaagaggtgttatacctttattcctaaaagcttttattgcatctagaaattcatcataattttctggtactttaatatttgcttgtgaaaagagctttgtattacagtaaaatgtcccaactgataaggtcattggtaatccatatatgttgttatcgtaagttacattgttaagcatatctttattaatcttatcttttgtatcttcatctatatattcattaagatttaatacttttccagattctataaatggcttactaaagccacctccccaagaataaaatatatcaggcagctcgtttacagcaaatgctgtctttatctttgctttatacctttcattttccacagcctcaactttaatttggacattaggattagccttattccattcttccaccgtatcctgaattatccttccattagcatccattgtggtttgtgaccatatatgccacatggttaatgttattttttctttattttctgtatcatttttgttatctaaagagcaaccactgaaactaactaaaaatattaaaattataggaaataaaattacttttttaataattatccctcccaaagaaactgataattaggtagatactgagcaattactgtataactttgctataagcatttttataaacaaaactaatctcatcttcctacctgataaaaaattctcacttatcattataaattttaatgtactttactatgatatcatcagtttcctaatttatagttgataaacttattctagatctttctgcctttaaattttccttctttaactatatctgtattatgcttttactgcaagacttcaagttcttcttaaagcataaatatactttatgttttgataaaaccgaaattcacctcttaatacagctcatctagatagtaaacctattaatgacctcattcaattttaatgttaattcactttgattctgcgtattaaaggaaatttgctctacttctttggttacttcatttatactatctaatatttcattagaattgtttttagatttctctatattacttgaaaactctctcattgtactatctacattgtcaatatttgaatttattgcctttaccatgatagcaatttcctcagacatttcatttataaatctagcatcattttcataacttttactagattctatcataaactcataatcatcgtttacgttttgttctatatactttaaaattccttttgaattttctgataaatattcaaatacattttttatttcttctacaattccatgaataccacttacagtagtaatagattcttctgctagctttccaacttcatctgcaacaactgagaagccttttcccatttctcccgctcttgctgcctctattcttgcatttaaggctaaaaggttagtctctgaagcaatgcttactatagattcacttaaaacttctatttctttaactacctttcccctctctatagcatctttaatttttttgtttttctcctcatatatctttctagataattgtatggaatcttcgcttttttccatcatgctacttgatttagtttttatatctactgattttctaacctcttgatttactattgcagctagattatttatattttcattaatcttttggatagataaaacaaatttctcggttgatgaactcgtctgctcagctcccactgctatttcatctgtcgattcatttataaaagaaagttttgagcttatttcttgaacagatgcagctaattcctcagatgacgctgatagttctgttgagttatctagaattgtcctaataagttcccttacatttttcaatgctatattaagagcgcctcctgtttgtgcaaattcatcttttcccttaagtataatttcctccgaaaaattatactgtgcaagattattcgcataattctttatcttctttaaaggtactatcatatttctagtcattgcatatcctaaaactatagtaagcatcaaccctgctattataaaagttaatatttgtatctctaccttactatataaatcagcattgttaatattctcattctttgccttaatcgagctatactctaataatttagttagtgatgctgcaaccttgcttcgtgatactgataaacttcgataatctagtatagcttcatcataattattttcctttacaagctttagcaacgaatcacttttttccttataatccttataaatttcattataatttacaagctcattctcttgatattcatctaaatttaaccctctatattcatctataagtatatttccttgttcaaatccttttgaaatgtcatcatttaatttttttatcattaattcatctctatcataaattaggcttaatatgttattatttatttccaatgaatttgcgtttaatctatgtaaaacatctatagatacaagatctgtattgtacatactatctgatgcattattaactttacttaaactctttaaacctatgactcctaccgatgttataattatgaataatagcgtgtatgaaattaccagtcttttacccacactaaaattattcccaaaattcatcctctaaacctccttgtaacctttagttcaaagcttgattttcatatgtatcttaaatcgcttataaattattccctattactaattaatatgtatagttatttaattaaatagcaataaaaagggtaactcaatttgaaaatatactaaagtaaatttgaatacattaatcatttgagttagcccttattaattttatttgtatttaattattatttagtttctgttgtaaattgcttttgtttttcttttccgtattcaacaattttatctggagttacccatttaactggtactggataaacatcatcaactttttcaccttttattttcttatctaaagtatcaattatagttttacctattgcataagaatcttggtcaacaattcctgatattaaattgctacttacaccattttcccaagttggagtatagtcaaaaccaaagtgatagatacttcctgatttaccttgagattttatagcttccattacacctgtatctggtccttctgatcctaatgagaatacagctaccatatcaggatttgatgttatttgtccttctaattgtcttttagattctgctgattggtcattatcttggattggttctaaccactcaaaattcttggcatctgctcccataactttttcaaatccagcttttattccatcttgtctatatgtcatagttgtttgagttaagtttactgctgccattgcaattttaccttttgttacacccttttcctttaaagctttagcaccattttcaccaagttgttctcctgctagcttgttatctgttcctatataagatgttctattttcttttgtctttacatcagcatcaaaagttactactggaattcccttatcatttgcttccttaaccttcttatcaaacatatctggatccattggagcaatagctattcctgctgctttattctttatagcttcgtcaaggaatcctatatgcttttcgttcttttgtgtttcatttggtggtgaagttttaactactaaatcatatcctaatgccttagcctcatcctcagctgctttcttcataggtgaccagtaagctcctgtatcaactattggaataaaataaataaccttttttccacttgtacttgctgttcccccagattgtgtctttgttccacaccctgctaagctaccaacaataaacactgttgataataaagcaattattttcttcttcataatttttcccctttcgtaattccaattttttagatatgtttttatattttaagccttattcagtagtaaacacttaagcctaaagtctaccaaattacgctcaaacgactttttatgattagctttttttcttaaacaaacttccttttctgtagaagtcaacaactatagcaagtacaataacagctcctgttacagcttgttgtaagaatgagttaattccaaggattgctaatccactttggaatacttgtatagtaaatattcctaccatagctccaccgatggttcctacacctccaccgaattgtactccacccatgattgcaccagccattgcaaatagatctggaccatttatttcacttggagcaccaacatttatactagacattagtaatataccagctattgcagctaaaacaccttctattgcatatacctttataacatgcttgtttacatttattcctgataatcttcctgcttccttgtttgatccaaccacatagcagtatctgccaaatcttgtatttttcattaagtaagccatcactaatactattatgataaatactatagtgttagtgtgtattattgatattccaacttctgtgttagaaatattatagaaccaatctggaacaccctttatataaatcccatttgtgaaaaatagtattaatcctcttatcaaataacttgtacccatagtaagtataaaagattctaacttaaattttgtaattaatactccattaaataatccccaaactgcacctactaataaccctgcaagtaaagaaactggtacgctaaccccttttacggctagataggctactgtacatccagaaaatgcagctattgcaccaatggaaagatcaacacctccagttattattaccatagtaatagcaacagttaaaattcccactgtaggaatttgtcttaagaaatttgaagcatttgctgcccccaaaaagtccgggcttgctattgagaatactaaaataagcactacaagtactagatagattgaatatttgagaaataagtttttaatattaaacccttcctttttcatcttaatgccttcttcttgtacaattttattattaattgtttgattcatctttattaatccctccaagcgtagctaatttcataatcttttcttgtgacgcttcttctctgctaagttctccagtgagttttccttcacacataacatatattctatctgacatacctaataattcaggtaattcagaagacaccattataactactttgccctttctaactagatcattcattatgtgatatatttcagctttagtaccaacgtctattcctttagttggctcatcaaaaataaatatttccgagtccgtatttaaccatttagctagtattaatttttgttgatttccacctgataatgttcctgccataacatcaagatttgctgttttaatctcaagtgcgtccttaaatctttctccagtttcccttaactttttatgatttaacacaaaatcttttaaattagttaaagttatattatcaagcacactcattactagagataatccttggcttttcctatcttctgttaaaagacagataccattattgattgcatccataggtgaattaatcttaacttccttcccattaattcttatcttaccttcacttattttatcagcaccaaatacaagcctcataagttctgttctacctgatccaactaaaccagatagtcctaaaatttcaccttttcttgcttttaaactaacattcttaactctaccaacattatcactaatattttctacttctaaaacgtattctttaggctcaaaaatctccttaggaaatagctctgtcaaatctcttcctaccatcatatttataagtctttcctgagttatcccttctagttcacaactttcaatataagtaccatctctgagtactgtagctctatcacaaatatcaaaaacctcttttaatctatgtgatatatatattgctgcaacaccttccttttttagtgtttttataactttaaaaaggttttcaacgtccttctgagataacgatgttgttggttcatcaaaaataatcgcttttgcatttaaacttattgcctttgctatttccaccatctgtttctttgcagttggaagctgcataactaggtcagtagcttttatatctattcctaatttttttattatagaatctgtatcttcgtgcaatttcttgtagtcaacaatacccaaggcttcatttttatatggtagtcttcccatataaacattttctgcaaccgtcaatgtctctgctagatttagctcctgatgaacaaatccaatacctaattgtgcagctttagttggattaataactccacaatcaactccttcaacaaatatttgaccttcatcctgtgtatgaactcctccaagtattttcattaaagttgattttccagcaccgttttctcctaataaagcatgtacttcaccttttttaatttccaactgtgctcccttaagagcataaactcctggaaatcttttatgtatatttttcatttctaaaaatacattactcaattctaaccacctcaactttcactaatcgttttcatgaacattttacaataatatattagttagttatatttaatatctttacctgtacatttgaaatttttactttttaaataatgattaaaaagttattaaatctctaagaatacgtttgctaaactctcatcttcaaagcgtttaacatcgtttacattttttattttacagtaatgcattaattaattatatgtaatatctttacctctacatttgaaatctttacttcttaaacttattttaaaaagtcgttatttattaaatttaatagaaactgttgctaaaccaacagatttagttttgtagagcctcaattttataaatataattttctgaagaataaaaaaatcacaggcgactgtggttaagttccgtattgtgcttcgcactcttttcatttaagttccgtattgtgcttcgcactcttttcatatgtgtagatttttttcacgcatctgccttttcgaacgcatgtgagaaaaatctgcacatcagaaatagcagctctgctgcatataagaacattttttactagaatataaattcctaaataataaaaaaaatgtgaattccgaagaactcacattaattgtatgattaaattatgttaatagataaatcattaattaaaatttattataaaagacagtttgggaaatatcttttcttttttcgtggttaggatttggtttagcctcgttacttggataaccaattggtaaaagacatacgggttcaaggtctgttggtatattaaaagcagcacgtatagcaacagggtcaaaatggccaacccatgttgatcctaaaccaagctcagcagcttgtaacatcatatgtgtagcaataatacttccatcaatatcagtatggatttttccatcataactacgctcccatgcttcatttttatcagcacatataagtaaggctaacggtgcattaaaatgataaattgtgcaagtttgtagtttagcaagagcatcctcactttcaagtaccaaaattctttgcggttgacgatttgcagcggttggagctaattgtcctgcttttaaaattaaatttaaatcctcctgactgattttctttgtgtcaaaacttcttacagaatatcttttggcagctaattctataaatttcatacatacatctccattcatttaagttactatctttatacctcatctattatgactttgtaaaatgttttatgattaaacttatacgattgaatgcttctacattgctaaaaatttataaatagccctattttttagcttatttcccctctacatatgaaaaataatcaaaatctgcatacttattcatacccgataaatcctgacatgcaattcctacaaaagcaccggtgaaagcccatgaacctttaatcgcatcatctgacaatgtacttgcgtcataaactttgcctataggcctccactcctccttattggtagcaaagaaaaatctaagttgcccaaaattcacttctacttttagataaatacgttctacatcaattattaagatattatcatcctgagtcatggactctgataaatcattatttatgctagctagaacccctatgcatttgcctcctaattcttcatccatgcttatcctcaaataataatagttttctgtgttgtaatagcaaattaatcctgcaagctgcaacgttgtttcaggttcaaattcaacacaggtttcggcagaataaacaaaattctgctgacgtcttgctatcatactttgtgtaaacttggaaaacattgattcttttccatataaccttaaaaatcctggcctttcagtaagtgacataaaggtttctgctggaactcttaaggactgaaaatttatatttaataaagtattattgaaatcgtcatactgtgaaactaagacgtcttcttcattatttgattcactttcactgttattgttaatttctatttcccaagaaggtaagttatctatgtcagaacataagtaaagccaatcatcttcacgccattcaaccttttgtatagccgtttctcttcctagaatgcagcgatctgtttcaagaagaggccttccacaaagatgaaccataaaccattcattattagggccttccacaatgcttgcatgtcctgctttttgaagaactttatgcatatcacttcccacagaagtaagaattggattttgtggatgaacctcatagggacccgtaagttttctcgaacgagcaattgttactgcatgttcataactagtgcctccttcagccgccatcaaataatagtagtcattatgcttatatatatgagggccctcagaacaacctaaatctgtccctttaaagatattcattacaggaccagtaagacatttgtttttttcatcatattcttgtaaaagatgaccagcaaaattattctttcctatacgattatcccatttcatgtttataagccacttttttccgtcatcgtcatggaatagagatggatcgaaaccactcgaattaagataaacgggctctgaccactcaccacaaatatcgcttgaggttaccagataattgtgggtatctttaatgtgtccgttgttgtttactattgtatatattaagtaaaagatacctttattataggacaaacatggcgcccaaattccacctgaatcgggggttcctaacatatttagctgagagactctattcaaaggatgtgctataagctcccaattcactaaatccttagaatgatgaatttgaactcctggaaaccattcaaaagttgaggttgcaatatagtagttatcctcagctttacatatagatggatctggattaaagccctttaagatgggatttttaatttttaacataattctcctccttaagttaagaattttatatatagaaagactgcagaaaatattgaaaggtctgactccaatggactatggaaatcagaccttagcatcataatttttcattattttcctgtctacttgacagggtgaatttaaaatatgaagtacctttctataaaatttcaagatacatatttattataatttagattattaagacaactctactttttgtaaagtaccatcattattgtactttatttcagtgtattttacacaacgtctgttatcagctccaccagacaaagaactatcatgatagaataaataccatttatcttggaactcaacaattgagtgatgagttgtccaaccaattacaggatcaagtattttccctttaaatgtataaggtccctttggattcttactcatagcatatactatgcaatgtgtgctaccagtagagtatgaaagataataatttccattatatttatgaacccatggtccttcaaaatatcttctttcttcatcaccagcaagtataggatttccatcttcatcaacaattgatatctcctctggagcttctttaaatgtaagcatatcatcatttaattcagctactcttggtcctatagcaggtgctgtagcagcaggaccttctccatctggattaaaagttccagtttgccatttttctagctgtcctccccaaaggcctccaaaataaacatatgatctattatcgtcatccattaaaacagcaggatcaatgctatagctgccaggtatataactttcttgcgctttgaatggtcccgaaggagatgaactagtagctactccaagtctaaagatatcatctttatctcttgctgggaaaaacaagtaataagttccattcttataagcagcatctggagcccataattgtttacttgcccatggaatatcttttaagtgcagtgcttctccattgtcgatacaaggtgaattagtatcatcaagagataaaatatggtaatcttccatgttatattggtcaccattatcgtttgagatctgtacttggtcaagatcatgagaagggtagatgtagattttaccttcaaatacatgagcagaaggatctgccgtataaatatgagttactagaggttcattttgttttgcaatatttttcatatgattctctcctatcttttctttgaatatttatttatgagtcaacttatgattattcttttataattacgatttaagcgtttaatacttaatttaaatcttcatattaattcaatatttgcttccaatggtgctactgaggtaagctcaaagcttctcttatctggttgtgatacccctacaaataatttgaatttcttactatcaagaagcctttctccatcatcatttacaacttcgaatgatttcttatccaatttcattattacagttttgctttccccttttttcaatgaaacacgtttgaatcctgctaggctgtgatttagtacagcatactttgattctatatcttttacatagcattgaactacttcttcaatatcatattccccagtatttttaatctctatgctgatatcaaaactctcaaagccttgcttaacagaaggcacttgtaaattagataattctactgttgaataagttaaaccatacccaaatggatataaactctcatgttctaaatatctataagttcttcccttcattgaataatcagtaaactcaggaagcttagctgtgtctttataaaaagttactggtaatttcccactcggtgagcattttccaaataatatatccgctacagcagttcctccgtggctacctggataccatgcatttaaaatggctgcacatttttcttctgcaccatttagtgttaaagcacttccagctccaaggacaacaataactggctttccaacctcaagtactttttcaagtaaattttgttgccttcctggcaagttcaaattctctttgtctcctgccccgtagctattaccagcatccccttgttctccttcaattgttgaatctaatcctagacataatacaactacatcagatctttctgctactgaaatcgcttcagataatctatcatctggtcttgctaagtcctccactttatctttaaataagtgacatccttcagagtaatatactctcacatcattaccaactgcatcatgaattccttctaatattgttgtatacttagatgctgttcctgagtaatttcccttcaacattatttcgctgtttgcattcgggccaattactgctattgattttaaatttgatttattcaatggaagcgttccattattctttagcaataccattgattttctagaagctattaatgcaacatcgttatgctctttagaatcgtttacttcatatggtatcttgttatattcacaatcttcatcaaacatacctaatttaaatcttgttgtcattaatctttctgctgctgtagttatttgttcttcagttactaaaccttctttataagctaatagcaaattaagatacatatttccgcagttaagatcacagccattttctatagccaacgctactgattcagttgcagtacttgtaaccatatggtgtaaatgaaaatctgcaagagcccagcaatcagatactacatgtcctttaaatccccatttgcctcttaagatatctttcaacaaagtcttactaccacaacatggctccccatttgtacggttatatgctcccattacactttcaacatttgcctcttttacacatgcctcaaatgctggtaaatatgtttcatatagatccttcttgttaactaccgcattaaattcatgccttaatccttctggtccgctatgaactgcaaaatgttttgcacaagcagctaactttaaatattttccttctccttgcaatccttttatgaatgcaacccctaatctagatgttaaataagggtcttccccataagtttcatgtccacgtccccatctaggatctctaaaaatatttatatttggagaccaataagttagtcccttatatatgcctctgtcgtcttttttgctgtattcattgtatttagcacgtccctctgtagcaataatatttgcaacctttccaaggaattcatcatcaaatatagcggctaaaccaatcgcttgagggaacacagttgctgttccagctctagctaccccatgaagaccttcattccaccaattatactcaggtacatttaagtgctttattgctggtgattgataagttaattgctccgctttttcttgtaatgtcattttagatactaattcttttgctgcctttactgcaaattcatgagtattttcttgctcaccattcatctatatccctctattccttaaatatttatggagattaaaatctataatacaatattcaatttgtaatttaataatataaaatttatggttgacttaacaagaaagtatttatataattgtagacaaaatttactctcttggaggtattctatgttaaaatacgagtcgcaccactttggagaaaacactcttttttcccactaccatccaattagtcttaattaccctgttcatctacatcgaagcttcgagttcatatctgttattgatggagatcttcaaatttctgttaataatagaaattttgaagtaaaaaaggatgaatgcatattaattttgccttacgaaatccactctctctcaactaataagtactctgatgctcgtatttgcatattttcccctgaatatgtaaaaacatttgacagcatgatctatggtaaatttctagaaaatccagtctttaatttatcacataacgcgcgatctcttatactagacaaaattttcagagataatgtcaatgttctcgagatgaaagcttgtctttatttgctttgttctgaagttatggaacatacgcaattacttgtaagcgtgaaaaatgattatgaattattacataaaatccttaactatattcaaaataattttactaaagatatctcattaaaaagcattgcagatgaattttgctacagttacaattacctatccaaatatttaaataatgtactcggaatatcgtttgttgattttgttaatcagaatagaattaattacgcggcatatttattaaaaaatacagaggacccgattactgatattacttataaatgtggctactcaagcatccgttcatttaatagaaactttcttaagattatgaatatgactccaaaaacttatagaaacttttaatctacagttaattaaataccactacaatagcaattccagtattcccaaacgtctataaataagattactattttgtccattgtatgaattttaacttattcatattgatattcttggttataaataattaaaatcaagagtatcaaaaaatacaaaaccagggtttatttttaaaccctggtctgtttcgaaacaagtgtacttatggggactttaaaatcattttcggactaatcctaaaatattattgttaaaatcaatgtccatgagaaccacctctttcagttattattgtatgtaatataaaattaaatatactagaatatagatccatgcattccatatagcactacctattccattaaaagtttataatttttttcatcataataatttatatacctagttaatgctccgtcaatggctcgtgacttccacattcacctttcataataaatttcataaattagcgttgaaaatcctattgtaatggatataattgtaataggaggtgcttaaatggaatcgaataaaataaccactagactttctttagtcggggcattgctaggcttaacattattcattatgggtggattattgaataccatactagatcgttatgtaataattatcccagctgttactatagtaattagtttgatatccttaataaaatctaaaaaaactgatataaaaattaaaagttattcttctcttgggttaatacttggattattttactttattttatctttatatgaattattaaaattataaatttgtaaagcctttatattttaatattatccctgcaagagaaaaacatgccttgctattttcacttaagtgtaaatggtaagaacatgttttattattttctggctaatatcattgtttttatatattcataaaactacatgatttagaaatactaatctatagataatataaaaacatcagttcgaatttctgcgataaaaaaaatacctaaatacttttattaatactattcatatattcattaatcaacttatctaactttatactaagttctaataattccttatcatttgtaattatttccttgttctcaattaatatatttaattcttctctagttctttcaagttcactctttatacccatagctttcgttcttccttattccttaaatttatactttatccatattatacaataataatgtataaatttcaaacatatgttcgtatatttcttataattatgattctggcactatcagcccccattgcggactttcaccgattagcacgcgcccatgctggccaaactacaaaaaaataagagcttatatttcataaactcttattttacacaatgatgcctcaagttcttatgtttcctataaatatttacatatatttatagttacataggaatatagttatctttttaaatatgtttctatgaataaaggtatatatttacctttgttcatattaaactttaaactggtgctccaaatacatattagaacttttcagctttttacttcttagtcttaaaaaagtcaaggcagcaccaattaagcttattactgcagccgctatatatacagttctcatagcatatataaaagcatcatttcttcctgctacaaaatctgtaacacggtatccaattatagaactcatcatgctatataaaagcgttgtagctaaagctatcccacataccattcccaagtttcttacaagagcatttacgcttcctgcaattccaagcttctctttcggtactgttgacattatcaaagaattattaggcgattgaaataatcccataccaatagacataattcctatgaatattattgtcattattacagttgaatttacatttaaagtggacattaatattaaccctaggcttataagtatcaaacctatgaaggttaaaagctctgaaccaattttatctgataagcttccactaagaggtgctactacagttaagagtaatggataaaccatcattattaatccagtatgttctggtgtataattcattacatcttgaaggtaaaatggcagaataatattgttacagaagattgccacaaaagttacaaatgcacaaaatatacttaaagaaaataatttattgctaaatatatttaattgtaatagaggatcttcttttttcttttccacaaaaataaatattataaatgatataattgcgatggcaaagctcaataaaattattggatctgaaaagccaatgtttaaaccttcatctaaagctccaaagagtggaactattgcaaacataaataatacagctcctaagatatctaattttcccttaactgttttattccccttcggcaacaatttaatagcataaaataatgctattactccaataggtacatttatcaaaaaaatatattcccaacttgctgcgcctactattagtcctccaagtcctggtcctattagagatcctaaagctacagaagtacctaaaaatccaagagcttttcctctttcatgtggagggaatgtttctgtaataatcccttgattattagccatagttccagcagcgcctatagcttgtactattcttgctaaaataagtattggaaaagaatttgttataccacatagtaacgatccaagggtaaataatcctaatccgaatgtaaacatcctggatttcccaagcatgtctccaagtcttccaaaaatcaatactgtcccagcgattactattaaataacttgttgcaactaattgtatactagatgttgttacatttaaagcagtagccattttaggtaatgctacatttacaatgctaccatctaaggcagacataactgtaaacattaaaactattaccaatatggaccatttgcttctattttttacattttccattaattttcctcctttatcacttgtcactatttatcttacatagccatattaacttaattctcaaattcgtttaatcttcgaatattgattagaattttctttaaagactgcattgtaattaacatttctgcttctgatacatcttctgttattaaactcatcaacgtttgaacatcttcatgaatttttggcaatacttctttagctttctctgttaaatataatttataagatctactatctttttcatcttgttttttataaacataaccaagatctactaattttgtaattgttcttgcagacattgccttgtcattaccaagttctttacttaagccgttttggcttataccttcatttccttcaagattaaacaaatatgggctggaaccactgcttaatccatatttttttaaggccttttctaaatacatttgcttatatctaaaaattttacttgtaatcattatgaggttcatgctttcaacatccataatcattctctccttataatataattgattagtctactatattatatttacactatgttgacttgtcaacttttataatggaacatttttactaaatagaatataaatattctatttatattcacataatcttgatcatcatacaccccgttctcacaacagacttatataaattactttttaataatctttttaattattgaaagcatcatagttgatctcttactacaaagtgataatataacagctccttatcaatatttacttataaacattatcaaatttatacttttaaaatttatcatcttatcatatcccaatataattgaccaatcaacaatactttgtcatcgtcaagttgactagtcaatctatttgtttatttttacaaacttatttatattttttatctaaccataacagttcacttaaaattctatatctctcaaaacactacgtaagtctttttccacgctaagtagcgcactcctctttatattattatcttccatccacgctcgcataaagtgttgcatcgtcctattttgattaaatttgattacaatatagctggtaaattaacgctttatacggtagtttgaggtatgatttggaaaacttaaaaatattaaaaaatgcctgagtgcttagttttacttagcactcaggcattcttcacatcttatttcatggcggagagaaggggatttgaacccctgatagagttgcccctatacacgctttccaggcgtgctccttcgaccactcggacatctctccatatagtatttaatgctttattataatatcatataattgttatcgattcaactgaatattttatatatagaaatcctatcatttaatataatagaatctatttattcatattcaatataaaccatcatccttccattttcgtaattaatgcaaataataggcagaaatacttaaaatttaagtacttttgcctactataaattacttctaatttaattagctatcatttctataatgaaatagatagtaataacacaaagttatctcttaaagtgcttatataaacttatttatacatatactctctagtccatggtaaatcgttgtttactcctttattgaatacaaattgatgaatacttatatttccggagttaaaagatgctgcacaagcatttaaatacaatctccacattcttataaatgtttcatccttagtcttccttatctctggcaatgcattctcaaaattctttgcccaatgctccaaagttcttccataatgaagtcttaagttttctgcatcgattaaagtgaacttttcatccgacatacaattgattagctctctaactgctggaacatatccacctggaaatatatatttatcaatccatgtattatttcctccaacctctgttgatgttatgcagtggagtaaagatacacctttatcatttaataagttattgacatttgaaaaatactctgcaagatgatcttgccctacatgttctaacattcccacactaacaattttatcaaatgttctattttttagttccctgtaatctacaagttcaacttcaagaagatcctctaatccttcactttttattctttctttaacttttgctaattgttcagaacttaaagttatgcccatcgcttttaccttatatttttttgccgcagatattatcagttcaccccaaccacaacctatatcaagtagtgtttctccttcttttaagtttaactttttaagaatatgttctactttattcttttgtgcttgagttaatgaatcacttttggatttgaagtatccacatgaatatgtcatagtatcatctaaccataacttataaaaatcatttccaatatcgtagtggaactcaatatttttcttgctatttttgatactatttgtagccatccttagtaaatttgcatatttgtcactattactcaaaaaactttcctgattattatataaagattctataaccttttgaatacttccttcaatatctatttttttagtcatataagcttcaccaaatgttaatgaaggatcctttataatatcagctttaggaataggctcattaaatattattctaaattctggattcccttccccataaatttctgaacttccatcccaaagttttaattcaaaagtatctgaaaataaattcttaaataatgttttgtaaaatattttatcaataatcatgataatcatctccctatttaaaattaattattaaatatagaactttaaacagaaatatgcaaattaaatttctaaatagattctaaacaatatgatttaattccaagtgtttttgtgccgcaattgaagctgcattagaatcatgatcttttaaagctctccatatttcttcatgatgattttttacaagtattttattaatagtatgaacttttgaattttcaatatatttttcaaccaaagaagatatagaaaacattatagttgaaattaagtgattgccagtagcttgtgctattttataatgaaattttttgtctaatatagcacaggcttcaatatctgaattattatttaactcgtccattatttccttcaattctataagttgttcatcagttatatttttagcagcgatagctgctgtttctggttcaattatttttctaagctcaagaacatcctcacttttgcttcctagaagtaagaatacaatagataaaggttcaagcagactattttcaaaattttcattaataaaattcccttccccgtgcttagattctataagtccaagcatttgtaaagattttagtgcttctctaacagatgctctgctaacctcaagcttctcacataaatctctctcagatggtaatttatcgccactctttagttctcctcttttaacaatttcttttatttgctctattactatttcatatatttttgtactcttcacaggacttaacatcgatatcatcctctcaaaactttatatgtttgcttttgataagtagttaagtaattcgttgtaattcttttctgctaacagttctttattttttgaattctctattttatgattatgtatactaatattttttctaaagctatccaatgtgttcataatagcaattttaaaaagaggaatactatcaattattctctttattccatatacatattcatcatcacttagtttaaaacattgaaataatccagaggtcaacctcccatcagaaaagatataaatatatctatcgctcatttcatcagataaattaacttctattttatgcttatacagtctaaaaacaacatctctactttttataaatactggaaatatacttgaaaaaagcatcgccatattattatcttcctcatcaattaaaccagagaagtcattttcattaagtttcattataatttcatctgtaaatatgctattttttatctcttttcctaactttacttttaacctctgttctctctcttcaattaataaattatcaatagaactaaataacttattaattggactctctccctttttgtagttatttttatctccattcaaagataatcccccctaactaatttaaaaatactgaaaataaactccataatacaggtgctatcagtacagtcacaatcccagaaattgcaatagttaaactactcatagctccttcaatttcacctatttccatagcttttgctgtcccaacagcatgtgatgaacttcccatggcaattcccattgctactttatcatttatccttaatatcttatatagaaatggtccaatgatagaacccaatattccagtaattataatagcaacaacagctacagaaggaagccctcctaactgtttagataatgccattcctataggagttgttatagatttaggaattaatgattttgtaagctcgcttgaaagattaaatgccttcgaaagcagaattacagatatcatcccagatacagctccaaataaaatacctaataagataggtaaagcattttctttaaacaaagaaaactttttatataatggtaatgctaatgcaatagttgctggagctaaaaagaaagaaattatttgtcccccgctattgtaatcatcatatttaatattaaattttaataaaaatgtaatcagaattattatcgctataagtaatggattaaatattgaaagcttaagtttttgttttattaaaagacctatttcataagcaataatagatattaaaaccccgaaaacaggtgaatttatcatatcattcattttgaagtcatcctccttaaaaatttaacaacgtaggcagtcacaatccaaactacaaatgtagaaataacaattatagtggagaaaggtataatcttacctttaattgcttgaaaggatgtcactaaccctacccctgctggaataaataagaatgacatatgagatattagtacctcacatatatcttcaatcatctcaactttaacaattccaaaatataacgctaagaaaagaaaaatgagacctaaaactgtccctggtataggtaatttaaaaactacttgtactattgttcctaaaaaatatgatactagaataatcattaactgctttaaatacttcaactaaaaatcacctcttgtgtaaaaatcattggtatagtggtctgaccagttgctattactatatcatatttatttttatatctcaacttcataatattctaaaaatgtgattttattccccatatttccaattggctctcactaactacctatatctttactaatctctttaaataaaaaaagcaccttaaatctaatacttttaagatttaaagtgcacagtacatttccatattgtaataaaattaaaatttaacgctattcttaactatatatattttttataatttatttatacttatttcttctctgggagaaaaactccaacatgatatcagaacattctttatcgtataaccatttagtacttacaaaagaatttaaccatttattatctgtaacatcaattactgaaccacaagcacccatatctttattaaatgttcctatatatactttagatattctactctgaattatcgcccccgcacacataggacaaggttctaatgtaacatacatttcagctctatttaatctccaatctccaataaacttcgaagcttctttaatagctaaaatctcagcatgagcagtactatcatttaaggtttcttttaaattatgagctcttcctattattttatcatccaatacaattactgctcctactggaatctccccttttttcattgccatcttagcttcttcttttgcaatttttagaaaatcaaccatttgtaatactcccatcacgaattttcttgattaaagatttttaatattatatatgttcctttctcaatattctaccatataataaaaatataaaatcataagtttcatactcattattatcaacttatattcaataatcaaataaaaatccaaaaatatagaagggatatatttaaaatatctccctcctatatatgaattcacctaactcggcttaatttaattcgtttagtgtcggcattgaggctatagcaccgtaattcgtgcatgttattgcgcctaccttatttgcaaatgaaattatatctttccatctatcaaaacttatactctctttgtcatcaatatcagatacctgtcttaatactgctccaacaaaggcatctcctgcaccagtggaatctacttgtttaatttctatagatggtattatttcattttttccattaacacttaagtatgtgcccttagaccctaaagtaactgttacaaccttaactccaatttcatgtaacttgttaacagcgctttctatatctttttcttttgttattaaatataattcttcatcacttagtttcgtaaagttactgtatctcaagaatttaacacaatcctcaacaaacagctccaacttgtcttgagtgattagtgcatcgcggtaattaggatcaaatgatacatatatgttattagatttcgcgtattctaatagtttaaaatatgtcttttttaactctccctctaaaaatcccgttgcagacccgaaatgaattatatccgaattacttatctttgataaatctatattatcaaacgaatattccccatcactacctcttaggaagtcaaagttacgttcaccatttgtatcaattccaactaatgcaattgttgtacttcctctttctacggtcatatcagtatttatattcaagctttttagcagctcaactaagtgcttaccaaaaaaatcattacctacttgtcctaaaaaataagcattaccttctaatttacaaatactcgccgctacatttgctggtgctccacctgcttttttctcaaatttctctccattttttaaacctttattatctacacaaaccatatcaattaaaagttccccaatacaaaaaacattattattcatacttcacactccttaagttccatatatttagctcattaattgtaattttactatcatttcttatttgaagttctaatccttcactcttagggtaatatgttaatgttgttacttctaatccatcttgataatatatttccatcacagaattgtcaatgaatacattcatttttagttcttttaaagaattcaatttaaattttcttataccttttccgccaatattcatattacttctatcaactgtacatagttgtcttttattatcatatgttatagaaatatgctcgtcattaaatttaaatttaacttctgtaaattcgacattctcaacttctatacttatcattatttctactgaacgagactctaaagctaaattgtagttattcaaagttaaccctttaatatctattaactgagtttctcttaaatttctaatttcatcaataggcttttgataaaggacattattcttatactctaaaactctaggcatagttaatgaatacatccatccattctcatatgtcgggtattcagagtccctatctggcattcctatccatccaaccattatatttttaccattatgattaaatatttgcggagcataaaaatcaaatcccatatctaattctttaaatctgctatgatttttcaactcaacgctttttatatctagctcaccaattacatatcctgactgatataaattttgatttttcaattcttctttttctaaaccttgtggtgaaaatataaatgcgtgtttatctttacttatccttattatattaggacattcccacatgtatccaaagtccttcatatcggtttttaactcaccaagcaagttccatttaactgaatctatagattcataaattaaagcccttccttttaaatcttcactttgaacgcctaatatcatgtaataagtgtcatcttctataaatacgtatggatctctaaagtgagctgtatatccgtttggctgcttatctataattactccatgtttctctattattccatctttattacaagtggctaagcactgatatgactctctttcgccatttggacctttcacgtttcctgtgtagtataactttaactcattatctttaaccaatccacaacctgaatagcatccatttctatcaaaccaatcttgtggttttaacgctattttgggcttagtaaagttaatgaaattggttgttgttactaatccccagtgctttgttttatgctcacatccaaatggattccattgatagaatatataaaacttattgtcgtaataacttaatccatttgggtcattgatcaaaccaaatggcatctcaatgtgaaagttgtttcgccatatactcgtttctttattactgtaataattatttaaattttggtttatttcctggtatgattttgggtttggcatctttcctcttctcctattaatttaattaatcccacccacactttctctttctattagcttcaaggaagtatccttattctcttctaactcttttccctctattaaatctaggattccttgagctgcttttataccaattaattcataatcaaaagctactgttgtaagtgtagggtatgaaacacttcctatatcatatcctccaaatccagctactgaaatttcttctggaactttaatattattttcatgtaaatatctaagtactcctaaacaaatattatcagttgcacaaactattgctgtcggcttatattctaatatctcactagccttactgtatgcattagtaaatgaaaaatcagtttcaacaaattgaacattacaatctggattatctttcttcacagcatcaatgaatccatttttacgatccactcccactgctatatcccattcatttactcctaaaaatactatatttttatgtcccttagatttaaaatagcttccaagtatttttcctgcctcataatcatctatttttatataattagtaaattcatttttttgtcctgtaaatatagttggaatactaagcctgctaattaattgaatatgctttttagtaatagccatagaattaatgattattccatcaactccttgctgataaaggctattgatatttgctagttctttctctatatctaattcgctgatcaagataattccttgataatcattttccattaattttttattgataccagttaatactttgcctattgtaacagaatcgattctaggaattacaattccaactaatctactttttttagtctttaatctctttgcaaaaaaattagtttcaaatccggtcttttcaatcgcttcttttatctttttagcattttcttcgctcacatatccattattcaaatatctagaaacactactctttgaaacattaaccatattagcaatatcttgaattgtgacttttcgatccatattatcctccatatatgttttatataaatattattatatatcattaatacatattattgaaaagataacttataaacttatatggatattaatatataaaatatagctttatatagcttgatagatttagcaagcaaaattatccctactaaatctatctataattcatctaaatattttttattattcctattcttctgccttaaagaagaacactgttaagcaaaaagcaactgctatagctacaacgttaactaaaatataacttccaagattgttcacatataatagcatacctggtaatgctgtaattcccattcctgtgcctgctaggtgaagtattcctgaaagcattcctccaactgctcctcctgcgcatccaaatataaacggctttataaatcttaagttaacaccaaatattgctggttcagtaatacctaaaaatgctggaattgctgatgaaatatataatgaacgcttctttttatcttttgttttgaatgctactgctaaagctgccccaccttgtgctacaataccacaagttatcattgcattaaatgcatcttttcctgtgctagatagtaattcaacttctaaagcatttaatgcatggtgaactccagtaacaactataagttgatgtactcctcctacaactagtccacctaatccaaatggaagccccatgaatcctttgattgctccaaatattaattgttcagcattatgcataattggcccaactattaataatcccaataccattgaaaataataatgtaataaatggagttactattagatccaatacatctggaactactttcttaagtgccttttgagttttagctgcaataattcctaatactaatgctggcaatacagatccttgatatccaactacaggaatatttaatcctagtatagttagattaattggatttgctgttccagctgccacagcataagcatttggtaaactaggtgatacaagcattaatcctattactatacctattactggtgtacctccaaactttttcatggttgaccatgcaactaatgctggtaaaaatgcaaaagcagtatctgttaatacttgagtaaagagaataaaattctcattcatttggactcctagatttgtcaaaagacctcttagtcccataaacaaacctgttgcaactaatactggtattataggtacaaatacatctccaaaagttctagatattttttgaattaatgtcatttggctataagcttcctctttattatttccagttactaagtcagaattttgtccaactatgacatcataaactttatttacaaatcctgttccaagaattatttggtattgcgctgccgagaaaaattgtccttttacaccatcaatattttcaatcgctttttcatttatttttcccttatcattaagtataagtcttaatctagttgcacaatgttctactgattttatattttcttttccaccaatattctctagaatttcttttgctactatttgttccttcattaatgtcccctcctaatttaattaacttcgaaaaccgttttcatgttaatatgataccagttccatatataatgtgtcaatacgttttttacctaaataataaattatataaatttcctttcttccctatgtataatgcatattttctaatatattatctattacgcctccctattcatatgatttatattttcaaaaactttaatttatttcatatggtactgttcccactagcattgctaattttaaaaattaaatttatatataaaacaatcagttcttagaaaataaaaaagtgcactcctttttgtagtttaaggaatacacttattaactatactttatttttaaaatgtaattttttgaacataaattatcttaactattttttcaagttcttcatttaaggctaattgtattattttattgttgtttaattcaaaagtataaatctttagtccatttatattagtattataatatgctgacaccccgctcttaagagcattttttcgttctgtaatgtatacttttctcacatcatctctactaatcttttgagcaatctttcttctacttgcattatagaccttagttattgttatatcaccattatataactcatactcataatcaatatacataaagtaacttcccacgaaaaatattaatgctactattattagcgctattccgattattggtgatgcaaaaacaatcattaatccaactactaaaaaaacaattgaaattttttgaagtatgttactaattctcttaggcttatctgatggaataaactgttctaaaacaacttccatattctcactcccctttaaacatttatacctatagtaaatattttaaattaattcatatcgtatagtaagtataaaattaaaatttatcttgatgaaaatctcatttcacttatacttaattactattatacatattaaatgaaataaattgtattagttcctttactttttgtgaaatattacatagatttcatataaatttctataatccaacaaccataaattcatatgcttttactaataataagatgagtcataaccacccgtaaaacgggtggcttgctctgcgcctataaggcttttttactggctggcgcctaaagacgctagctttctcttcgttcaagctgctttgcctttgttacttttgctgcctctaaagaggccaacgtattactcgctacccttgaaaagggttttcgtattctttaatacttaatttatctctcatttgatcttctttttcttgatcttggatatatttcttaattgtcgcttcatttagtcctactgtactcacataatatccttctgaccaaaaatgtctattcccaaacttatatttcaaatttgcatgtctctcaaatatcattagtgcacttttgccttttagatatcccataaaactcgctacgctcattttaggcggaattgataccaacatatgtatatggtcaggcattaagtgcccctctataatttccacacctttgtatttacacaaatctttcaatatatccttaatactttctttgtacttattgtaaattatctttcttctaaactttggcgtaaatataatgtgatacttgcacatccatcttgtgtgtgctagacttttatccatggaactcacctttccttcctataatagtagcttgaacacttctattataactcggaaaagtgagtttctttgtataacacatgttagccacccgcatagcaggtggttttatatttcgcacgcgcgcgagctcagcagactaaagtccataataaaaacagatgaaaaaattcatctgttctctaccactgaagcaatctatctatctcattttcttgatcactatctatttttatagattctttttcatctatagatatagctgcctcatcaactttatcattactaacttttttaatagttgaaggtatcatagtacctctcattttttcacctattagtacagttatatatgcagaaaaatctaagccaagagatttggcttctttagatgcaaattccttaatatggggagctaaagtaattgtagtttttaactttttacacattcttactcttacctattatgtcataagtttttacattaatcatctgtgcatcatctaatactctgtagtcttttaaataatttttaagcaataaggctcccccacctataaaaacaaatctcgaatattttgattgctctggaaatgcctgttttatagcatttattatttctcctgctctcaaacttaatacattatcaatatcattgcttacatctacttcttttccttctacaaatatagctttatctgcaattatttgttctgctttcatacgattagaatagttcactccatatttggttagctcttgtagaagtacatcatatgtgggatttactcctaatggatatgttctaccttctttaaattggccattgctcatatatgctatatctaatgtaccaccacctatatctactactagcgtatccttttctactaatgatttatcatataaaaataatcctgccgactgaggaaatacaattactttggtaattgtaaaacttctattttctccattaagtttcataaaaactcgtctattttcaagagcttttataagagaattcttttgttctgcaaaaaattgagcaggaagtcctgttataacccttacattgttatctattgttgaactcattgtagctgctatagctgtatataggcaaatatgaaatataatatccttatctcttgaatgttctatgctggtaaatccatcatcattaccaattaaatatgttttattattgtactcaacagtatatttagcggtctctaactcgtgcatcttttcttttactgtcgatgaaaaggagccttctatgttatgtccaataaaatttgttgtattgtagcctatatctgcactgattctcattttttaatcccccttttttacttttacattctatttgaatatctttttatggcgtttataccaccgttcacctaaaaattatttatccttatgaaatgtttctccattaatattcctttgtatgtagtttatatagctatcatactgctattaccttaggccattaaacagtatttgtacaatgtattgcttgtctatattttatatacaagcaggtaaaactcacgatcaacttgctattctttggattctaaatccaaatcaatatctccatttatttcagataattcagatttactaatcgatttcatcatattaaatagcataaattctgtaatagtcattccttgctttctagccattctttttatagctagcttctgttctgttgtaactctgagcattatggtagcatctttcatcgtatccccccattctacgtaatgtatataatgtaattacgatttatacattacatacaatatcacacttgttttacattttttgtaaaaatatagtataaaaattataaaatctctcgacttctttcgtattttgtttttatattatataaacattatcacttgcataagtcactccagtatatagacttgactctcttgccagtatattgatttatacaaaggattatttaacaactataatcttagagaataaaaaataatctagagcatatattcgcatattatactctagattatttaaatcaaccttcataatttatcattttaatttattatatctttaacaaactagttgtactctagtaggattatctcatttgccttcatatccaaatcaatatgaatatccacagttttatgattattaagttctgatattactagcatagtaatatcgtctaagcccttttccttaataaattttctgtcaaagcttaaaagaagatcaccttttttaccgcttttccttcttcacaatatagttcaaaaccttctccgtttagagctacagtatcaattcccacgtgaattagaaattctactccatctttggtccttattccaacagcatgcttactttccttcataactgccatacgacgaagaattccaactggcatatcgcacaaatatttagtacctttgaatttggttttaatctacggcaagcctcagctacaattgatgctgtatttgaagtgaatgtacttccacctcttatcaaattattgtgtcatctacagacttactatatatacattttcatttaattgaaataaatttcaataattaagaaacctgttagcttaaaagataacagatttcttaccttgcctatttattttcttttttacaatatatgtaaattaggtattctataaacataagcatatttgcaaaaacaattttgttaaagtattctccagtaattccagagtagactcttgcataaataaaattatacttttgaggttccactcgctaatattttcataaacttttttacattttcctcatctatatatttagacaaaaaattaatatcagtacctattaatgcttctgattcttcaataattcccgtgctaccaccatctattaatggtgctatattataaatcacatcaataaatcctgtaaaactcaaattcttttaaattctcataatagttgatgtggatgtgtagttttcagcagccccccctctaacgccaagatccattacactatcaatattattgattatatattctaatacttgttcttccataggtgtgatttttttattattaacaattttgcttagattaactttcatttttaatcatcctctaatttttatacgattttaatagttacaataacattattgtaatacattactatcttactattcacttttagcacactattattatgttgtcataactaatttcttgttcctatattctattcaaatacttttatatgggaattataatacaatccacttataaattgcttatctaaatgtaatacttattttagtattcttttttatgttaatagtatggttcttatacctcaattaccttataaaaagtctaaatttacttaatcttatctaggaaaatatatactgtattgcttgtctatacaatatacacaatatttatttataaaaattttattttatatacctaaatataaatgcttaatctatatgtaactatagatatagaaacatactactcaaagcttatttgtattttaatatcaaaatacgaaaaacatattattaacttatatgaacgctgaatattccttactgcgaaattaatccatttatataatctaaatctaaagtattttcaataattctatattctttattggaattactaatattattagcaatactaatatattccttgacttgtatagtaacttcagaagatatactatttttattttagttcctatagttattcctttttatataatttcattatcgttagtacctcttcaaaatagaaaaaggaatactcaaagctcctattactctaagtattccttttataccaaattgtaatatatatttgatcatactttttaattcactaatatatactaacttacactccaaaaaatttatcttctgtcgaaagccttaatacaacttcttcttttattccaaatttctcaatttcatcattcagaattagaaatatgtactgaccttcaaagttacgcgtctccttaatgatattacttaactccattaaatcaatattttctaatttatcatgaatcttaaaagttggcatatgatataccttatttataattaacttaatatgaactaaatcacaacataaaatatctcgctatatgctttctaacaagtgcggttcaacctgtataaatgtaagtttcataagctccaccttttaattaacttaaaaatatcctagaaatcacttggtctaggtgcagaaggtccaagaccaatagaacaaagccaattcagtactacctcatgcagcacatttatgttgtctacctggcagtgttctaatccgccaagtcttctatcctctatggcgaagaacgtcttgtttttcgaaccagcctgctcgtaatttttaagagcttgtgttagcggattgggctgaaccaatatctcttccgcaccgtgcatcacaagaagtgggcattctatctggtgaagcacaccctcaagattgtaggcaaaacgaggatttccagcaaagtcatccaagctttttgcacccaaaattctcatgccgtgagcagctaaacttggtggcatccattttagcattgcctcccagtcgaacgcgtgggttcctccgtcagagatgacggcagcaatcctgttgtcgaatgcagcaaatctaagggagtcatatgccgcaaaactctcaccatgaacaataatcttgttaggatccacttccggtctagttagaagaaagtcaattgctcttgaatgaaaagcctcgctgtcagctcttctgccctttcctttttcgtacattgaaagaccagttccaggctgatcatagaccataaagttatatccacacgaaataaaggcaggtcctaaccagaaatagttctcaattgaccactcatcaccaccattgagggccaaaattgtgggcttcggaccttttatccaaggaggtgagaaaaagtacccatccaacttgacatcctcataatctacttggattttctctggttttacatcaaagtactttccagcagcttcaaagagttcatttactttcctaaatatacggagtttctcagcatcattatccatcacagcatattcagcgattcggtggtaattgcaagcacgaatgtaacagttacgtgctgtataccagtttccaaccgcttctgcctccttaccatgcctttccaaagcatctgctgttatgagccattccctatgccatgtttccttatcatttggatctatttttttgcatgcttcataaatctcggtgacgtcagcagcaccaagacttgccaagcctagagctttagttacttgatatgacatcatatagttgtttggccaacggctaaattcaattgacattgcagtatcctccttctctagttatatttattacttccatccttctctgattaagcataagagtacatgtttcgaaatagcggcacctatctatgtccgtgccacgaacttgattctctaccatatcatttcctcctatcaatttacttgtagtttttaagctacaagtaaattttacgatataaaaataaagctgccctaaaaggaaaataaatctttataaagagaatgtaaaaaattataaagtattaggaagcaaaaaagccactgtcggtgttctctacgtccaaccaacagtggcctttaatttattttagagaaataaaattagtgttgtacaagtggaaggctgaactttatacccaggccaccatattcagaagaatatgcatagatttctccaccatgatattcaataattgatttacagcttgctagtccaagtcctatcccaccattttcaatttgcctggatttatccacagtgaaaaatttaagaaatagtgaagatatatccttatccggtactccaatcccattatcctcaatttcaaaataggcataagccccttgtgagtatccagtcatatacactttcaactcattttttcctccatatcttacaacattactgaatagattaccaaagactcgacctatcataatctcattgaccataagcatcatattttccttaaataaatgtttgtaaataagctcatagttaaatcctgatagctcatgttcatattctagggcaatgttctcaaataattttgatgcattaacaggtttcacggtcatggattctaaattcagtttctctttgatgaagcttacaaagtcgttgatgagttcagccatatattttgactttttttgaatcaactcataatattcctgcttttcattttctggtagacccttttgcatggctaacagttcagcaaaaccattaatagatgttaatggtgcttttagatcatgagcaatggcagcaatcatatccatttgctctttgtgtgctagttggagcctcttttccatattattgaaatgattataaaggtctccaatttcatcattactccttagcgcaagtggcggcaatggatgcacaatatttattctttctagtctggaattaagtaatcttattggttcctctatacaaaaatgaatatacataattaaaataataaagatgaaacaggcaatagcaaatatgggaaggagtaatactatatatgatggatccagtaatgaactagatataggtgaatattctgcaaagataaacttcaaatagattccaattgaagccataaaaactataaacataaccagaaatagtaaaggaagctttattttcagtttcatattatcactctctttccttgtacttatatccaattccccaaattgttttaataaaatcatattcaggaccaagtttcttacggatattttttatatgaaccgttacagtatttaattctccgtattcgtctccccagacatattcatatatccgctcacgagtcaatacattattagggttattcatgagcatggacaatatttgaaattcctttgttgataagttaagctttttgttatttagaaatgcttcaaaagtcttatcattcaaaatgagaggagaatcaatcttttctctatttggactaagttcattccactccttaaacagcctgtcgactttcctgaagttggcccttatcctggaattaagctcctgaatactaaagggctttgtcatataatcatctgcccctatttcgagcccaacgattttatcaatatccttatcccgggcgcttaaaaacagaattggagcattataagattttctgatgcttctgcagacatcaaggccatccatatcaggcatcattatatcaagaatgatgaaatcaatattattttctttcaatacacataaggcttctttcccagaatatgccgaaatcgtttcaaatccttcatagcttaaactctttgttataagttttactatatctttatcgtcatctataactaatatctttttttgcacttttgcacctccgatctgcttcaataaacgttctcttccacaggccttccacacaatactatctcatttataattatcaaggatgataaatttaatgccttttcagaagtagtatttaacgaaagtgaaatctcattatgattatctactcttgttataattgttccaattcatttgcgaatgtcatttttctcatttgaatcagcataattccatcataatatatttacataaacaccaataaatacaatgactgatacagttaatgagccgaggattacttatatattccagggatttttatataaagtaccatagtaccctatatgaaaagtatagcactcttttttttaatattcaattagatacttattttatttcatggtgccaaaaaagtagtaaattcttaagtaaaaaaaatatagaatcatagaaatatgttataacaaactaattcttaaaataattcatcattactcccccatatctgtatatatttttattaatcatattacacttaagtacttttgtatggcgtttatatagatatccaatcataatttatttgatatgtcttaaatttatagtgtaatattcttttttatgctgttcatatgacatttgtactactattaccatataaactttaatagaacaagaatattaaaaaataattgtattgcttgtatatgcaatatatacaaaacttcacataaaataaagcacctatatctctatagatgcttttagaacttacgacttctggattcgattaaatcatttcctgtttagtatttgtttccctctaaccactagtattcaagctattttatcagctctatttttctattacagcttagtattttctataatttgtgcaatgcgccgcaccattattgcaccattgacttaatatttatcttatcataaatatactaaaaacctgcagcttattcattcaattaactgcaggttttttatggtactcccagcgggtaaaataatgcttgtcttgtaatctttaagaatataacctcatatcctacaaagcctttacaaataagcttttacatactttttagcattttataatttcttattattttttacctttcaaaatgaaatagtacaatggtagtacaatctacaaattttaatttttatttatagaaatataataatccctttattcaaatccaatattatgctaataatttcaagataatcgtatttaataataatgcaacctatgcatatttatagaaaaactagtattgtaattaaaatgttttaatttacctataacaaagtattgatttatattcttatttagtatataattaaaagaaaacgtaacctggtgtatcaaaactagagaatgcatgaaattttaagatatatcgatatatagaggtacatacttatataatcatagtttttatttgaatattttatttcttttggactaagatataaacataaacctataaaagtctagaaacaattatttaattattgaatatatatataataaattgtaaatgatatataatatgggataagaagcccgtaaatattgggacgaatgagcccgtaaaagcacctagttattactcggtgctttaattttatttgctcaaagtgaataatgcttttgaagtgcataatgtataacaaatgtgtgatcataattagggtaaggactcccatctgctctatatgcccaagaatatttgtattttggttttgaagaattagaacgacttttccacgagtttcctattatactaaacttatatagaaaattaatacaagtttttatgtctgaaatattagggtatctagacgcatttgtttcataaaattttttgataatatcatatgaaaaataaatttgttttaaatctcccaacaaattaaggcaatcatctataaactcaattttataatgaatgctaagttcatttcttaattcattataaaaattgtttgaataagcaactttgtttgatctaaacagtgatgccgtaaatgcaacttcacctggattgttagattttattatatttaaataatttattatgtctctcggccttccaaaactataatttagtaaataagataaaattgtcttattatccagtttgtcaggaaataacctcttatataaattcttcttgctcatatttgcgaattcaggaatacttttctgaatctttgtaataattagatccattaaagggtgtttctctggattttgtaggtttggtatatctgcccagtatagtttcacttcacaatcacttgttattttacttaagtttgagttataagagtgcaaagtttccaatatgtcatctcttattaccactaacaccctgcaacttatatttttgctttgatatgtaatattaatatcttttataacattaattaatgatatcaatatttgtctataacaagcatcatcttgtatggtatcctctattccatctaagtcatcataaattaaagttatattattatatttaatgcaattttcaataagatttgacaaatcatttaataagttgtaataacttgctttcttgaagtttgtcttaatactgtaggccttttctgcatcactgctagcatccatatttttagattttcctgctatttttccaataattttattactgttagattcttctaaacctgtttttataaatgtcggatcactttgagatcgttcatatagcagagaatagaatttttttaatttccagtgccaaaaaaacttcctaaatctatatatcggcggagcaccttttaataacaattcagtaatgcctattaaaattgtccacttccaaaaatgctctagttctttagattgaaggtcacgtaaatctaagtcaattaagcacctaatattaaaatcacccattttacaaattttacaaagcctgttggaatcgatttctaccttttcgatatattttgatagaattgtttttccagaaccctttctaccagaaataatgaacttagacttatttgacattatattttcatatttattattacctttataaaaaagatctatgaaattatctttatttgcttctaattctccatcgctaaatcctacaaacatatctttaaggtttatattatcgtttattgtaccactcattatacctcctgattaaacatataatcttgctatgtaatgctattaacaatatattgattaaaatccattttagaaacacaacatattggtttctaattatatactataattatactttgatgtaataatactagcaattctttcatttttctatttttatactactacatttcaactagcctcgtttatatccatttatctttaaattagattactttttgtataatatatatatttgactttataaattgatctcaaatttagctttttgattatattacatatgttttgcaggaatattggcaaatgtatttttgattattcttctgataaatattttttcgcttcctcaaacgtagtgcattcttttgaatgtatcagatcataatgtgcttctaaatcttcactacaataagttttgtcatataaatcagaacattcatcttttgctatttcttctacttcttctaacgtgtaaccattattcatgagataatttgcaacatatatcttcacatcattaaatttacttttataagttaaattcttaaattttataaaatcagaattatccatattctttaatacttcatctttatgatcctcacatatgcttccatcaatcattgactcaatatatttttttctgcctctagtatgcattcttgtttctttattcctttctaacatttggagtaacatcttttctatatataaagatatatctgttccctcatcttttgctatatcctctatttcagacaataattcataatttaaatctatttttatctcttctcttggctcatctgcccattcttcattttcatcaagcacatcttcatatatagtaatatcaatccccctatatctcttcaaccataagttctgaatcatatccatatttctcgtagatttagcccataactctaatttctttatgtcttcttctttttctttattgtaataacactccaaaactgaacttttctttattccataaccttttataatcctttccatttgttctacttcaatattcaactcattgcatattacctttaagcttgtccctttatttaccctcttacatatatttaccatttcatctctattcataacttttcgctcccttgaatactatttataactttatattatatttaaaaaattaccgcgggaaatttttatttttcaattaaaaaagtgctcctacagaacactatatttattatcatttatacgctttatacacaacatcacatattatacatctatatttctacagatgtaaccactatagttattttaaattgaaatcttgtttataataatgtgtgctcttatttatttccttaactttacttttacttatatatctttgtactccattcctgaatactagataatactcattatattccaagtaaccattgcatactatctcttctgtatctgcaaaaataacatatgtacagctttcatttatagcttttataaattcctttatactatttaaaattatatacattgtcaaacaaatgaatgatataataccccatgaaatataattatttacgtcattcttacttgcagaattaataaaaatgaaatttctaccttccttcaataacgatattttttgaattgtgctgactattataaaactaactcccattagaaatattattagagatgtaattatgctagtatttatccatacctttgttttaacacctaacgtttttgtatatttaccctctagtttataaataaaacatatctttgctttataaaaataatataaagtacatataaaagaattaaaagtgaaaacaaataataaagtaataaatatactaacccataattccacctttgctgtattgcctggttcatggaataatatatttcctcttgttaatactactaagaaaatcataaatccatccatgattaacaagctgtacatagcccacgttgtaattatctcaaaaattgattgctttcctggaacgttcttataatttgccttaactgtttcaacaaaaaaatctctacatacttttatataaaaacttagtactgcccctactgttgttaatgttaatagtaaatttcttaaataattcattattatcccccatatccatatatatttttatgctctttaataaagctacctcttaactatattatatttagattcttttatatggcgtttatataacaatttcatcataatttatttgatatgtcttaaattcatagtgtgatattcctttgtatacatttcatatggcatttatactactattaccctataagccttaatataagaagaatactaaaaaataattgtattgcttgtatatccaatatatacaaaacttcacataaaataaagcacctatatttctgtagatgctcttttaactttcccactaatttctttatatttactttctctaaaatatcttcttcttcaagctctgaatattcttgtaattcatatacatgtaatatcttcaataattgatggaatttttgtcttcttactattctattatatatttaaataatccatatatatattgtctttttttaatcattgatataagctgtcatttttcccttgaacgtgtctattttcttggtatatctgagcttgttcagcatttctgaaaaacatacgagataatttagttttctttccatcctcagattttatgtacactcttgattccccattatctatttccttcacattggtaataacaaaatcttctagcctagtggctgaaaataactcgaaattgcatcctaaaaagtcaatctgtatcttttctatgaattcgaaacacagatttggtttatttatgaaatcaagatctgatttcacactgagttttcctacagtaatataactaaatggttctagatatataattggatccccttttgacaaacatgtgtataattcacctataatatcataatcatctttacttaagtcttttgaaggtataaatttcaaattgaattcatcttcaatatatttaactttattccaaaattcaattgaatctaatatccatcctatatcattatttgaatcatatcctttcggaagccttttcccatcaaactcaatgttagaagttaaaaaactatagaatatctctaatgcgtcaagcaattcttctacacatgaagcttctccaatcgctatttgcaattttatattgacatcactattaatctcattatagtatatttttatttctaaagaccttagtgtctcattctctatcaacattacattcatatcatcataaggtttacgtctaaaacttatgttaaattcttttccatttataacttttatatttatcacattggctggcggaaattctctaggtactagcattcctttaaaatcattgaggtcaccttcggttattggcatttttaccaattcatttatgtcatactctttgttatcaatttttactttaaaattatctattggtaatgatgtttgtgttcgatataaatattcattcagattttccctatgtttttctattatttctctagatgtttctaaattcacatttattttcatcctttttacagcgtcaatactaatgggtgataaaatacatctctctccaatagtcttgtattcaaatccttttggtaatacctcatttaaagcggcaactatagcttttggcacttctttagggctttcattttcaattaaaagctttttaaaacttcctaacatttatatatcctcctgaagttgttccattacgaatatttttgaaattagtaaatatttttcatcatcattaatactattcatatcttttaatatgaatgaaattatctccttattcgccgtctcatttggtacaactatatattttatattttctaaactaaatgttaaccaacactcttttcgagtttttaatgcatccgagtaagaatttaaattgtatcctttagttgcatctgtgactgactggggcaaaattaagggtatatctaaatcttcaggtaattttggtatatacctccactcacactcatcttgaaatagcctggttgtttcttccctctccttttccatcactccattgatgggcttagtatatactaaatctgtaattagatagtccattaaaaattcacagttttgaggtacttttacttcctttaaataaactttcttaaaaacatctataaaatcttttaacaaaggagaatcttcattaacatatttaataggttgcaatccattttttaacccccaattttctttatcaagacctataccatacccgccataataattcatatgatcacttaatttatttattggtatatcacaaaaacacgtcatagggtacgctattttctttaaattgtttatttttaaatactctacatattctgaataatatcgtggaattatcgccatattctttaatgctgtttttaagtactcaaactccctcataaaattgaataatgcatttgcactttgtgtccacttatattttcttgtggtttttacacccgataatctaataacgtctttatccatatttcccccctcaatataacatttatacaataatatccctatttacataataagactatatacaaaataattccacaaaaatattaatcaattctcgtataactttatccatctatataaagttgctcttcccactcctaataacttagccatttcaaccttactcagctctttattgatcatcttaatataatatcttttaaaatccttggataaattctcagatctcttttccgctctaccaaaccacctataagttttagttgttccagtttcaatacaccttacaacgccttgctgcactctctcaactgtattttctctttccatttctgcaactgctcccaagataattaatataaacttatagccatcaccatctatatttataccctcgttaacgtctagtttcaatttatttaatgcaggtcattaatactctttccacctattttatctgtataagccctattaaaagcaattcctagcttatcaagaatcatttcttgccttcctatactttgtttctttgtactaactctcttatacttataaatcataacttatcatccttacataataaaattatctttatgtcaatgtgtctcattaaactactcaaatctaatgatacataactaataaataagatcctacatttctgcatatatctattactataaacctttctctatgagaaattaaatttcaaaaaagtttttcggtatttgctctattggaaaaggttatctccctcggttctttggtcagtgatctttctctttagatatagggggaacacatatccatttatatttgcacccatatgtaaaaataatattttaatattgggtaacaaaattaacttttgaaattgtacccgctatagttcagttatatcaacactttgagctatatttattttggttggtaactaaagtaacagaaaaaatgtatagactctatcttttaataaaataagcttatttactgtatttctttatatatatatatattattatttttgttacttctgttactcatatatatatacctaccttaaagctagtcatagacttattatttatggtaacaactttggtaacaactttgaaaatattgtgttacctcacattatatcaattagatatcttctggatctgttctgttttcttaaataagtgatccattattttattactccttttgtctatcgtttatcaggttacaaattcactttttaaaactgtaaccgatggatttaagttatatcaatgctttaagctatatttactctggttggttacacaaaaatatatatacactctacttttataaaaataagcttattcactatatttctatataatatatattgttttttctgtaacttctgtaacttatatatatatatatatagtgcttaatgcaagcaatagccttattctttgcggttacaagttggggtacacacttaaaaatttgtgtaaccttgtttgttttttgtaaccagtatttgtttattagtatattatagaggaacaattacaattttgtaatttctaaataaattctgtaatttctttgtcttttcactaatggaatatcaactgtatctgttttactcctaactagacattgtcgttattctctaaattcttgcgatttatggataataatcaattaagataaaataaatctgcaattaagtatatagttgcagatttaatctatacttgttaaaactatctttatatcttgctaattatttctctaattctcctaacctctccatcaggtaactcatgtgctaaaagatcagtagaaaagttctttagtattgatctaataatgtgcattctttcttccatttggtactttttaacaacatggtgcataagcactaatcctatgctattaggactatcagtgttttccaaggcgcttagtaaattattttcatcttcatttcctagcataaatttatccattttatttttactccctttccatttcttgcttttcatctagtgaatcattaataattgtatatattaactctttatattcttcatctgttcgctcaccatacttgtcctctaattttattcttaaatctctttcaatagaaaagttaaaataaattactctgttatcttcccgccattcctctaattctttgtctcgttttcttttctcttctacaagttccatagtcctgctataaactattccccttatatagtcatctacacttatatttaatttattagcctcctcttttaactctttatacaaactctcaccatacgtgaatgtaaaatatttattactggatatttcctgaggcgttatgctcaataatttaacattctccctatctttcagtaagctagatatgtgcccacaaatgaagaatgtacgtccatatcttacatcatgtaaatcttcatacatcctaaaaacatcataatctctttttgataagtaaaatcttggtgttttaacttctacatcctttttttctattttatttgatttgctactactagcatcttctaaatagtttattttcatttgttacaacctctttcttaattcttgtaaatttttttgtagatcttctttttgatttttaaataagtgtttattctttaatcttgtttctagtgaattaatagcttttaatcttctcgagatactttccccgctcttaaaagtttcttctctttttatgattgttctttctgcgtttctcatgcattacccctccccctaatcttgtattaagtatttccttgctcttaatcttggccctatctttatatgaataatcacctactacaataaacttgtatactactcccacttattatcctcccattttctttaatttttttatatttatatttgatatggttttaattcttgccatgtaagatttaatccacttttaaacaaatccttaatatacagttataatactttgaacctgactatcatagtacattctcctttacaaagaacatgtctcctgatatacttttaattgtgagttaagggtgtatcgtttgatatgctcttttttattaaaatctagtattcattctgctgtgacctctacttgtactaattcataactattagcatatccatagtctttgtttaactccttattattcaaataaaatctcctcctatccctatcaaaatttaaatctacgccaaactcataccccctcattctatcttttaatatttcaacataagcatcttttaatgttaggtcatttctcttctctttttctgtattctttttaatagatattgcatagtctgccaggtttgtaatatctccagttcctgctacatcaaattttgttaccttagcacttccttgctgaggtttcctaggatgcgctactaaatgcactattgcattatatttcctagcaaagttctttaatttattaacaaatatcttttgggccatgtattcatttttataactatctttaagttctattttcatcaaattatcaattataaatactctaacaccttgtttcgctaacctattcatatctaaaagtaactgcttttcatctgttgttatgctatcatctgtataaacgaacagcttgtcctctatccatttatcaatatattttatacctattttccccaaagtcttatattggatgccattaaatgatttactagcaaagtgttcttcgtttgctattgtcgggtatagccaactttttaaatttgaatttgtaagctctggactataagcaaatactttatatccctgccccaaactctcagctatgcacatttggtttacgaatgtactcttaccattaccattgaaaccagttattatatttaaagaccccataacaaaacctagtaatttatcatcaatattattaaaacctgtttttatcttttccatcgtgtatatgtcaactacttcaactttatccaatgtagttattgtgttatcattccccattctggattttaaaaaatcaatttcatcaaacttctttttaatctcctcctcattctcaattcttcctgtttgcatctcctttgcaagttttagtctttcccttacaattcttaaattgaacaattcatttatatatggacttacatctgatacatttacattttcacattctaattctgttaaataacttggtaatatatcatatttaagcgctattttacatactattagcgtatctgtacttcctttacttgaataacattctgttaagctatcaaacaccttttggttagtagtattataaaaatcctcttttgttaatcctttatctagcacttttaccagtgtttcctttgaatttatacaatttcctaatatcgctttctcaatatctaaattaaatctttccatttgttcacctttttcaaaactcccttattccatcatcaatatatacttgtctcttaattattttggactgcctatcagtacaccatgtatttagaactctatagtgatccttatatctgattcctttcccatttgctatataattatctaaagctaatatttgaccactaagtagttcaattccgaatttatcagttagctttttatattcttcttgcgtaatttctactttatctatcacctcatcaataaacgataaatctatatattcttttacttttcttttattttctttttgtctcccatttcttgggggcagtgtacctccaatctttagcggtggtgtatctctattttgtgtaataccttcgctctttgtagcacctcctttttttggggggactttgacaaagtatttacttctcttacctttttgaatttctctaacaatgaatcctttttctattaaagagttaaatattttatccaatgtttcatctttttttattccagttaactttttaattaatgtcctgctaggatctgcatatcctgttttataatttacatatctaaatataactagcaatatgcctttttcttttaaatctaattctgtactatcaataattgaattatattcttgccaccttgtattgctataattgttccctccttcattcatttctcacattcctctctataatccaattatattatttaaactacttgcaacgctcctaaacgcttgtatttgtgtttctaaagatttaactttgcctttaagctctgctatctctaaatccttttttaagctttcatcattagtttcaattcctaaatatctatcgacctctgatttttcaattatatattcagttccacactttttagctttaatctttccagttcttatctcatttcttactgttgctggtggcttattaatcatttcagcaacttcaacaaccttataaactaatgctaacttactcatttgtttacctccaataacttaattttctataaatagttctttaactgttgagttaagcactaatgcaatcttttttaatgttccaaatttcacattatcaatattacctttctcaattttaactaatgttacatttgatattttagctaacttagccagttctttttggtttaatccctgcataattcttttaattttcacattcatctcagcactccctttaactgttagttaaaactatattctaattatacttatctatcagttaaaagtcaacctgttttttaaataatattttaactattggttaaaatatgatataattaaactatggaggtgttctatgaatactataggcgaaagaattaaatatattagagaaaatgcacatattaccaaaagtgaacttgcacgaagaatagacgtttctcctgcatatataacaatgttggagaatgggaaaaaagaaaatccatcccttgaggtattaaaaaaaattgttaacgcacttgatacatctttagataatttattgcataaagaactccaagaaagtcgtattcaattcataatggagtattctgtcaaatatcctgatgacaagaaaatatcaaatatagtaagaaaaattaatgctggaaaatctttatctgacagagatatagaagatattgataactataaaaaagctgatattgtggctagagattttgatgcttatgatgttccttgtgtacgtgacccagaacatgaatctttcgaattatttaaaaagttactaaagtcattaggctatactaatgatgatcttggatcttcagctgtggtgctatttgctaggataaaagctcaaatagaattagaaataaaaatagcaaacgaaaacaaggagagattgaatggcaacatataagaatatatctgatgtttcttcaaagcctaattggagagcaacagtgagtcttggatataataatggaaaaaagaacattgaaagaaaacagggctttaaaactaaaaaagacgctgaaaaatgggttactgaaattttgtctaaaagaaataaaggttttattgctccaactgaaagtaacatattgtttaaagaatacatactaaaatggtttgatgagtataaatctaaacatattagtattaatacaagaactaattataaatcaagaattgatactcatataataccgaaattaggcgcatacaagctaaataaaatcactaatgcaattgttcaagatttctataatagccttatagctgaaggcatgaagccttccagtgtaaaaaagataattgaaacagtgactagtgttttaaaatatgctcaaaagagtaaattaatatataacctgcctactgatatagaaaagcagcctatgaataaaccaaaggttgagttttggactaaagaagaaattgatttttatttagatactatttatgattcatacctctatactcctattttaatagaagtatttactggcttgagagttggcgaattatgtggtttaagatggtgtgatattgattttgatacaaataatttaactgtaaataatcaagttatctatgatagagaaacaaaaactctggtattctctgaaatcttaaagacagatacaagtcatagaaagataagtttacctatgatgttgatagatcacctagatgccattaaaggtgatgctcttgacactgattttgtagtattaaatcgtgaaggtataatgtgtaatccaagaaatctatctatgaatttcactaagtctatagctaaatataaaaagccttttcaagaaattgaagacaacgaatcaaaatttaaccctagcgattatatgcaactcaagcaaataacatttcatgccctaaggcatactcatgctactttattaatatttaatggtgaaaatattaaagttatatctgaaagacttggccataagaatatatctactacattagatacatatactcatgttatggaagatatgaaaaatgctactgcaattttacttgataatatttttaagtacgtgcctagtacaatatagtacaaaaagctgaatcaaaaatttagtacaatttatagtacaactttatgcacaagaaaaggctcaacccgcatggttaagccttttcttcatgtaacatggtactcccagcgggaatcgaacccacatctatcccttaggaggggattgttctatccatttaactataggagcataatatttaaatattctttttgtttaatttgtacttataaattttattacaattatttgtcattgtcaaattaataatttatttttacataaaaaaataaattatattagatattaaatgtctgattactaacctttcaaaaaataaatttttccataaatacttgataaaatgtaaatactgtaacttatccttcttctagctccatataaactaataaacaaaaaacctgaatatactaagctaaaactgtaaaaataaagcttaaataccctctatatgtatttaagcttcatagttttaaattgttttaactttaaattttttattaactctaactctaaatatatctacaattttagttatcagaggactggatgctattattactgctagcgatatgagccaatgacttaattgtattttagttaagctaaatatatatcttcctattggtgttaagaaccccaacactattatcccaaacatagataaacacattaccgttttaaacttagttaacggtcttgcgactctaagcaataccaccatactaattccagaaaacattagtactgctaaagttctactgtaatccattgggagattcatttgcattgatataataaatgttataagtataaatatagcaagtaatatcccgttaggaatactaacagttaatattcttgttaaaaatccctttttaactccacccgtgctaggcaataacgccaaaaagaatgatggaattcctatagcacaacttcccactaatgacaactgtattggaagtattggatactctataaataatattgaacatacaaatgatagaattatgcaaaatacagttttggataaaaataattctgatactctctccaaattattaatttgctttcttccctcttcaagaactttaggaagtgcagtgaaatcagatttcattaatactaattgcgctacagcttttgttgcatcggaaccatttgccattgcaatgccacagtcagatgattttaaagcaagtacatcattcactccatcacctgtcattgcaacagtatgccccatttcctgaagagccaaaacgattcttttcttttgatgtggagtaactcttccaaaaacagttatttcctgaatcaaagccttcaatttttcattatcctctggcaactctcttgcatccacatatttttcccagccacttaagcctgctcttcttgcaacctctgaaacagtaatagggctatctccagaaataattttcacccctacgccttgactatcaaagtactttaatacatcaggtgctgcttctcttatgatatcctcaattagcactagtgctacactttctaccttaccttctaatttttcattcaaattgttatgaagatttgctagtaataaaactctttttccttttctagcttcttctttaactatttcttctattaactggtattccttacccaatattatttctggtgcaccaagtacccatgtcccaagcttttcaaaagtagctccgctccattttcttttagatgagaaggcaatcttgtctaaaactttgatttccttatcatattccttatatttttctaatatagctttctgagtcggattattgcttggcaaattatttattaatgccgctaatacatgatctatctcttcagaacttttagaaccaatattcttcacttctgacaatcttaactctccttgagtcaaagttcctgtcttatctaaacaaagtacatcaactcttgctaatacttctgtagcacttagttcttgaactaaagtatcatatttagatagctttataattgacactataaacgtagcactagttaatagtactagtccctctggtatcattcctacaattcctgatactgctcctattaatgcatcctgccacgtattccctggtattcttagttgcgttattattaataatgcagataaaggaggtacaatccatattattactctaaaaattttatctattgctgcttgtagctctgaatttattattttaaattgtttagcttcctcagcaagagtagatgaatatgtttctttacctacttttgtaacaatcgcatatccctctccagataccacgaaacttccagataacaatgtctctttgtaatttttagatattgcatcggcttctcctgttaacatagactcatctatttctaatccgttactatgcaaaacttctccatccgccaatacctgcatgccggtttctagataaatcacatcatccaatacaatttcttctattgcaatctcctttatttcaccatctctaagaacttttgcatgcgcagaacttatgactgataacttttctaatgtgcgcttagctttaatttcttgaatcactccaattaatgtatttactattataacgcctacaaatatagcattcttaggtgatcctgctagaataattattgctgcaagcacaaagtttattgcattaaaccttgtaaacaaattagctcttattatttgaggcatagttcttgatggcgttttcggaatgtgattcacttttccttctttaattctctgcttaacttcttcagatgttaaaccaattatagcttcagcatctttctccttcatattcaacgtattattatttaaattcatcaaatttctcctgcctatgtaaattatttgctatactatttcatagaattatcattgtcttatatattatacattttttaatattattttaccctaattatttacttaattttaaattaattttattgaatttttaataggtatgtaatctatttagtctttcaatatgttaatttttatactatactgattagtgtaaaaattaatatattaagggtgtgtaatttttaatgttaagaactatctatttttatctcggattaataataagtcttatattttcatctatttatagaattaggataaaaatcttaactaataaaggagatattgaaggaagaaaatggttcattcataaagtaagccattcttgggcaaaatttataatgaaaatatcgggtgcaaaaattaatgttgtcggtttggataatcttccaaaagatcaaactgtattatttgtatctaatcaccaaagtaactttgatattccgttgcttctaagctgcattgacattccaaaaggatttattgcaaaaaaggaacttgaaaagctacctcttattagtacttggatgaaatatataaattgcatttttatggatagagataacttaagaaaatctgctgaatcaatagttgaaggtgttaatttattaaagtctggttattcaatggtaatatttccagagggtactagaagcaaaggtaaatctgtggacgagtttaaaagtggaagcttcaaattagctacaaaatccaaatgtcctatagttccactgactataaatggaacatataaacttatggaggaaaataataacgcaataaaaagtgctgatatagaattagtaatacatcctttaatagatgttgctaccctaaataaagacgagctagaaaagctgcctgaaaccgttcattctatcatatctagtgcttgcaagctacactaatataagaaagcaagttgccttaaattaggcagcttatttttatacattaatttaagtatattttatactaaatgctgctaataatatatttagattataatatcttttgacatgaatttatctattgtgttataatgaattcatttgacttatatataaaactttaatataagttatcgaaacaaaaataactaattttgaaacaaagaaacgaggatatttaatgaatgataatcaatttgctacattaggtcttaaagagagtattgttaaggcaatatcagaccttggttttacaaaaccatctcaaatacaagaacaaagtatccctgtaacacttagtggcgctgatttaatagggcaggcacaaactggtaccggaaaaactgcagcttacagcttaccaattatcaccaagatgagtgataataagggaatcaaatctcttattttagcaccaacaagagaacttgctgttcaagttaatgaggagatacaaagactttctaaatatgagaaaattggaactctagctgtttatggtggagattcaatcgaaagacaaatcagagcactaagaaaaggcgatgtcgatattgtcgttggaacgcctggtagaatattagatcttgtaaaaagaaaatgccttcatttagaaagtatagaatttctagtactagatgaagctgacgaaatgcttaacatgggattcatcgatgatattcaagaaattcttagtcatacaccatctgaaagacaaactttattgttttcagcaacaatgcctgatccaatagcaaagttggctaaaaagtatatgaaaccagatgctaaacttgttagtattaagaggagttcattaactgtatctaaaattgagcaaagttattttatgattaataataagcatagattagaagctctttgtagattacttgatctagataatcctagttcggctataatattctgtagaactaaaagaggtgttgacgagcttgtacaagagctacaatcaaaaggttatatggttgaaggtatgcatggagatatgacacaagctcacagattaactactttaaataaatttaaagaaggtacactaaatctattaatagctactgatgttgctgctagaggtatagatgtggaaggtgtgactcatgtatttaactatgatttacctcaagatgtagaatcatacgttcacagaattggtagaactggtagagcaaataaaagcggtacagcttattctttagtaactccaaaggatttttcaatgcttaaacaaattcaaaatgttactaaaagttcaatcacacaaaagccagttccaactgcagaagaaattaataataaaaaatttaaggacatgatgtcagaggttgagagtactattaaagctggtgagcttactaagtttataccaagtgcaatagaattgactgaatcttatgatgcagtatcagttatttcagccctaatgaaaatgaagtttgaaaatgaaattgtatttgattacagttcaaacaaattagaagcgcctaaaaaagaagatgttcgtttatttttctctgtcggcaaaagagacggtttaactccaaaagtgttaattaattatattaaagatatgacaagagttaatgcttcagcaattggtcaaatagatcttatggagaacttctcatttgtaactgttgatgagtctatatcttctaaaatattaaaaaattgtcctggtggaaaaattaataagaagaaggttaatgttgaggttgctaataagcgtaagagataataaaactttttattcttaatactcttacttaagggaagatttaaatttaggtataatgcctagagcttatcctcccttttttgcttttattataaaaataactactctaaaaatagcattaaaacatttcatgctattccttatacatcactgtatatccgcatcatcttgataagaatccacatctattatattcgatgtattttctaacgaatactttttctgcattattatactaagaactccattatcaatacttttaagtatctgatttgtgtctatatcctcaatatcattaaatcttttattataagcattcttaacaagagcagtattagaaaatatcccaaatccactttttttaatttctaatctatttaggtttatatctaatattcctggatcatatcttatgcttaattctctaagatcaataccttttagatctatagttagatgatacatatcatcataccgattaagttttataaaattattatattcttctctatttccttcattagaagaaatattttcattatttttagcaaattcatttatatcaaagttatctaaaaatgaatgcataattccacttatcttttctatattgtttggattaaaaacattatcaaatccaaaagtaaaaattttaaacatatcttcctcccaatatatttcttaacacttatataatatttataaacttccaatttgtttaaatcatttatcttaattttagttgtatttttaaactttaattagtgtatcaattcctaaatattacttaattttttcaagtgtataatctcattacttttttaatactgttctagtccaatatatttctttttttaaatatgcatcaatacactattgaataaattcatataagatattacaatatttattatatacaggaggatactataatgaagcgtattgataagatttataactatattttaaaaaattctaagaactttaataaagacaaatttttagatcaaaaggggtttagcgcccaagaaattggcgaaaaattagatatactaagaaataatgtttcaaaagaacttaatattctctgtagagagaagaaaattattaaaataaaaaataggccagttatgtattttgataggagttgccttgaaaatatactatctataaagctacctgaagatttagatgaaatattagatattaatatattactttcttctccttcaaatgcatttattgagaacaagtcaccttttaactatctaattggcgctaatacaagtttaaaaaatcaaattgaacaagccaaagcagcactgatgtacccaccaaacggattgcatacattaataattggtggtacaggcgttggtaaaagtttatttgctaacataatgtatgaatattctaaatatataaaaaggctctcaaaagatgctcctttcgttgtttttaattgtgctgattatgctaataatccacaacttcttctatcgtatatttttggacacatcaaaggttcctttataggtgctgataaagagatagatggtattgtttcaaaagccgatggaggcattttactccttgatgaaatacatagattaccacatgaagctcaagaaatggtatttcacttcatggatacaggaacttacaataaacttggtgaaacaggtagtacccgaagagctagtatactattaataggttcgacaacgaaagatccaaattccaccttacttaatactttcacaagaaaaattccaataactataactattccaagttttgatgaaagaccaattgatgatcaaattgagttgatacactatttgttatcaaatgaggctcaaagagttaacaaaactattaagatttcagctgaagctattgaagctttaataagaagtacgtcttacggaaatgttggacagcttaaattgaatatccaatcagcgtgtgcaaaaggatttttaaactgtatcaatacagatgaatgtattgatataaatttaaacttattcccatctaatataaaaaacaaaattttaacttttagtgataaaggaagggttaatgtaacagaatggaatataatccctaacacaattacaattcaacctgatggtgataaaactttcttagaaactgatgattatgaaccaccttttaatatttataacattattgaggataaaacttctgctcttcatgaagaaggtatgagtgatgattatataaaagattttataactactgatatcaatattcatttaaagcaattctattctaggcttaaaaacgatgcacatcgtcgtgaagtcttattaaaaattgttaataaggacatttttgaatttgttgaagagatcaaagctctggcagaattcaggttaaatagaaaattaaatgaaagatttatttatgcaacaagtctacattttagcgctctgtttaatagaattaagaaaaaaaatgattccttttcatcacatattgatctacaattatctgttaacaataaagaatatgatgttgcagctgaaattcatcagttgacccaaaaacgttataatatgactcttcctccaattgaggttgattatctagcattgcttttggcttcaatacaagaatcctctcaccaagaaagggttggggtagtagttgcttctcatggctcaagtgcagcaacaagtatggttgctgttgctagaaagctctttgatgttgataatattttagctgtagatatacctcttgaaatgatgccttctgatatgttacaagttattactgaaaaagttaaaatagccgatgaaggcaaaggagtattgcttttagtagatatgggatcattaaatagcttgagtgatgttataaatgaacgtactagcattaatactaaaagtttagatatggtatcaacacaattagttctagaggctgttagaacatgttccctctgcaatacagatttaaactctgtttattcttatctagttaatgattttaaaggatatgcaaataatgttattaccgaatactaaactttagtaaattctgaatttagtatcaaaataagcttgtaaatactggaatatatattattcctaaaaaagtgtatcaaaatattcatacagtgtattacctttgtaaaatttcaatttattaaatataatcaaactgtatccttaatagtattcaatgttatctgacacactaatgaggatgttaattactatatattagtatccaaatagtaattaaaagatggtaaagtagtgatttcattaattatagacatttataaaaatttctcaaaaaagcttatcaaatcagcagaaatgattttcgctactcaaaaatgtagacatagttatatttaaatcaggtgaggatataagcaatctagttggaacatatattaacataattttcaccttcaggtgttcaatctcacatagttgattagaattaaaaaaaatgtagttaatctacattttttttaacaaatttaatcacttacattcagttgattatttattttttcttttgaaatcagttattttttctttaaactttcttacttcctcttttgttttatttatttctatatgatctaaattacctctacctaacctatctgatagggaaactaagaaaatctcatttatatctacatctcttagcatgtctcctatattttgaaatttcatatctttagttacaaataaactttgcatatgccatcttacaagccctcttacttcatctataaagtcttcttccatgttaaaatatgtaagaaattctctagccatttcagctcctacactgtcgtggttataagatgttagtcttccttttcttaatttagtagtaggttttttacctatatcatgcaatagaagtgcccacataaacactcttttatctctacttctttctctatttactgctccttgatcaacaaccatcattgtatgtataaaaacgtttccttctggatgaaatttaggattctgatcaacatctcgtaagtcgcttatcattgaaaatggataattatcaagattatgattttttagtgcattctctaagtaagtagatggtttatcatcgctaattaaatgctcttcaatatttaaaaaaatttctttttcattcataatatactcctattagacattttctactgaaccaataaactttattttaattcaacaatattagtatatctaatatcaaaattattaaactcaaaagtttttaaaaagtcactttcaatattactacattatttatatatagaaatagtaggtaaatctatatcaaaaaagatcaacctactattttctatatattttattcttattgcttactgcaagttagattctatattaattggtgaatactttatttctataaagctgcatttcctctctcacctgttctaattcttatagcatctgcaatatcaattataaatatttttccgtctccaacttcaccagtcctagcaattgaagtaataagttcaattacatcttctaccttgtcatcttctacaactattttaacttctatctttggtaatacatttgttgttatttcagtacccctatgatattccttccagccacgttgttgtccgcatcccataacttgacttatagtaacaccatttatatttttattctttaatgcttctttaacttcttcaagcttcgaaggtcttacaatagcttctactcttttcataatatacttcctccctaatcatctatataatgtataatattattttaacaatatatatctaaaaattatacaactaatttttatacaaatactttattacaatatatacattacacaatactataaagtttcatggatatattaatatttagtctaatccagtaaatgctgggtatgctgtttcaccatgctcagcgacatcaagaccatcagcttcttctgcactttcaactctaatagtcataaataacttcataactttcaagataataaatgtcataaccgctgcaaaaactattgttattgctataccttctatttgagctattaaaagcttaatatctccaaagaaaagaccattccattgtgctacagagtttattgctgtttgtccaaatagacctgttgcaatacctccccaaactcctccaattccatgacatccaaatgcatctaatgcatcatcatatccgaatttagatttaactgcagtcatgaagaagaagcatattggagatactatagctcctattataattgaactccaaagaggaacgaatccagccgccggtgttattgcaactaatcctacaacagctcctgttgcagctccgagtattgttggctttccatgttttattttctcaattagcatccatgaaagtagtgctgacgctgccgcagtatttgttgtcatgaaagcatgcactgcaagtggaccagcatttaatgcactacctgcattaaatccaaaccaaccaaaccaaagtaatgctgctccaagaactacaaatggaatattgtgtggcttatatgacatcataccatatccacgtcttttacctaatacaatacaagctacaagtcctgaaactcctgaacttatatgaactacatctccaccagcaaaatcaactgctcctaaagagtttattaatccacctgaaccccacaccatatgtgctagtgggtagtatactaaaattgaccacaatgctatgaatataaatagtgctgagaatctcattcttcctactaaagatcctgttataagagccggagtgattattgcaaacatcatttgaaatgctgcaaaaagctcatgtggtatagtaggtgcatacgatgaaggatttccacctactccattaaatccaaaaaagttaagtcctcctattactcctccaatattatctccaaatgctagtgagtagcctattaaaacccacattacagatgctaatccacaaataaagaatgaagacattaacgtatttaaaacattttttctacgaaccattccaccataaaagaatgcaagtcctggtgtcattaaaagtacaagtgctgaacaaatcaatataaaactgctatcgccaaaattaatttccataaaaaatcccccttaaatatagtaagtttaagatataaattgctaattaacatcttgaaattacttaaattttttcaaataactgttaatagagagataactgcgcacattatctaaaaatgaatttaatagtctcttagaattataattataatttttataaatgaaaaaaggtgcttgagaaatatacttacgagtatatttctcaaacaccattgttcttattgatagtatattatctccatataaaattgtcaacatttttttcaaaggagatttaattttgtttaacatctaatcaaaaacacttaatgtattaattattattttctttatgttttcatgcttaattggcatttcctcattcgttcctattaattgaatcaaatttacgagatctcttagcttacttatgttataccaattttgagtaagcttataatctgaaaatttattatactcatattcaaatgcctcaattaattttctattaaaatattcttcatatctaaagaactgtcctatatctgctaaagggtgccctgctattacgaactcccaatctaatatacctgctagcattttattttttattattatattagtcccctgaaaatcgccatgaacaagcctaggatctttatctaaatctcttaatgctttttcattctccctaatcacacgattaatgtcatttacaatagtttttcctaaacgcttcttagctatatctcccatgaagctttcataccatgaaacaagtggtggtagttcttctcttatatgtaaacattcatctaaagccccaaccttagaaaacttatagctatgtattttagctaaagcccttgcaacgtttctaacaaaactatcctccaaactataaccttctcttatagcctggcctatagtttttccctcaatatattcataaatggcatattctctgtttccaatatcctcatcttcacttactctatatacttctggtacaggtacaaacttagaatttctcaagaaatttaatagcttaatttctttcttataatcctgcccctttataaaaaatatttttaatatatattttttttctagattattagattcaacaatataatttgtagtcctgcaccctgaatctattggtataatattattaatgtcacattctttcaatatacctttgaataactttttaatcgttgcattactaacttccaaaaatggaaatgtcctttcccatctatattccatgccttacctctttatttattcagcttattgcttataatcaaaattaaataaaaatattcttaaacaaaagttttttataagtccaattccttttaagtaaaatattaaaatttacgacaatatctaaacaatatatttttactatttccttggaaataatctactaggatgcttctaattcctttacataatcataagctttctctattgcttctgttttagtttcgtatatatgacttactccaattttaactgcaaaccccatcttatttagtactttcataggttgattttgtacatgtgttaagcaaagttttatatttaactcattgcaatgtttaagtaatctagttaatgcatctatggcagatgcatctattgcgtgagtatgtctcatgtctaaaattacaacccctactgaagattcaatttccttcattttatcaaaaaactcatgtattactccaaagaacatcggaccatttacttgatatacacgtatccttccatctgccttttccagtacagtattagtgtccttatcgaaaaccttctcctctaccaaatctctaatttcagtagtatcagatactctcttcatgaataaaaacatagtcataatcattccaattcctattgctataatcaaatcaaatataaccgtgcatgtaaatgtaagtaataatacaataacatcacttttaggtgcctttaataatgatttaaatactttccattgactcatattataagcaactattatcaaaattgctgaaagtacggacattggtatcatccttgcaagtggcatcaaaattaacatagtagctaacaatgttatagaatgtaccatccctgatattggacttcttccatttgattttacattagcagcagtccttgcaatcgcacctgtagcaggtattccaccaaatattccacatgtaatattagctaaaccttgagctatgagttccatatttgaatcatgtttatctgatatcatcccatccgctacagttgctgataatagtgattctaatgctgccagtatagcaatagtaatagatggagcaaataatttatttattacatccatatttatcttaggaaacataggcattggtaatgttgatgatatctcctgaaacctacttcctatagtctctactggtatattaaatattttcacaaaaatagtagcgacaattagcgcaatcattgatccaggtattgtcttgctaactttaggccaaaatatcattataaaaatacagcttatacctattattagcgaccatgtatttaacgttcctatattggtaagataacttttccattttgcaaaaaactctgctggaacattttcaattttcaatgctaaaaaatctttgacttcagtggataccagcgttactgctataccagcagtaaatcctattgttattgtctggggtatgtacttaattaatgaaccaaactttaaaatccccattattattaatataattccagccattatcgttgctacaacaagtccacctataccatactcttgaataatagaataaattataacgacaaaagccgctgtaggtccacctatttgaactttacttccacctaatagtgaaataataaatcctgcaaatattgctgtcgtaagccctttctctggagatactcccgatgatattccaagtgctattgataacggtaatgctattacagctacaataacgccagctataatatccttcataacttgctctctagtaatttccttgttcttaatcatagaaaagaacttaggcatcatttctaatcacttccttattaaatttgtcagtctctatcttactcctaaattttaaagtagtcaaaatacccctatcattactacattactagaagaattcatagagaaattaatccaaagtgattttttattgaagccaattcatttaacttataacaattatctataatataattatacttttttatctcagttatgttaaatacttaatattttatctatcttactttctaatccttttgtgatattcattaatggcaatctaacttcatcagaatctattatacctaatctctttaggctgtacttaagaggtgttggatttggctctgaaaataatagcggtatcattttatatagagaattccatttttttagtgcagcttgatgatcattagcctttgctaagttatatacctcaataaaatctttagtatttatatgtgctgatgccattattccgccttgtcctccaagcataagcgtcgtataaaaatacatatcttcacctgttaagatggaaaaatcttttggaggattcattaatagttcagttgtttgcttcatgcttccacagcagtcttttattcctattatgttttttaactgagataatacatgcacagtttcattttcaatattagctccagttctatatggtatattataaagtactatatccaaatcagttgattctgatatacttttaaagtgctcataaatacctctttgatctggtctcgaatagtatggtgtaactgatagtattccattcactttatgcttttctactaattttagctttttaattacttcacttgtattattaccgcctaatcctacatatactggaactctattcttattatattcaacagttttttctaaaatttcttcatattcattctctagtattgtaggcgattctcctgtagttgcaagtggtataattccatttactccttcttctacgtaatgattaatcattctttcgtaagatttaaaatctacctttccatctttaaatggtgttaataatggtactagaactccttcaacctttgccaacttttcccaactcctcaaatctattttattaaataagaaaacccgttagcatatataccaacgggtagagttaaccgcataaaacttgtacaaaactaaaacataaaatatcataactataacattattatctatagcttcaccaaatccttgtagctctccactttcgtgacagttatgcatatattttatgcatacccagaaataaatttttgcataatctaaatcttcggctataatacctttctttattagtcaacgtttgccaactcataataaatactctttattaatagcacctctaccttaggttttcgttattacattattaaaattatatcatttaattaactacttgtaaataaaatagcatctatcactttaccaaataacataattattactaatattattatcggctttataatcttcgctccacttttaattgcaaaatgtgcccctaaataatttcctaaactagcacatatagctgcaggtatacctatcataaataaaaccttgccatttaatatataagctattagtgctgcaaaattagatgccaaattcactatcttagcattaccagacgcagttataagattgaatcctaaaaacgatgtgaaagctaaaactaaaaatgttcctgttcccggaccaaaaaatccatcataagctcctattactaaacctattattcctgccactaaataaatctttctatgttctacttttttttcgttattttctactccaatctttctgttaaacaaaagaaaaactgcaacaataggtaaaatgataataagacagtattgcaaatacttttcatctagtagcaatactaattgcgttccaaaccaagatcctataatagcacctatagctgaaattaatgctggtttaatttttatattaccactgcttaaaaattttatggaagccgcaaatgttccaataccatttgcaaacttattggttccatatgccatatgtattggcattccagcaaaaatatatgctggcaaagagattattccccctccacctgcaacagcatccacgaaacctgcacaaaatactaatgggcatatgataagcaatgttatattatatgaatacataacctctcctaacgacaataagttgattatattctctataaagataattaacttattacgactttaataaaaataaaataaaaaagatagtcattacaactatcttttgcttacctcgcaacgtcctactctgccacacagtctcccatgcagtaccatcggcgctatagaccttaactttcctgttcggaatgggaaggagtgttacctctatgccatcatcacgagatctttaatttgaaaaaaactttgttctttcaaaattgcacacagtttctttaatgtatattacaacttgactatattggtcaagccctcgacctattagtatcagtcagctaaatacgttgccgcacttacacctctgacctatcaaccttgtagtcttcaaggggtcttactagcttatgctatgggaaatctcatcttgaggtgggcttcacacttagatgctttcagcgtttatcccttcccgacttagctacccagctatgcttctggcgaaacaactggtacaccataggtcagtccatcccggtcctctcgtactaaggacagctcctctcaaatttcctacgcccgcgacggatagggaccgaactgtctcacgacgttctgaacccagctcgcgtgccgctttaatgggcgaacagcccaacccttgggacctacttcagccccaggatgcgacgagccgacatcgaggtgccaaacctccccgtcgatgtgaactcttgggggagatcagcctgttatccccgaggtagcttttatccgttgagcgatggccctcccacgaggtaccaccggatcactaagcccgactttcgtccctgctccacttgtaggtgtcgcagtcaggctcccttctgcctttacactcttcgaacgatttccgaccgttctgagggaacctttgggcgcctccgttacattttaggaggcgaccgccccagtcaaactgcccacctaacaatgtcctgtcaccagtttcatggcatccagttagaacttcaatactatcagggtggtatcccaacaacgactccaccaaggctgacgccctagtttcccagtctcccacctatcctgtacagacaataccgaaattcaatgctaagctacagtaaagctctacggggtctttccgtccaatcgcgggtagcgagcatcttcactcgcactacaacttcgccggatttgcagttgagacagtgcacaagtcattacgccattcgtgcgggtcagaacttacctgacaaggaatttcgctaccttaggaccgttatagttacggccgccgtttactggggcttaagttcacaccttcgcgttaccactaagtgttccccttaaccttccagcaccgggcaggcgtcagcccctatacatcagctttcgctttagcagagacctgtgtttttgttaaacagttgcttgtgcctattctctgcggcctgatttctcaggcaccccttctcccgaagttacggggtcaatttgcctagttccttaactgcaattcttccgtcggccttaggattctctcctcatctacctgtgtcggtttgcggtacgggcactacttctctctctagatgcttttcttggaagcatggaatcagatacttcggttccgtagaaccttccccatcacgcctcagaattgttggaacggatttgccaatcccaactccctaaacgcttagactagcatccaatagctagcacatcctatccttctccgtcacaccatcgataataacgattatagtggtattggaatatcaaccaattgtccatcgactacgcctttcggcctcgccttaggtcccgactaaccctgagaagacaaactttactcaggaaaccttagatattcggcctgtaggattctcgcctacatctcgctactaatgccaacattctcactcgtaatcagtccaccgctccttacggtacgacttcagcccgattacgacgctcctctaccgctcacgcataagcgtgaacccgtagcttcggtggtaagtttgagccccggacattttcggcgcaggatctcttgactagtgagctattacgcactcttttaatgagtggctgcttctaagccaacatcctagttgtcttagaaatcccacatccttttccacttaacttacactttgggaccttagctgacgatctgggctgtttcccttttgaccatggaacttatctttcatagtctgactgccggactgatagtatgtggcattcggagtttgataaggttcggtaagcgctatgccccctagcctattcagtgctctacctccactactcacattttccgacgctagccctaaagctatttcgaggagaaccagctatatccgagttcgattggaatttctccgctatccacagctcatcccatgctttttcaacagcaacgtggttcggtcctccacgaggttttaccctcgcttcaacctggccatggataggtcacccggtttcgggtctacagcatgcaactagtcgccctattaagactcggtttcccttcggctccgtaccttaagtacttaacctcgctacataccgtaactcgttggctcgttctacaaaaagcacatcatcacacacataaggtgctctgatcggttgtaggcacatggtttcaggttctatttcactcccctcccggggttcttttcacctttccctcacggtactgcttcactatcggtcatcaggtagtatttagccttgggaggtggtcctccctgcttcccacaaggtttcacgtgtctcgtggtactctggtgcagaactgattatcatagttttcacttacgggactattacccactgtggtccaactttccagttgtgttcaattaactatgatttctcgttatgttctgtccgcaaccccagagataaatctctggtttgggctctttccttttcgctcgccgctactaagaaaatcgatttttctttctcttcctccaggtacttagatgtttcagttccctgggtataccttcataaagctatgtattcactttatgatacatggggtttcccatgtgagtttcctcattcggaaatcttcggatctctggctatgtgcgcctacccgaagcctatcgcagcttatcgcgtccttcatcggctcctgatgccaaggcattcaccatgcgccctttgtagcttgacctaattattagtcatatcacaaagaatatttattcttggctttgttgtattttatatacattaaatctatgtgcaattttcaaagaacattgaaagacttagtctttcaaaattgaacagaacaaatacttaagtaacctttgagcaagtattttatattttgatacataataatgtatctgtactagccaaacatcatgttggtctagatttctccatagaaaggaggtgatccagccgcaggttctcctacggctaccttgttacgacttcaccccaatcgctgaccctaccttaggtcgctgcctcgcttacgcgttagctcacgaactttgggtattgccaactctcatggtgtgacgggcggtgtgtacaaggcccgggaacgtattcaccgcgacattctgattcgcgattactagcaactccagcttcatgtaggcgagtttcagcctacaatccgaactgagactggttttaaagtttggctccacctcacggtttagcatctctctgtaccagccattgtagcacgtgtgtagccctagacataaggggcatgatgatttgacgtcatccccaccttcctcccggttaacccgggcagtctcgctagagtgctcaactaaatggtagcaactaacaataggggttgcgctcgttgcgggacttaacccaacatctcacgacacgagctgacgacaaccatgcaccacctgtcttcctgccccgaagggcttccccgattaagggtaattcaggagatgtcaagtctaggtaaggttcttcgcgttgcttcgaattaaaccacatgctccgctgcttgtgcgggcccccgtcaattcctttgagttttaatcttgcgaccgtactccccaggcggaatacttaatgcgttagcggcggcacagaggtcatgacaacccctacacctagtattcatcgtttacggcgtggactaccagggtatctaatcctgtttgctccccacgctttcgagcctcagtgtcagttacagtccagaaagtcgccttcgccactggtattcttcctaatctctacgcatttcaccgctacactaggaattctactttcctctcctgcactctagatatccagtttggaatgcagcacccaggttaagcccgagtatttcacatcccacttaaatatccacctacgctccctttacgcccagtaaatccggacaacgcttgccacctacgtattaccgcggctgctggcacgtagttagccgtggcttcctcctcaggtaccgtcattatcgtccctgaagacagagctttacaatccgaagaccgtcatcactcacgcggcgttgctgcatcagggtttcccccattgtgcaatattccccactgctgcctcccgtaggagtctgggccgtgtctcagtcccaatgtggccgatcaccctctcaggtcggctacgcatcgtcgccttggtgagccgttacctcaccaactagctaatgcgacgcgggtccatctcatagcggattactcctttaattgctatgccatgcggcactacaatcttatgcggtattaatcttcctttcgaaaggctattcccctctatgaggcaggttacccacgtgttactcacccgtccgccgctaatccgttcccgaaggaacttcatcgctcgacttgcatgtgttaagcacgccgccagcgttcgtcctgagccaggatcaaactctcaataaaaagtttaatcttagcttactcaaataaaaattgctggtttacttaaatgtatttatatcattctgttcaattttcaaagaccaatttttctttcttacaaccattgttgtaatgttttgttgttatctgtcgtttctgacagcttattcagtatatcaccgcttttgaagcttgtcaacaacttttttaaaaaactttttgaactcatttttcagtagttctattagcttcaagttattaattctgcatctcttagcgaggactttatcatatcatcaccattcgacattgtcaacaactttcgtagaaaacttttaatttcttctttattaaaatcttttcactcttaagttgttttgttcatgtctcttagcgacgtgttttatcttaacacatagtcccttagccattccgtcaaaaatcattgtttatataacttaaactttaaaacctccactaacctccatcttacttctactttctactattgacacactaggtatagttaactatttcttacttagtagataagtatataatcttatatttaaaaccacattatataaatatgtataaatttatgctacataaattcacttatgttttttattagattttcttctcccgacttcaataaatgagtttaattaatgtaaatagaaaaccactaaaagatacatagaaattattttctaaagcatactgtttagcagtttcctatcagccttagcattttatttatattatttcatccatttaccctttagaaaataatttagaaatgttaaatcatttgttaattcgggatgaaaagatgttactataatattatcttgcttagctgctactattttattatctattttgcatataatcttcacattttctttaatttctgttatataaggagctctgataaaaacaagttctattttctctttagatacctcatctattgtttcaaatgttttaaaactgtctatttgccttccaaatgcatttcttctaactttgacgtcaattagcttaaggtatttagatttctcattctctatttcacttgctagcaatatcattccagcacaagttccccatgtaggtattccactccttattttcagctttagtggttcaattaatccagtcatttttagaagttttcctatggtagtactttctccaccgggtattatcaaagcctcaatattatttaattcctcttctcttttaacctcaatcccaatatgccccaataagtttatctgatttatatgctcaattacccctccctgtaaagccaaaactccgactatcattttaccatcctctttcggcatattgtgtttttatttcatctacagaaattccactcattgcacttcctaaatcagtagaaacttctgctaatctttctggatcattataataagtagtagctaatacaatagctcttgctcttttttctggattatcagatttgaatattcctgatcctacaaatataccatcgcttcctaactgcatcataagagctgcatctgctggcgttgctattcctcctgctgcgaaattaacaataggtaattttccattttcccaaacatacttaattaactcatatggtgcctcaaaacttttagctacagtcattaactcttcttttgatgaaaatcgtattttctttatttcttcattcatggttctcatgtgcttaacagcttgaacaacatcaccagtccctgcttcccccttggttcttatcatggatgcgccttcacctattcttcttaatgcctcaccaatattagttgcaccacatacaaatggcacactaaaatcttctttatttatatgatatttatcatctgctggtgtaagcacttcactttcatctataaagtcaatatttaatgcttccaaaatttgtgcttctacaaaatgtcctattctaactttagccatgacaggaattgagactgcctcttgtatttcccttatcattttaggatccgacattctagctactccaccttcctttcttatgtcggaaggaactctttcaagcgccattaccgcacatgccccagctttctctgctattatagcctcatctttattagttacatccataataacgccaccttttaacatctgagcaagatttctatttattgtccctctttccataatacataaatcccccttttttctaagttactcatataataaaatatgtatggatacaaatgcaaatgtatccatacaataactgttagtttaattaaataatttaaaatataagaatatagtattatgatgaaacaataatccggaatttgttaataaataaaaattaacgactaaaatacatagactaggcttctaaaaataccttcaaaataataatattttcataaatcaatctaaaattttcttcatattaaatttataactttctactcacaaatatttatatatctcttaaacttacctttgcatacatatgatttatcaactattttaaaacccgcatcagtaatacaatcatccatctcttcaaatgtaactataactaatctagtacttattctgcgtgcacttctaattaaagatgtttgttcttctatggtagttggagtaaacagtccatatggtaaatctatgatagcagtatcatatttctcttcaatctcattcatatctccgttagtcactacattctcatatccgtaaaactccaagttcttctttgcattttctgcgatgcttttattaagctcacatcctacaacatcaattcccattgaaagcgcttcaagaataactgttcctactccacaacatgggtctattaatttgcattctagattgtttttaactgctatattaactagtgctctagctaccctaacacttaaagaatttgaatacgaatacggcttattatcatgaatatgccacttataatcgtttttctcgtacattccaaatatccattttccacaaattcgtgtaactccaaggataactttaggattatgaatttcaggctctcctgttattacaaatcctatctggctaagacttctaagacgttcttcataatctatatcactatattctgttcttaagtaacagaccttaaaatcgtcataagctatcttatcttttatgatgttgtctattatttgttctaaagaatcttcttcatatactactgaaatcatttcttttataaacggactccttgatgcactaatataaagatccgaaaataaatacttctcacttggtgttttaccaaaaagacatttcatttctaacttacataaatcttcttcaaatacaggatacttaatatagtaaaaatactttttataattattgcaatttaattttattgtttctttgttcaaccacttcaccatcttcactttaaatataatctaagtattaatattattcttttcaacaataactgtctatatatattaataaatcaaccttcttacttatgaatattatttataaataacaatcttaatctactattattcgaaaactagaatcatccttaaatcgaaaacatttttgaacacactcacacttttcaaacctataactttactcaacataacattatctttgattaatttataaattatgataacgtttttataattgttttattattttttatataaaatattaaatatcaatcttgtaataattgttcctatatgttattatatcaacaatatatacgataactttatagcattttatcaaagtattataaaattaattgttattttaatattatttttcaaagttaaaagggggataaatatatgaaaaaaagtttactatcaggaatcttagcctctgctatggctattactcttcttgctggttgtagcggaaattcagctggaggtggaaataacggagataccattaaaatcggtgctattggtccattatctggtgccgcatctacttatggagtttcagtaaaagaaggtgctcaattattagaaaaagaagttaacgatgcaggcggaatcaatggaaaaaaaatcaaatttgtttttgaagatgaccaagctgatcctaattcatcaatgcaagctttcaataaacttgttgatgatgaaaaggtaagcgcaattttaggacctgttacatcaggtgcaacacttgcagtagctccaaattctacatcaaaacaaattccaatgattactccaacagctacagaaccaacaataactaaagttggtggagattatatgtttagaggctgttttgtagattcattccaaggagaggttcttgcaaaatatgctagtgaaaaattaggaaagaaaacagctgcagttttatataacgctggatcagattattcgaaaggaatagccgatagctttaaatcaaaatttgaaggtgctggtggacaagttggtgaattcttaacttataatgataaagatactgattttaaggctcaattaacaaagattaagagcttaaatccagatataatcgtattacctgattactataatgttgttggtcttattgctaaacaagctagagatatgggaataacttctcaattccttggcggagacggatgggagtcagaagaattaactaaaatcggtggaaaagctgtagatggtgcattatatatcaatcactactactctggagactcagatgaaaatgtaaagaaattcgttgaatcatataaaaaggaatataacaaagaaccagattctttcgctgctctttcatatgacacatctaaaatattagttaaagcaatagaaaaggctggaaagacagacggtgctgctattaaaggcgctttggcttcaatggaaatgaacagtgttactggaaacatcaagtttggtagtgatagaagcgctataaagagtgctgctattattaaagttgatggagataaaaaagttttagctgataaagttaatccttaatcattaaaaaagggaggaatatacaatggaatttttacaacaaatcattaacggtttagcgttaggtagcgtatatgccctcctagcattaggatatacaatggtatatggaataatacagttaataaattttgctcatggtgagatttatatgataggagccttttcaggcttctattgtgcttcaacattaaaattgccattaattccaacattattagttgctatggcagtttcagcattatctggaataattatagagaaaattgcttataagcctttaagaaattctccaagaattgctttgcttattacagctattggtgtttctttattcctacagaatgctatgagattattagttggatctaatccaaaaccatttccggatttaattaatgctgggagtattaatataggaactattcaaattgatataaagacaatattaatgtttggagtttctgcttttctagttgttttactacaatttattgtttataaaactaaagttggaaaagccatgagagcctcttctcaagatatggaagcagcttctcttatggggataaatgttaataatactatttcccttacttttgcaataggttcagccttagctggtatagctggagttttagttgcaatatcttaccctagtatcactccttatatgggagctatgcctggacttaaagcttttgttgctgcagtacttggtggaattggaagtatacctggagcccttgttggtggaattgctataggattacttgaaacttttgcaaaagcttatatttcaactaacttctcagatgcaatagtatttgcaattttaattataatacttttaattaagccttctggtctattaggtaaaaagaccaatgtgaaagtgtaggtgttaattatgaagaatttatttaataaaaaaaatatttttataattgttggagttttaataacatatggagtgctatttggattaataagtgcaaatgttattaattcatattacaaaggaatcattactttcgctttaataaatgttattttagccgtatccctaaatttaattgttggatttactggtcaattatgtttaggacatgctggatttatgtccataggtgcatatgtatcagctataataacacaaaaagcgcatatgccatttgttgcttcaatacttattggtgctgtggttgcatgtatattagcggcactagttggatatcctacactgaagctgacaggtgactattttgcaataacaaccttagccttttgccaaattatccaaatagtaattatgaatattgatacagttggtggcgcacgtgggcttaccggtatcccaacaaaaacaacttttacagttgctttcatattcatgatagctagtatagtcataataaaaaatataattaactcgtcccagggtagagcaatgctttctattcgtgaaaacgaaatagccgctgaatctatgggaattaatgcattaaaatacaaaatgatggcatttgttatagctgccttttttgcagggcttgctggtggactttatgctcactattcgggatatataaaaccagatcttttcgattttaacaaatcaattgactatctaacttttgttgtatttggtggtatgggatctttgtctgggtcaattatttcagctataatgctgactttcttaccagagcttttgagaagtatgggcgatttcagaatggttatatatccattagctttaatactacttatgatattcagacctgaaggattattcggagataaagaaatttctcttaaaatctttggtaaattaataccaagcaaaaaatcagatgatagagaggaggcttaattcaatgctagaagttcaaaatttatcaattgtattcggtggattaaaggcagtgtcagattttaatctaacaataaatgaaaaggaaattgtcgggcttattggacctaatggtgctggtaagactactgtatttaacatgttaactggtgtttatactccaactgaaggtactatatcttatcttggagaaaagattcaaggtcttaaaccctataatattacacaaaagaaaatagccagaacttttcaaaatatacgtttattttctcatctttctgttcttgataatgttaaagtaagttttaactatagaataaattattctatatttgattccatctttagaactcctaaatttaggaaaacagaagctgaaattatagataaaagtattgaactattaaaagtcttttctctcgatggaaaaaaggatgagttagctagcaatctcccttatggcgaacaaagaaaacttgagatagtaagagccttagctgcaaagccatctcttctattattagatgaacctgctgctggtatgaatcctcaggaaactgtagaacttaccaagcttatagattggattaaagataagtttaatatatcaattcttttaattgagcacgatatgaagcttgttatgggaatctgtgataaaatagcagttcttgattacggaaaaaaaattgctgaaggcactccagaagaaataaaaaataatcctaaggtaattgaagcttatctaggagagggggcttaaaaatgctaaaggtagaaaatattaatctatattatggtgtaattcatgcactaagggacatttcccttgaagtaaaacagggtgaaatagtaacattaataggggctaacggtgctggcaaaacttctactcttagagctatatcaggccttgaaccaataaaatctggtacggtcacttttaagggctctgaattaaacaaggttgcagctaataaaatagtttctctaggtctttcccatgtaccagaaggaagaagagtttttcctcagctatcggtcttagaaaatctagaactaggtgcttatttaagaaacgataaagcagaaattaaaaaagacatggaaatggtatttgctaaatttccaagacttaaagaaagaataaagcaacaagctggtactctttctggtggtgaacagcaaatgcttgcaatcggaagggctcttatgaacagacctgaaatgcttatattagatgagccttcaatggggcttgcgcctcttgtggttaaagatatttttgatacaattgttgaaattaataaatcaggaacaactatacttttagttgagcaaaatgcaaatatggcccttgccattgcacatagagcttatgttcttgaaactggtaatatagtaaaatccggtgatgcacaagttcttcttaatgatgaaagtattaagagtgcatatcttggtgaataaatagtcaaattaagttactattaaagaaagactgataaccaaatcagtctttttttaatagtaacttaatctaatctctttttcttataagcataaacaaaaattccagcaccaattataatccacaatagaattactaatatattataagcaaaatttatatttaaaggttcattagtaaaaattctgcctagtaatatttgcatattatagttaggtaaaaaattagccgctattccggctatattattcatttttgctaaagtacccgctaaaaatataaccataaaaaacggcattcctatggttcctgcactagcctgattttctgctaaaattcctattaccgctccaagttctataaaccatataactactaatgttgttataataataaaatgtcctatgtaaggaagcttcattcccataatgaagtatgttagcatattaactataaatgaaagtattaatgttatgatagcttttccagttaaaaattccagtggagaaactgctgcaagcattaaagttcttagggtatttttctccttctcctctgcaattaacgttgcaattacaaatcctgaaaccagcattaaattagcatttaaggttacattcatagtatattctcttaactgttcagtatagccaaaagttcttacaaaaattaaacaaagtattattgggattaagaacataaacaaaacatttttatttttcgataaatcctttgcttcctttttaactaatgcactcacccttcttattgaaaaagtcattataattccctccctgttaaatgcaaaaatatttcttctaaacttggttccgacgaatgtattgatagtactcgtccattcttcatccaagattgaatattctctgcaccctctttattattctttacagtaattaatttatcttcatcttttaatttaatctttatttcatcacttgcgtactttaactttaattcttctggctttcctatctccactatttctccattgtttaaaaatgcgactctattacaaagcctatcagcttcctccatattatgtgtagttaaaaatatagtagtgccttcgtgatttattttcctaagaaacttatggatttctagaactgttcctggatctaatgacgaagtaggttcatctaaaaacagtaatttaggcctatgaagcactgcttgcataagcattactctctgtttcattccttttgataacttttttataactatgtttttgtatttcaacatattcatacattctaatacataatctatatctttttcattcactttattaatctctgcaaaaagcataaggttatctttaacagtaagtctttcatataatccattattatcagaaagtattcctatatctctaaattcattaaatttttcaacatataagttcttatcaagaactaacacttctccacttgtaggtattaattgtgatgttaaaatctttattgccgtagtctttcctgctccactcggacctaaaaatccaaaaatttctcctttcttaacactaaaacttagattttgtagtgctacattcttattaaattcttttcttactcttttcatagaaattacattttccaaaagtgcttttcctcccctttatatattgattaatcatctgaacaatataattatcatatactcggagcaaattaaccataaaactaccatcaaaggagtaagaacagtattaagtgaatcaatttatactatgagcggatcaatacaacgtcttttatatcattaaattctattgaatggagactatattatatctaattaaccatctatatcttcaatatttcctttaattctgtaagctttcctttagaaagtggaatagaactcttctccacatcacctaaaattaaactataactatttcttgtccatgtcactacttctttaactttttgaagatttacaatataagatctgtggcacctaaaaaatccaaaacaccttagcctttcctctaactcagttaatgacatcatacactgaaacttctctcctcttacatttaaactacttactcctgattcactttctgcataatctatctcaaacggatcaaataataatattctttcttcaatcttcgctggaatcttttcgattttgtgcataaactctaatttttctttgctttctgatgtaacaacttcttctttcttatcttcagcttctattagtccattctcatcaagaacataaacttttcccccaattaacattgcttccttaaaagatgcagatatacttaatactgctgtacctttgttacataactcttcaatatttttgaggattattcctgttgcatttttatccatatcaaatattggatcctgaaatatcaaaagtttaggttcttttagtatttcccgggcaaaactaagcattttccttctagtataacttaaagtttttatccttttatctgcaatctcgagcaatgagaattttaacattatttctctgtaattaacctttgagtcaattatctctgtgtaatatctcatatattcttctactgtaaatctgtcataaaaaccttcatctctaaatataacaccaatatttcctttgtttttatgaatataatctctatgttttatttgatctatatatatttcaccactacctattacttctttatctaatataagatctattaaggtattactaaactctctatctgcttcaatacttaccaaacttcccttttcaaccatcagatttatatcgtttatgaaactattagtttgttttttatataaattttttattttcaacattataaattattctccttgacttatacattcagttaattaatatacattataggtaaattattacactagtttgtaatgatagcaatagtaggcttcaacattccataaataccataatgtaaaattcaattaaatttcatattatattaaattttataaactacgaatagataattttattaatgataaactaaatttgtataaatgaaataaaaggaggttataatttatgagctacgaagaaaaagaatctctaaagaatgaggcaaaaaaaatgatgattgatggagaacactggagttcgattagagaaaaaactcatctaagactaaaagatttacgaagaattcaaagggatgaaataaatcctaagttctaaacttaaaattcattaaatttaatgatgatagataatacgataaattaaaatactatgattttattactaactactaagcaaggtaatatatattttagaggtttctccaaactttctataagtatatatttactttgcttattttattatgcttaagcataatatatattatagaaaaagttgaaaatttttgaattttctgaatattttgttgtataatatatatgtataacaaatttatataaaaaataaaggggatgttttaaatggtaccatattttatgcttatttatagtgttataattatttcacttatagcaatcatttatttggtcaggtatacattttctcaagacaaaggcactagccaaatgcaagaaatatcaacttacattaaggaaggtgctatggcattcattaaaagacaatataaaaccatctttgttttatccattgttgctttatttttaatcatactttctaactatttcggcaatgcatcaaaaggtccaagctctgccatatctatatctttacatacaggtatagcttttataacaggagcattctgctcagctttatctggctatattggtatgtatatggctgttaactctaatgtaagagctgctgctggcgcaaaaaagggattaaacaatgctcttcaaatagctcttaaaggtggtgctgttaccggactagccgttacttccctatctcttttaggtgtagcgtccctatttcttatctatggaggtatttctggtaacgatactttaattaaagaagccccctctcttatagttggatttgggtttggcgcttccttcgtcgcgttatttgctcaacttggtggaggtatatatacaaaggctgccgatgttggtgctgatcttgttggaaaggttgaagctggtattcctgaagatgaccctagaaatcctgctgttattgctgatcttgttggtgataatgtaggtgattgtgctggtagaggtgcggacttattcgaatctacagccgctgagaatataggtgctatgattctaggcgttgggctttaccctatatttggatggaaaggaatactatttccgcttgttgctcgtgcccttggtatcatcgcttcaataataggtatctttgctgttaaagttaaaaatgataatgatgatcctatgaaagctttaaaaggtggatttgttatcacttcaataattaatttagtaatattatttttcgtagttaaagatatgttaagtggttcacttacaactggtggacaagtaaactatatatatctatatggatgtgcagttgctggaatacttcttagctatgtatttgtagttttaactgattattatacttcaataacccataaacctgttaaagagatagctaatgcttctaaaactggagctggaactaatataataactggattatcagttggcatggaatcaactgcacttcctgttgtttgcatatctatttgtatatttatatcttatagattaagcgaaatggcattacctaatgttgcaaatgcaggtttgtatggtacagcaattgcaaccatgggaatgctttcaacctgcacatatattcttgccatggatacctttggtccaattactgataatgccggtggaattacagaaatgtctggagctcccgaagaaattagaaatgtaactgatagattagacgcatgcggcaatactacaaaagcattaaccaagggttatgccgttggttcagctgcacttgctacttttctattattttctgcatatctagatgaagtaaaaaaacttcttggaaaacctttagattcatggttttcggttgatataggtaagcctgaagtatttataggtggttttataggtgctatgatagtatttctatttagctctacagctatccgtgctgttggcaaggctgctcaatatgtaatacttgaagttagacaacaattcaaagaaataccaggaataatggaaggaaaatcaaaaccagattatgctcgttgtgttgatatagttacaaaaggtgctctaaaagaaatggttcttcctggaatcatagtgatttctgctcctataatcgttggaatccttctagggaaagaagctgcagctggatttttaatgataaccacaatttctggtgttataatggctctcttcttaaataatggcggtggtgcatgggacaatgcaaagaagcttatagaattaggagagcacggtggtaaaaattccgaagcacatagagctagtgttgttggagatacagttggcgatccatttaaagataccgccggcccatcactccatgtacttataaaactcgtaagtactttaactttagtatttgtcgcattattcgcataaattaatattatttatttataaagaggatctgtagtatataatttaacactgcatatcctttttttataagttcctctaatttttttactaatcgataatgcttttattttgtcacttatactaaattatatttaataccttatatacttttattgagatataattaattatataattgttctatatacaacttatgtatacagttactaatcacttatttaaaaagggggctaaaatttaatggatgaaaaatatgtagttattatccagtgcgacattgctcataaccgttgtagtggatttgcctgtactaatgccttttacaacagagatgaagtttttaaaaattacaacgaatcaaccagatatatttccttcacctgtggaggatgctgtggaaaaagtattgctactaaattagaacatctctcgaaaaaacttaagttaaaaaataacataaataaagaagatgttgtgatacatctatcatcttgcatgacaaatgataattatcattatgatagatgtcctcatctagattatattaaatctattgtatccaaaaaaggatataataaagttatagaaggttcttatataagtaagaatgctgagaaaaaaagagccaatggcagttataactgctatgactcaatataaacgtaaaggcaggatatatattctgccttcctaatattacgttactcagtttcagtatttttcatgcttctcaaatattttctcaatactgctttatctactatttccgaatagatttctggtgcctgtttctgaattgcatttattttatctgttaaattactatatattctagtaatatcattatatttatcgcataacagtttatttttcatttgtatgatcttatcagtctgctctgttcttgtaataggttgaggagtatgcggtttatcaaatgttaaacctacagtatttccatttacaataaactctttattttcttcatatcctatcttttttattgcttgtacaaaggaactgcacatttcttcatcctttaaagtaatattcaaatacattactagttcagaaggctctgaatattcaccaagtttaaagcctgctaaccaccaatgcttatcatctaacgcgaaaagtgtttttccattcttttttagcaaaagagagattgttaatctatcttcatcgctagcgcaattataaaacatatacttatatacttccggtaagtttaatataggcttttcagctgtataaataccgacttcacatccagtattcaaatcgtattgacctttccataattcaattaaccatattctattattatattcaaagtagattggttcacaatctactatcattccaaaaggtgctgatgcttcatcatacaatctactatatcccatatttctttgccatgcattcatattactataaaatatatcttgtactgaatcataatcataaccagcaatctctattcctttatctattggcttttcagatttaataattcccaataaacttttattcatatttttcagtatacggattccagtaagcattgttataaaagatccaaacataagcctcacctcaaataaattgctttacttatatagtattccctctataatcattatgttaaaagacactcatgaattttatttaatgtatattattatttattctatttatttgcgatatcgccataacctaaacattgacaattacaaaaaattgtactatgataaattataccaaatgggtatactttaaggagtaaattttatgaatattaatcaagaatctgattacgcatttagaataatacttatgctatccaaagaaggtttagataacaaacttgatgcaaaatctctatctgaaaaaggaaatattcctcttagatttttattaaaactaactagaaagttaactcaagcaggaatattaaagtcttatagaggtgttaatggtggttatgctataactcgggagcctaaagatataaccttaaaagatgtggttgaagctatacaaggcccaattattgtgaccagatgtgtttacgatggcaaggcttgtagtgcaaataaagctggtcactgttctatacacaaggctttatacaatattcaaaatacaatgataaatgaactagaaaaggttaactttgataaactaaagaatgatccatggtaactttatacatgtaaatataagaggcgaaagccttttatatttgcttaaaactatacctctttagtatacttttggttaaatattaaatataaaattaaaggagatgatcaatatgtcaatgtgcacatcagcagattgtaaattatgtgaatttttatcatcaaaagaagatctagaaacatcattcaacagagttgaaacacaaaaagcaaaatgtaaatttggaaaggaaggagtctgttgcaaactctgctcaaatggtccatgtaagataacacctaaatcacctaaaggtgtatgtggtgcggatgctgatactatcgtatcaagaaactttttaagagcgatagcagcaggttccgcatgttaccttcacgtagtcgaaactacagcaagaaaccttaaagatattggtgaaggaaaaggtaatttaaaaataaaaagcccagaaacattggataagcttgctgaaatctttgatattgttgaatcagatataaatgccaaagcaattaaagtagctgatgaagttcttagggatttatataaaccaagatttgaaaaaatggaattggtagagaaattagcttatgctccaagatatcataagtggaaggaattaaatattttacctggcggtgcaaaatctgaagtttttgatgctctagtaaaaacttcaacaaatctaaatagtgatcctgtagatatgctgcttaattcacttcaacttgggattgctactggaatatatggtctagtgttaactaaccttttaaatgatgttatgctaggtgctccaaaaatcagacaagctaaggttggctttagagtgatagatgaggattatatcaacataatgattacaggtcatcaacattctgatattgcacatcttcaagataaattaattgatgagaatatcacaaagagagcactggaattaggtgcaaaaggctttagattagttggttgtacatgcgtaggccaagatctacagttaagaggagagcattatactgaagtcttttcaggtcatgctggaaataattatacaagtgaagccgtactcgcaaccggtgctatagatttaattgtctcagaatttaactgtacaataccaggacttgaacctgtagctgagaaatttaatgtaaaaactatatgtatagatgatgttgctaagaagaaaaatgctgaatatataaattttgatatgagaaacgctgaagaaattagtgaaaagatcatttgcgaagcattagaaagctataagaacagaagaaataacgtcacaatagacattcctaaagatcatggacatgatgatgttataactggtgttagtgaaggatctttaaaagagttcctaggtggaaattggaacggtcttattgacttaatagcaaaaggaaaaatcaaagggatagctggtgttgtaggctgttctaatttaacagctaaaggccatgatgtatttactgttgagctaactaaagaattaataaaaagagatattttagttctttcagctggatgttcttctggaggccttgaaaatgttggtcttatgtctcctggggcagctgatcttgcaggtgataatctaagagatgtgtgcaaatccctaggcattccaccagtattaaactttggtccatgtctagctattggaagattagaaatggtagcaactgaactcgctcaaaacttgggtatagatatacctcaacttccacttgtattatcagcaccacaatggcttgaagagcaagcattagccgatgctgcatttggactatcattaggtctgccactgcatgttgcaatatctccttttattgatggaagcgaagttgtcactaaagttttaaaagaagatttagttaatataacaggcggtaagcttattgttcaagaagatgtaattaaagctgctgatgagttagaggagattatcaaaaacagaagaataggattaaacatataataccccattaaatatataaaataaaaaactacatttttaatatatataatgaatctggatgataacacattcagattcaatttttcattgaaatacatattatgaattaatttctttatcctatataattgattttttaataatatgtcgcaacattatgaaccttcaagctaatcttaaatactattatctttattataattttaatcaactcgttattataatttacgagttgattaaaattcatatcttttctgtattatttcattgattcaataatgctatcagcaatagattccattaaatcctcatcgctttctttcatgctagaattaattgaaatttcattatccaaaatagtcatatctttcatttcttctaataattcacgcattaatttacctgattgaggcgcccatgatccattttcaataatagcaaaagtacgtttttgaaggtttaatgccttcatatccattatatagtcaagcattggtggataaatctttaaattataagtaactgatgctaacacaacgtgactatatttaaatgtttcagaaatcagatatgaaacatgagtcttggaaacatcatacataactacattggtaatcccttttttaaccaatcttgttgctaactcatttgctgctgcctctgtattaccatacattgttccataaacaatcataacgcccctttcctcaggtgtgtagctactccatttatcgtacttatcaagtaaatatccaaaatcattacgccatactggtccatgtaacggacagataatcttaatatctatagtgcctgccttttttaaaagagcctgaacatgagggccatatttacctacaatatttgtgtaataccttctagcatcatcaatccaatcacgatcaaaatttacttcatcgttaaatagctttccatctaatgctccaaatgaaccaaaagcatcagctgagaataatactccatttgtagtatcatatgttaccatagcttctggccaatgtaccataggggcagaaacaaatacaacattatgctttccaaatgacatagtatctccttccttgacttgttctaccttgtcttctatctggaaaccaaactgatgcataaataaaaatgccttctcagtacatattatctttacattaggatagcggataacaatttcttcaatacacgctgcatgatcaggttccatatggttaatgaccatgtaatctaagtctctatctcctaaaactcccttaatattctcaagaaattgtctgcaaattgaccaatctacagtatcaaatagcactgtcttttcatctaaaagtaaataagaattatacgaaacacctcttggaataggatgaacattttcaaaaagagctaggcgacgatcatttcctcctatccaataaagatcttcagttacctctctaacacaatacatagctaatcctcctttaaacaaaaaatttatttattacctgctttaaacttctataaacatatctttttcttcaccacaagctgggcaagtccactcttcaggtaaattttcaaaaagtgttcctgggtttacttcaccttctagatcacctactccaggatcatattcataaccacatccattacatacataatgtttccaagttggagtgactttctttggaatagctctcttcatctttttcattggtggagcctctttctttgcttcaccattgtctaaagcttcaataagtagaggtaatatttccatcaaatcaccaactataccgtaatctgcgtttttgaaaatctttgcattagggtttatattaattgcaacaattgtagaagcatcctttataccttttaaatgttgacctgcacctgaaataccacatgcaatataaaggtttcctttaaatttttgccctgacataccaacgtaacgatcaattggaacatattttaaagtttcagctactggtctagaagaacctattgctgcaccagcctgaactgcaagcttttgtataagatgcatattttccttttctcctataccttggcctacactaactactctctccgccttgcttattggagtatctataggaattcccactgtgaaatcatatccatccttcttaagagcttctacaagagaatttactctctcttcaggtgtcccatctttataaattactttcttacgatatcctgttgcaggttcccttgaagtttttgctacactctctgtttttggcatttttcctatgatattagcggctataacaacacgctggatttcattagttccttcatatatagtgcagattttagcatctctataggcacgctcaacttccatacctttaaggtatccgcttcccccaaagatttgaagagcatcgttgacaatctcaagacaaacatcagaagcatattgtttagccattgctgcttccatgctgtaatgctcatgattttctttaagctctgctgcactgtaaataaggaatcttgctgctctaagttttgtagccatatcagctaatttaaatgcaattatttgttgctgacaaataggtttaccaaattgaactctttcttttgaatactctagtgcattttcataagcaccttgcgctattcctagagcttgggcagcaataccgatacgtccaccatctaatgtagacatagcaattttgaaaccatcgccttctttacctaataaattttccttaggaacttttacatcattaaaaataagctctgcagtagctgatgaacgaattcccatcttatcataatgcttaccaaaactaaaaccttctgatcccttttcaacgataaatgcactaatacctcgtgtaccaatatttggtgtagttactgcaaaaacaatataaatatctgcttcgccaccattagtgataaatattttctcaccatttaagatataataatctccttctagtacagcagttgtttctgttcctcctgcatcactacctgcattttcctcagtcaaaccaaatgctccaagcttttcaccctttgctaatggtactaaatatttttgtttttgctcctcatttccaaaagctgcaattggatatgttcctaatgatgtatgtgcagataagataactcctgtcccgccatcaactcttgataattcctcgacagctatcgcatagctaatcacgtctaagccagctcctccatactcctttgaatacggaatacccatcactcccatatcagctagcttttgaactacttccgaagggaatttattttcttgatccaacataaatgcaataggtttaacttcctcttcagcaaattctcttatttttgttctcaaattttcatgttgttctgtagttttgaaaaacataaatacacctccctttaattatacggtttcaccaatgtcattctatgaaatctgtaaaaccatattcccaaacatattccttaaatgtatacctaaaccgtatacatttattgtatacccctaaggtatacttttcaactgttattttatctattttattccataatagacaattaaagcttaaaactcctcctcttttaaagataatataacttttccttccattatcttataaaagcaattatttttacttgtaaggcttttctttatttctattcccccttatttaatttaagatatatttaaagtttctatatttatatcaacacttataattatgctatttacagtactattattaacattaatataaactataataaaaaaaagcagatacgaattaagtaactactattttttattgatttaatttatttttcttttatgtctacttatgatatggttcacctttaattattctaaatcctctatagatttgttccaatagcattactctaaaaagctgatgtggaaatgtcatctttgaaaagcataatttataattagctcttgccaaaacactttttgagattcctaggcttcctcctattataaatgttatattaggatttcctgttactcccaaattatctatgtaccctgcaaattcttctgatgttagttgctttccacctagatccattgctataacaaacatattgtctttaattttatttaatattccttgcccctctttctctttaattacctcctcttccttttccgaagcattgtctggtgttttttcgtctcccaattcaactatatctaatttgcaataccttcctaatctttttgaatattcttctatagcatcccttaaatatttttcctttattttaccaactgttattatagttatgttcattgttatctcctttaatattttatacatacttatattataactaaaaataaaaactgtagctaaattcttttactcagctacagtttttattcttcaatactatttatattttatactaagttttaaactaataacaattagaaatatcattatattcctttatagagcttcaactttaactctagatttcgtcttatatagtctgtatgctgttaataccgctcctaatgcacatattatagctgcagcaacatatacatattgcatcccatatacaaaaatatcatctcttccctctatatatcctgtaacatgatatcctatttgactactcatcctattatataaaagagttgttgataatgatattccaaaaaccattcctaaatttctaactaacgcatttatactcccagcaatccctaaattttttgtatctactgtagacataactaatgaattatttggtgattgaaacattccatttcctagtgtcattattgctataaatgcaattaatgcacctatgtgagaatactcatttaaagttgatattaaaaataaacctaagctagttccaataagccctaaaaatgttaaaacttcagatcctattctatctgatatatacccactcattggagcaacaactgataaaattattggtgataccatcattaatacaccagtaactgaaggagctagtttcataacatattgtaggtaaaatggcaatataatatttgaacaacttattgccacaaatgaaatgaatgcacaaaaaatactgagagaaaataatgaattgctaaatatctctagcttcaataatggttcatcaattcttttttcaacaattataaatgaaataaataatataatagagacaacaaatgatataatgattcctatattgtcatatccaatttccttaccaaaagttaaagcactgaataaaagtaccatagttgacccaaataaaattgcaccttttatatctaatttttcatttgaattattagaacttttaggaagtgtcttcattgccaaagccaatgctaaaattcctataggcacatttattaaaaaaatatactgccaacttaaaatcgatacaattattcctcccactggtggacctatcattgaacctaatgctacaaaagttccatttaaccctaatgctcttcctctttcatttcttggaaaaacctgagttataattccttgacttgtagacatggttcctgcagcgccaattgcttgcaatattctcgagaagactaacattactaatgaattagataatccacataaaagtgaaccaatcgtaaaaataattatacccaatttaaaaactgaagttttacccttaatatcggctaatcttccaaatataagaatagttcctacaataactattaaataacttgttactacccattctatagatgccatgcttactgcaagcctctgcgacattacaggaagtgctacattcactatactgctatcaagtgtggacataaatgtcagtagtacagtagtaaataatattaaccatctttttttatccgtactttccatatgttttatcctttctgtttatacatgttttatctagctgtaaaaatagagtttatatacaatatcgaaatattcataaacctaatcacaccttatatggttgcaaatgcaactatataaaattataatatatttttattatttacacaaatggtatgataattctctaaatataaaaatataatccacattttaaagttcaaaaaaaaaattatccacattttattctaattctatggataaagttctttatattatttgtacagttttaatatatatgttctaaaaagtttgtttcataaaaatttatcttaaagaactaactagtccaagttagataattttatagcaaattaattagattaacttgatacttgtataaattaaatatcctataattattagatcatgcttttactaaactgttataggaaaaactacgtgcaaataatgttttcaaatgatagattaaaaattcattaataatgaaaacttactattagcttcttttaacattaacaaaagcatgatattaattatattttatactattatttactttaatttaaatgatccaaccatctcatttaaattatctgacgaatattccagtacatcagttgcttgctttagttgccttatttctaataatattttcttaaccatagacaatgattcttcactcttatttgaactattttcggtagattgttctattttatctgccatagtgcttacattattcataacatctccaacactttggctctgggtcgaagttatttgtgatattgactgcatcgcattagctattatatttacatcatcattaatatgatcaaatgattgaatagattcttttacactcgctgtagatatatctaccttagtatttatctcttctgcatattcaaatgttgcttgtgtctgtctttggacttgattaataacattacttattgacttggtagcactttctgtttctagtgctaatttagatatttcttccgctactacagaaaatccttttccactctctcctgctcttgcagcctcaattgatgcattaagagctagaagttgtgtctgcttacttatatttcttatgacattaattacttcgcttatctcctgtgaatatccctgtagagtgcttacagattgtactgtattatcaatagtcttttctaaatcctccatattactcaatacttcttttgatatgctttgcgctgatgctgcactttcattagtcgcttcaactatccctgatacttctaatataagactatccatttcttgaatagatgctgtaatatctgaaaatttgttttttgtattttggaatactagattttgatctttagaattttccagtaaagttatcactgtattttcaatcactcccattccatttttaacttcacttgttatattagaaactatatttactgatttttttgtagttttagctgatcttttcactctatctaacatgctcatctgattatttatgaatttattgaaccatcgtgacagctctccgatttcatctgatgacattttttcaactctttttgttaaatttccttcaccttccgcaatatcttgtaatatatttatcgttctacttaaaggggatgaaatcattcttttagatattaataacgaaaataatgataatataatccacattgctatagatgtgaatatactattattcggtgataatttaattgctataaaatttactgcaattaaaattgctgatatcattgatatagatattggcatctttaaattaatactttgaaaattatatatctcagctatatcaccttcacacatcattccccatacctcatcacagttcgggggttttattaatgttcccttacctccaaccattatatgtctgtaatctggatatccaggccaacaatctaggttttcaccttttcgaattgtattttcaactcctcgatgtaatttacttgtagctggatcattaaaaattatttcaaattcggtatgctctttaattctaactgtaccccaactctttgttttaactccatctttaagattctcacctaaagtaaatgtattatcctcaaatctgcttctagatattgctgttccgggcttaatatctctgctagtcttcaccataaataagtaattatctccagaatccttatatatatgagtatcctcatcttgaattacgttgctcatatcatcatttagtgttctgcagcataatattctaatttgattactgtgatttttgcatgtactggaaaacattaatgtaacatcatcagcaaatttcttattacttatatcagtatgtagagttcttttatcaatatatggtccatacattaaagccctaccttctaatcctgcttttagattaggtaaatcactcatatctaatccaatatgctctttgcacgaagaaactgatactattcctttctcatctaaaacaaatatttcacaaaagtcctcatgcttttttacggtttcaattaaataattacatactatattatcattgtcttctaatgccacaagtgaattcttaatattttctaattgtgcccacttgtcattaaaccagttatctaatgccttttttcttccatttgatattccttcaaatactttttctgaatgttcctttagatttctattcaacagatatttaagctttaaactcatagcaatccccccatatattattcttatatttacttttaataaaaaaataaagcactaaatacagatctttaaaatctatacttgtgctttcatagcattactatttatttactacaattccttgtataacataattataccaactataatgctttttgtgaattgttatttttcacgaaaccattaataaagaaaaaaaccctatctaaactagggttttttagtgtatcgaataagaaactccaatataacatgaagatcatttatatgtaattatattatttatcttttccacaacactttttgtatttttttccacttccacatgggcacatatcatttcttccaaccttatctagatttcttacaatcttagattccttgtattgcttttgtatttcatttcttttttccactgagaatattccatcccattgtggtaatgtgtataaatattctgcttttgcatctagcatattaaaatataaagtttctaaatttatatcaagtactagttctgtatctgcatctatagtttcaagatcatattgagtttttaaactatcattaataccatccataaatcccatagcaaattctactgtagaatcataatctttagctaattcgcttattgtagtctttttaacacttttatgattagctaataagtctttatatattgatttttctaatttactatattcttcccagaaagcattttctcccttagtttttacatagtcaacaaccatgtcagtccaatttgtatataaactcatttttaagtcctcccttaaatcttcattgattatatataatatatttctataaattataagctcaaataaactatatctctatataactgctaggattatgtctgtttgccatagttaatattatgtcctcttttaatttaattccattttcatttagcacgtttaaaacagtttgatatgctaaatctggctgattattagtattactcaaatgtcctaaaataatctttttcttagttgaacatttatatagttcaactatggcactcccacaatcatcattagataaatgtcctatttcgctcaatatcctacgtttcaaaggatatggatatggtccaaacttaagcatatttacatcgtgattactttcaagaagaataacttctgaatcttttatattatcataaatttctcttgtaaaggttccaaaatcagttgctatacttatgcttttttctcctgagctaactgtatatcccattggtgcagccgcatcatgcggaatattaaatgctttaatactcatatcttctatttcagtaaatgatcttttatcaattacttttatgttatgctcttttatatttccaattaagctttccatagcagaccaagtatcagcatttgcatatataggaatgtcatactttctagacagtactccgacccctttgatatgatcactatgctcatgagttataaaaattccgttcaagtcttttggattttcattaatttcttgcaacgctgaatcaatttttttgcctgggagtcctgcatcaattaatatcttagctctatttgaggcaataaacatactattaccgctactgccactatataaagaacaaaatatcattccaatctcctccccctttaatttatactattcatcaacttctattctcttaatatctgcccctaaagctctaaacttattttctatatgaggatatcctctatcaatatgctctatactagttatttcagttgttccctctgcaactaatcccgcaataaccatggcagcacctgctcttaaatccgttgcctttactactgcgccagtcaatttttgcgccccatctataatcgcaactctgccttcaactttaatatttgctcccatctttttcaattcatctatgtgtttatgcctattctcccaaatagattcagtaattaagcttcttcccggtacaatacttagcaatgttgacattggttgctgaatatccgttggaaatcctggatatggtgtggtttttatattcacacccttaagtggtgaattcacggtaactctaatacaatcatcaccttcttcaatcactgcccccatctctgtaagcttagctgtaattgattctaaatgctttggtataacatttcttatataaacatctccacctgtagcaacagctgctatcatgaatgtaccagcttcaatttgatctggtattacgctataagagcagccttttaggctttctactcctttaattcttattacatctgttcctgcacctcttatgtcagctcccattgaatttaagaaattcgcaacatcaacaacatgaggttcctttgctacattctctagcactgttaccccctctgctaatgttgccgcaatcataacatttattgttgctcctactgaaactacatcaaaaaatatattagcgcctactagcttatcagctttaacattaactgctccatgctctataaacacatcagctcctaaagcttcaaatccttttatatgttggtcaattggtcttacccctattgaacatcctcctggaagaactactcttgctttcttaaatcgtgctaataaagctccaataaaataatatgaagctctcattcttctaacatcatccgtgcacgcatcaaaattatttacattagtgctatctatttctaaagtattgttatctatcttaataatatcgcaacctaagcttctaagtattctttccaagcagtgtacatcttcaatatctggtatgttatcaattatgcattttccatcacttgccattatagctgctggtaatattgctactgctgcattcttggccccattgatatcaacagtaccttctagcaagtttccgccgtttataactaatctctccattgaattcaccctatctattaaaatctatattatcatatatattattttacattattaacctattttataattaaaatctactttaattattatatcataaactaaatttatttaaatacattttttcagtccatcaacacttttttaactatatatgtgttacaatacaatttttcttttggttttgttgtaattatatcccttaaaacatatattactggaataaatatttcttttattgaaaaaatatccttaaaaacctaattgttcttatcattactatttaattattcttctattcttttattctatttattgtgttataatttactaagatttttattaatacaatatattgagattgtgaggtttatcatgaagtactatatagttgcattatttgatgaggaaacctatcaagtaatatcaccaatacaacggaatatgtcaaaaaaatttagagcaaatagaaactcacctatgccttttgtcttattaacatctattgaaaatccaaatttggataaattatatccagttgttgataaaattatagcaccttataagagttttagaattgatgcaagtgatttagtctatttgtttgagcctaccaaaagtataaatttaaaaatagacgataaaggttatataaggagactttctcgtagtctttttgatatattagaacttaacggatttactgttaagtcttttggagatagttttgtttcacttgcaaatttaggttatcttcctaaggattataaaaaacaagatgtaaagctaaatttccctgagatatataataatgataactttgttaaattaagaattaagagtgttgaaatatggaagcttcctacgataaaaaagaatactcccttaaaatcttatattttgaaagacttttagcttaagcgttcttactatcataataaatcgcctgttaaacaatccaattagtttatgtttttaagactgtattgaatttttatattcagtgcagtctttttttatattttttaaaatcactctaaatctatagttatattttccttgaaagtaaaattaatttaaaaataatctcttaatttcgaattttctaaaaatatttttttgtagtcgttttccgaactttcatttattttaaagattttgtaaaataatattattattagaaatgtaggaggattcactatgaatattcagccactatttaaagtacaaaaaaaatacaatgatagtttatctataaatgaagagctagactcccacaaattgcgagtacgcaaaaacctagaatttgaaatatctcttggtgcattggctagtgaaactaattgttttagctacttactaaaaaaatctagacctgttaacatcagtgctatattcgataagtatataacttgtgtttctcaagtcttaacacttggtattgatcataaatatacagatttaattgcagtatctatgactcctaatgactattgtttaagtgaccagtttctaaacctgtatattgacataaatgatttaattgctttcccatctatagatcactacttaactttatttgaagacctattaagtctaggattgacattaggtttttcagaatctcaaatacaaaatcaatttattaaggatttagacaacttggttatactttaattaatgtattcatgctaattacataacaccatttttattttttataatatttaatattcttaggggaataataattctgaggtgatgttatgtttggaataatatgtgcaataatttctggaattgctatgagtattcaaggtgtatttaataccagactaggtgagaaaatcggagtatgggaaactacattattagttcagataattgcccttgtcttaagccttatcatttttttatttttaggtgatggtaattattctaatttgaaggattccaacaagctttatttattaggtggcgcactaggggttgttataacctttaccgtaataaaaagtgtcagctcaatgggacctactttcggtattggtattatattgatatcccaattacttgctgccgcacttatagatgcctttgggttatttggcagtgaacggcttagattttcattaaatcattttttaggtattgctattatgattgctggtattgtaatatttaagtggaatcattaggagaggacggataagacttgaatcttttttctaacattaattttttattccatttaacaattaacaatataaaagaatatgtaaaaaaaagcgctgagataaaatctgataaaattatagaaaattcaattaattggtttggtcatgctaccacaattattaatctatcaaataaaattattataactgaccctgtattttccaattccttaggatattttaagagacttgcaaaaaaaccagtatacataaatgatttaaaagtagactatatcctactatctcatggacatatggatcatttaaatttttcatctctaaaaaaattaaataaagatgctgtctttattgttccaaaaggatatacccgtattgctagactgcttggttttaaaaatgtatttttattacatcctggagatgtatatgaagatgactttataaaaattactgcttacgaagctaatcatgatgggagacgcttctattttggacatgatgatgaaagtatttcatatttaattgaaagagaaaataaaagcgtgttcttcgcaggagatacagcgctcactgataattttaagaatatatcctgtgatgttgcattaatgcctgtagggtgttataaacctgatagattttcgtatatgcattgtacgccagaacagagttatgaaatgtttaaaatgatgtcttgccctacaatgataccaattcattataagacttttaaaatttcattagagaattttcaggagactgaagaatcattattaaatttaaatgataaagccataaaaattatagacataggggagacctacagtttttaaatagtagattgattattatttttattcaagtttcatacttgtatttatttttaataatcaatctactatttaattttttgtacaatctcttcatctattgaatcaatattgtataacaaaatttttttaatccttcattttttattaacaataaaattctttttcatataatatattgaagtaataatattttggagaaatatatgttttcatctaaaagtaagctagaccataatctaaaagattatatatcaaaaaatgcttataaaagttatagaatacttatacaatataaagactttcaatcctcaatagtaaaaaaaattagttcatataaaggtactgtacatcacattattgagtcctctaatattataagtgccgaactaaattcaagaggtatagatagaatttctgaatatcctgaaattaaaaaaatttgcttggatgaatacctgttcttatgtggaatgagtgtgactactgcaaataagattcacttttcggaaaagtatagtttatctggtgccggagtaggaatagggcttgtagatagcggagtatttcctcatcaagatctaacttcccctagcactaaaatagaattatttgaagatttaattaataattttcgctatccttatgatgacaatggacatggtacctccatagcaggaattttgtgcagcagtggtatctcatcaaataatatgtataaaggaatttgtaataaaagtaagctattctgttacaaggcatttgataaactcggtaaaggatttgcttcggatatattatattctatagaaagtttatctaatatatctaaagaaaataacataaaggtattatgtttgccttttgaacttttaacccataatacattcattatctcttgctttgatctgacatttaagtatgctatatcgaaaggattaattccgatagttcctagcggaagtaacctgagtgaaaaaacctctattatgggaattgctacgctcccaagctgtatcactataggtggtctaaatacaactacctctataatgaagccttatacttattcttccgcaggaccatatgggaaattattaaaacctgatttatctgctgcatgcgttaatattatatctttgaattctgataataactatatttcagaaaaaaacggaattaaggtttacccaaataaacttgaagtaccatataaaacttttacaggctcatctattgctacagcctatattagcggattatgtgcgttattatgtgagaaaaatccatcaataactttcaaagatatgatttccttattaaaggttgcatgtgatcctattgatgagatatccaatcaaattcaaggtgaaggtattataaatataaataaactcatcatatgattatttattttaatgaatattatcaatatttagaagcatgcatttgttttattaaattagttaatttcttataaagacaaatgcgtgctctttatattctctcaaatcttatataaaagtaattaatccccaagtattagttgattaatatttcgctttattaaggctataatatgctataattatttacatacattaggttatcatataacttacattataaacgattatgttaatctaatattattaaataaagttttgtttttataatatatattaaaaactctgaaaggtaggtagtaaacggaatgagcacatttatgttaaagaatagatctctagggttcactcctgttaacaatgtatttatagaaaaatacatgccacaggctagaggcgaatttgtaaaagtttatttattgatgctaaagtatactatttctggtgaattaggcgttagctcatcaatactagcttcctcgcttaatttgttagaatcagacattatgaatgcatttaattattggaatgatcaaggagttataaagctaactcagatagataagatgggcaattttaatgtagaattcatagatttagttgaagaaccatccaaatctactaaacaagttgacttattagaggctttggatagtacaaatactaaagatatgctaaaggatattgaaactcttctagctagacctctatctccaaacgaaatgtcactttacttaaattggcaaaaggaattcggtttttcatctgaattaattctgattttaatggaatactgtatatcaaagggaaaaagtgattctagatatatagaaaaagttgctatagcttggcatgatcaaaaaataaccactattgagcaagctcaaaacttaataaaaaaagcagaggataagtggattaatataagaaaaattcttacttatttaggtataaataatacggacataatgaagcctcaacaggatttaatagaaaaatggcttcttatttataagtattcaaatgaaattatatttaaagcttgtgatgtatgctttgaaagattgaatagagcagatttcaagtatatcgacggaatcttaagtaattggaataaaaataatattagaactttagaagatatagctcttaaagataataaaaattcaaaaaataataagtatcaaaaaacttataatactaataataatgataaatcatctctcaaatttaataactttgaggctcgagagtatgactatgattcattagaaaaaaaacttttaggatgggatagcgatgattaaaggttatcaaacagaaattttaaaaatatatgataaacttagagaagatgaagctagaaatttgaagattagaaaagaagaaatatcaaagaaatatcctgagattattgaattggataataaaattcaacgattatctttaaaaatggcagtatcaattcttaaatctaaagatagtgaaaagacaatagatgattataaggagaatataacagatttaagaataaaaaaatgcgaaatgttagttgaaagaggttatgaccctgaatatttgaatttgcgatatcaatgcaataagtgtaaagatacaggctttataggcaatataaaatgtacttgctataaacaaaagcttattaagttatactataaaaactcagaattagaaaatacgacatcctataataactttgataattttgatttaaatttgttttcaagtcataaacttggagatgaaaaatattctcctagaaaaaacatggagaataatttagaatatatattaaaagactatcttcctagtttttcagaaatatcaacaaacttattattttacggaaatccaggtagtggtaaaacatatttatcatattgtattgctaaagccgtattagatatgggattcttagtaatttataaaacctctgatgagttaattaagaatttaagagaaataagattcaataatgactcaggcttagaatcattattactagaatgcgacttactaattgtagatgatttaggcgcagaacaccttaatgaattttcagtaactgaattatttaatataattaacaagcgaattcttactaataagaaaatgcttatctcaaccaatttaactttgccaggaataacaaagcagtatagtgagagaatcgcttctagactaattggagaatttaaactctgcaaattttattctgaagatataaggattaagaaaaatttagaaaaaaatagataattttaatttgattcaaataaactaaactctaatatgatatttattctcttaatgactatcatattagagttttcatttttattacaaattaatattataaattcgccttactaacctgtatttatatgctctcaaaatttattcccagatctggcttgattataatttttaaaacaaaaaaaagaacaagctctagtttataagaacttgttctttaatggcgactcagaaggggctcgaaccctcgacctccggcgtgacaggccggcactctaaccaactgagctactgagccatcttatggtgggcacaacagggctcgaacctgtgaccccctgcttgtaaggcaggtgctctcccagctgagctatgcgcccataagatagataaatggtgactcctaggggaatcgaacccctgttaccaccgtgaaagggtggtgtcttaaccgcttgaccaaggagccatattaagttttgttatgtttatttaaaatggagctggcaataggaatcgaacctacaacctgctgattacaagtcagctgctctaccgttgagccatgccagcatattttaaatggcgactcagaaggggctcgaaccctcgacctccggcgtgacaggccggcactctaaccaactgagctactgagccatcttatggtgggcacaacagggctcgaacctgtgaccccctgcttgtaaggcaggtgctctcccagctgagctatgcgcccataagatagatataaatggtgactcctaggggaatcgaacccctgttaccaccgtgaaagggtggtgtcttaaccgcttgaccaaggagccatattaagttttgttatgtttatttaaaatggagctggcaataggaatcgaacctacaacctgctgattacaagtcagctgctctaccgttgagccatgccagcatattttaaatggcgactcagaaggggctcgaaccctcgacctccggcgtgacaggccggcactctaaccaactgagctactgagccatcttatggtgggcacaacagggctcgaacctgtgaccccctgcttgtaaggcaggtgctctcccagctgagctatgcgcccataagatagatataaatggtgactcctaggggaatcgaacccctgttaccaccgtgaaagggtggtgtcttaaccgcttgaccaaggagccatgctatattgtctttcgcttaaatgtcttaactagatgtccttgagttattcaagctgctgaccacatagactataatacataaaattagattccctgtcaacacattttttcattttttttatttttatattatttatttttaataaattggcattatatctacatttcatgggttccttcaatatgacctctagcctccttcagactagataaaagacatttttttaaattaatttgctcttcaataatttttatttccccaccacatatttctaaaaaatcttctttttctattttattaatatttatactatatccattttttttaaaattttttcctgaagctctaacttctaaaggaaatttattatttataaataacagcatttccttttcccatactttactcttgtacattttatatttatctcttaaaagaattagatcttttacctcttctttaatttctaacttcaacgattcatatagtgcattataaaaaagtactgatatccctctttttaatttaatttttaagaaacttctattattaattaaaaatttatctatatcattttcacttatacattccacatcattaaaagaaaaactctttaccccacacatatttggataattgaccattatattatcaaagttcattcttatcactttaaatacccttccgaaatctcctgaattcatattaattacctttacttccattataaaatcacctcatttttagtattcctttcttttaaccttaatattactatgataaaatttattaaaaagtattataacgtattgaataatatgatttgaatccttttattttagtagtaattaataaattaatggtatacttaaaatattcagtttattttagcactgggtaaaatatgtgatttaattttatatggtcaataaaacatacatagggagtgattgttataatgatttatcacgatttaataattgtcggcggtggtgcctctggcctaatggctgcaataatagccaaggattttggacttgatgtggccatcattgagagcaacgatagaattggcaaaaaaattcttgtaactggcaatggaagatgtaatattactaataagaatatatctcgcccatttaggtgtttccatagtgaaaatcaagatttctttaaagcggcgttagataactttactgttaaagatactgaaagcacatttttatctctaggattgccattaattgaattagaaaacggaaagatgtatcccaaatctcttcaggcttcttctgtaatagatatattcagaatggcaatagaggatagacaaatacctctatacacaaattgtaaaattaattctataagtaaaaaaaataactttattttaacaagtaataatgatgactttaaacatttttcttgtaaaaaggttattttaagctgtggtggtaaatccgctgccaaaacaggttctgatggatctggctataaactatgcaaatcattgggtcatagtattatagagcctattcctggcattgttcaattaaaattagattatccttatctaaaagctctgtcaggagtaaaatttgatggctctgcttctattttagttgataataaagttattcgaacagagtttggtgaaatactttttactgattatggaatttcaggtccccctataatgcaattatcatcttatgcttctaaagctctttatgaaaatcgaaatctaactataagaatagatatgtttccactagaaagtaacgatgatattgaaaatttctttaccacacatatttctatgtttggtcacagagaaatatcaacagccctaattggggttataaataaaaaattaatttctacaattttaaaagatgttgggataaaagatatacatttaccgtgcagtagtattgattggagaactaccagcaaattaattgataagtttaagagatgggattttaaatgcattgatactaatggctttaacaattcacaagttacggttggcggtgtaaatacatctgaagtaaataatatttctttagaatctaagttagttaaaaatctctatttctgtggagaaattttagatgttcatggagactgtggaggttttaatcttcaatgggcatggagttctggatatttagctgctaagtctgctgccaatagctaaaaattattaacttatctataaaaataatactaaaattagctgtcgtaattattaatgctacctagattcttacaacagctaatctcctatatttacctttattattttttccaatctgcttctaatagcgttagttcagttccttcactattttttatagtatgatgtgattttaaattattttcatcaattatatttatagcagcagttgatgaaatcttatccccatatgttgtttctttctcaaatactactttaattcttttaagagtataattattaataatatcgagaggaacagcttccattgcccactcaacatatttgacattattaacatggttattagaatcaatatcactgtatcgtatactaaattgcttataatattgttcatcatttgttctctctattttatccatgcttatatcataatcaacatcaccatctactccatatatatgatattgttcatcttgtattcgcattggccttcttttatctatattaattaggaaaaataatgctagtgcttcccctataacattattattctcatcattaattgtatattttcttaatccatagaatttcttaaagcctatagcttctgttgtgacacttattatctcaccaaacattgggtatctatacatttttatatcgtatttataaaaaacccaagcgcagttatttttcgtacagtaatcaattcctccacctaaggcttctgattgctgagtacctacatcacatacaaaatctattatagatgacaatttacatcttaagttagaatttacttcatagtaatgtatttcatatttttttgtaaacttcttactcataattaacaattgtaaaatgcaaaaataaatctcaagctaactttaaaacacttttatttaacgaataaattatagctaaatggaatctatttttatttacaactcctcccctcctttactatatcttatatttattattataaaaaattatcaataatattgttaatgaattatttaatcttataatctattataatcacaaaaattgaattacacataaaaaaaacataaacgatataaatatattttttaataagtaaaaaaggattccctaaaaagaaaatccttttaaaataattattttatctatttaatgcttctaataaatcgtctagatttaatccatgtactgttgcagcttctgctatagtttcagcttgagctgatggacatccaacacatcccattccaaaactcattaaaacttgagctttagattgatctgcactaactacttcaccaattgtcatatctttagttatcatactttcaccttctttaatataactttatgtaattattgtctacaataaaattatattttatacaaaacataaagtcaatacccgagcataatactaaactatagattatctattctcatagtttgatctctctttggcccaactccaacaatagaaattctagtccctgtaaattctgatattcttgctaaatacttcttaacattctcaggtaattcatcataacttctaacatcagctacactatcatcccagccatcaaattcttcataaattggttcacactcagctaagtcttctaaacttgctgggaagtaatctataactgtattattaaatttatatccaacacatactttgattttttctagaccagctaaagtatcaatcttagtaacagctaatgatgtcaatccactcactctaactgcagttttaattataactaaatcaagccatccacatcttcttgatcttcctgtatttacgccatattcgtgtcccttttctctaatccagtcgccagtttcaccaagtaattctgttgggaatggtcctttaccgactcttgtagtatatgcttttgttatacctaccgcattagtaatcatattaggccctataccagaaccacttgaaacgcctcctgctgttgtattagatgatgttacatatggatatgtaccataatcaatatctaatagcattccttgagcgccttcaaataaaaccgtcttatcggctttaattgcatcatataccttaactgatgtatcttgaacaaatggtcttaatttcttagcaaaacctaagtattcagctagtatctcatcaaaatttaatgcttctccacctaatactttagtgatataagcatttttcatttcaacattttctcttaatttttctataaaaacatcttcatgcagtaaatcacaaactctgattccacatctttcaaatttatctgtataacaaggcccgattcctctacctgtagtacctatatcattttttcctctagctttttcttttaatttatctagtaccttatggtatggcattataagctgtgctctatcgcttactattaacttttcaggcgatattttaactccaacaccttctaagtattctatttcttcaaataaagcctttggatctacaactactccattacctataacatttaatttatcttcgtataaaattccagatggtattaatcgcaatttgtattctttatcaccaaccactactgtgtgaccagcattatttccaccttgaaatctaacaactacattagcttcctctgctaagtaatctgtcatctttccttttccttcatctccccattgagctcctaaaacaataaatgctgacatttatattgcctcccttaatatataaagtttaaataaataactttaatttttattatcaatttggagtttcattaaatttattttaacctctccttttaaatagtagcaaagtacttttctatggtcaaccacatatcgaatatttttttgctttttttataaataattcgtataattgttttatattgttatgataaagatcatgtttttgtaaatttgaatatatttagcatattaaggagtgtttttaatgaatatttatgaagaagccttgaaatttcatgaagaaaaaaaaggtaaatatgaaatcaaacctacctgtgaagttaagactgctaaggatctaagtcttgcatatacacctggtgttgcagaaccttgtcgtgaaatacataaaaacccagccaaagcttatatatatactcgtaaatggaatacagttgctgttatttctgatggaaccgcggttttaggacttggagacattggtccacttgcttctttacctgtcatggagggtaagagtattttatttaaggaatttggtaatgtagatgcattccctatagttttagatactaaagatatagatgaaattgttaatacagttgtaaatatcgccccaactcttggaggaataaatctagaagatatttcagctcctagatgcttcgaagttgaaaaaagactgaaagagaaattaagtattccagtatttcatgatgatcaacatggaacagctatagttgttttatcaggtctgttaaatgctttaaaaatagtaaataaaaaactagaaagcctaaaagtaatcataaatggtgctggatctgcaggaactgccatatgtaagttactactttcttctggggttaaaaatatagtaatgtgtgatatagatggcgtaataagtagggataaggatttaagtcataatatttacatgcaagaactggctaatataactaatccaaataatgaaactggtacacttaaagatgttataaaaggtgcagatgtgtttattggtgtttctgccccaaatatagtttctaaagatatggttagaactatgaacaaagatggaataatatttgcaatggctaatccaacccctgaaatttttcctgaagatgcaaaagaagctggaattgcagtaatgggaactggtcgttcagattatcctaaccaaataaacaatgtattagcctttccaggaatatttagaggtgctttagatgtaagagctacagaaattaatgaagatatgaaagtagctgctgcttatgctatagcaaatgctataccagctgatgagctgtctcctgataatataataccaaaagcattcgatctaaaagtccaagctttagttgctgaagctgttaaagaggcggcaattagaagcggcgttgctagtatttagtattcatgaattccaatttttgatttcctatttcaaataaaacctacaattgaatgataaactcaattgcaggttttattatttgtattatttttctattaagattctaccaaataatataatattaaaaataaatattttatccacaacttcacttaagcaataattattcacagaataaattttatataattatccacattatagtattataaatcttatccacaagaagcatcttcaagaattatgttgataaatatattattctcttaaaaccaacttaactataaccaatactataggcaaccataaactatttaattaattattaattacattgggagtgaatcacatgaataaattactaatacctataagtgatgataactttaaagctaaagttaatataagatttaataatatacttgatggcttatattctttcaaaaattttactcttgcagctagtgatatttatgatggtgagaataaactaatcaaattaatagaatatatttttgagatcaatgattctaatgcttatatagatttttatataaacaagatttcacctgaagacaaaaataagttttttgatcttctttcagatgaagatagagatatattcacatcccatttaaattttgatgaacatactggtgtattttttagacttgttgataaagaacttataccattcctagttcgtttaaatacaagagaagttttcttcgtcactttttattttactaataaacctataacaatttggggaaattataatttaaaattcccttgcttttttaatactcaagacgattttgaattttactataatatatctaaatcatttggcctcttaattagttctgattcggaatattaaatttataaaaaacggtatgttaaataattataattatttaacatacctccacttttcaattactacatatttttagatttctctgcacacttatctatagcctgtataacactatttctaaaacctaatttttctaattcaactactgcatctatagtagtcccagcaggtgaacaaaccatatcctttagctctcctggatgttttcctgtttctaagaccatctttgatgatcctaagacactctgcgctgccattttataagctttagccctaggtattcctaatcttaccgctgaatctgccatagcttcaataaacatgaaaacatatgcaggtgatgatccacataatgcaataaatgcgtgaaaatctttttcttctagttgaacacattctccgaaactttcaaatatcttaaagcaataatccaactcatctttagtgacattcttattagggcatactgctgacattgcttgccctacaagtgctggcgtatttggcattgtcctaattattttagcactagtattaatccattcctccatattgctaattgtaattcctgcagctatagtaataatcaatttatctgttgttaattccgatctaatttcacttatcatttccttaaacataaaaggtttaatagctaaaataataacatcagattctcttgcaacaattgtactatctaaagttgttttcacttggaaactttcttctaatcgctttgaagaagattcagttttagttgatactattatatcatcagcctttataaatccagatttaataagacctccaaccatagaacttcccatattaccacaaccgatgaaaccaatttttttattcatatcatagcccccattaaaaaatttttgctatttattcaaattttatcattttatatgaatatcttaattataaaccaccactatcataggatagcttgtattaaaacttcacaaactataattaaatatgaagggaggaatatatatgaaagataattttttagtatataataattgtttaataagcccaaaagaattcattaattccgtgctatctcttgagctcgaagaacaacttcctacatgtgaacttgaagaatcttcagatttttattacataaatgtagattcattctatgatagtaaacatatattagaaatatcttataaaaatcattttttaatattaaaaattatgtttaataataattcaaaagaatttttatttcaaagaattttttatttatcaaaagttgatgtaagtaatattttactccatgataataaaagcagtttaaaattaataattccaaaagctgtttaataatattcataatcatattattcgcatcatttaaagatataagaaattttatatttatataaatttcttatatctttctaatttagtattactgattatttaaattttattccttatgaattaaatctaaattaccgaatttactatactgaccaagccaagcgagtttaacagttccaaccggtccatttctctgcttagccattatacattcaccgatatttttatcttcagtttctttattgtaatattcatctctatataagaacataacaatatcggcatcttgctctatagatcctgattctcttaagtcagataacattggtctatgatctgctctttgctcaggcgcacgcgacagctgagataaagctattactggacattccatttctttagctaatgctttaatcgatcttgaaatttcagatacttcttgttgtctattatcactacctgatcctccagacataagctgcaaatagtctatgacaattagatctattccatactccattttgagtcttctacattttgatctcatttccataacagttacaccggcagtatcatctatataaatttttgcctttgaaagtggacctgcagccatagctatattttcccaatccttatcttctaaagttccagttctaaggcttaacatatctacgtttgcttctgaacaaagaagtttatatgccaattgctctttagacatttccagagaaaagactacaacacttttattttctctaagagccgcatgttccacaatatttagtgcaaatgttgttttacccattgaaggtctagctgctattaatatcatatctccactttgaaatccggatgtttttgcatctagatcagtaaagccagatcctacacccgtaattgttcccttattgttgaacaatttctctatttgtgcgaatcctctttctaatacatcgcttaaaggctcgaaatcctttgatgttcttttttcagctatattaaatattttcttttcggcactatccacgacatcttccacattactttgattattataactttcttctattattgcagttgatgacttaataagttttctcaacgtagatttatcagaaacaatctttatatatgcgcttaagtttgcagtagttggtacagaagaacttatttctgttatataggttacccctccagctctctcaagcatatcagaactctttaaatattctaatagtgttaataaatctactgctatatcatttctaaacatttcttgtatagccttatatattaccttatgaccatctctataaaaatcctcttcttctaaactctctaggactttggcaatagcatttttatctatgatcatagatcctataactgattgttccgcttctatgctttgaggcaaactcctcataactgatgcatccaagttttattcctcctatctaattatcaattgacaattaattttccctttatcttttgtatatcatcattctaattttatcatttcttagttgcaaaaaaaagtctccttcatattaaggagacctatttcattaaattaaataaaggcaatgtccataatctcttttatagatcctacagctctaatatctatgtcatcagtatttagaggaatttcgtttttattatcacttggaattaaaacagtttttattcccattcttctagccccatatattttttcaaatattcctccaactggtttgacatttcctttgagtgatatctctcctgtaatagccatatcttgtcttatgggtttgtttaacaacgaacttattatgcaaatggtgatagctgcacctgctgaaggtccatctatttttcctccaccaactatattaacatgaatatcataatctttaatgtctttatcggttaagcttcgaattactgaagcagcattaaatacggaatccttagccatacttccagctgtatcattaaatcttactatacctgaaccctttttctttgcagcaaaaacggtagcttcaatttcaattgtagatcctaaaaaaccactaacacctaatccatacacatggccaacttcgcttttgtctacattgcttaatctttcatatggtgtatatcttccaactgatattacctcatctaaatctgataattttatttctaagttatcaacaaatcttttagatcggtgtaacgcatatccatatgtgtctgtcagaatatttacagcttttctaccctcaaatgtataattacttatctttttagcaaccccatcttctaattttacctttaatttcttagctgcatcttctactataaatacaacatcctttgaagaaagaggttcaaaatacacttctgtacatctagaccttaaggctgggttaatttcacttggacttttagttgtagcaccaattaaaacaaagtctgctggagctccattatcaaaaagatattttatatatttaggaattgtttcatcatctggatcatagtatgatgatgaaaattctactcttttatcttctaaaaccttcaacagcttattttgaagcatagagtccaattctccaatctcatctataaatagtatacctccatgcgcctgtgtaactaaacctggtttaggttctggtatcccaacctcagccagatcccttttacttccttgatatattggatcgtgtaccgatcctagcaatgggtttgttatttctctaggatcccatcttaatgtagtaccatcaacttcaacgaatttagatttgtcatcaaaaggagtaaatgaaagttttttaacctcatctaaagctaatctcgctgctgtagtttttccaactcccggaggtccatataatattatatgttgtggatatggtgatgaaagctttgatattaatgatcttatagctctttcttgcccaactacttgcttaaaatccgttggtcttaaaaagctcataatatttttactagtaattctactatctaattctattaaattatttaacttgctgatagtctttttattttcagaacccttttgcttgtttataactgaaagtctaacttcatctatatacttttcctgcttttccataatagattgttcaacttgagattcaattttattttgaacatatctttttgctagttcatttgaaattaacctaattgttctatttatggctttttgcaattcttcttccttaggtgtaacttttaaatcttttccctctgctaatatagtatttagtgcgaaaactttatcgcaaagatttgatgattgaatgaatttatctagtttaaacctaactgttctagccctaaaagctcctttgtcgagtacattcttagttatagaaaataaagcctcgatttgtgattctaatgataaggttcctgaaataatatcctgcaataagcttgcgtcatcatatgaattcaaaattaatcctccttattcttgtggaacaataatcaccttcattttagtgctaacttctggatatagtttaatatcaatttcatatccacctgctaattttattgtatccataacaattttctttttatctatttcaatcttatactgttctctaattaattctgcaacatctttactagtaattgcaccaaataactttccattttctcctgtcttagctttaatttttatttcttttccttttaattcttcagctaatttttgtgctgcttcaagttctgctaacttttgttttcgctcattttcttttttattattcaaaatgtgcatatttgcagcactagcttcttgtgctaatttccttggaaataaaaagtttcttgcatacccatctgaagcctcaataatatcaccttttttacctatctttttaacatcttgtaataaaataactttcataacttattcacctatccttaagtattttttcattacttcttttaattcaacaattacttcctcaattgtcttatttgatatttttacaccagcaatattcatatgccctcctccgccaagtgcttctagcactacttgaacattaatatcgcccactgaccttccacttatatatatatcattatttacttcgcctaaaacaaagcttacagatattccagatatatttagcaattcatctgctgcctttgctataattactgtatcaatatttttaggcgttatagcaatagctgtattatcttttacttcagcagattttatagtctcagcaataagtaaataatcttctaggtcatcagtaaacatctttttaatttctataggatctgctcccaaggattttaaaaatgatgcagcatcaaaagttctgacaccagttttaaaagaaaatccttttgtatccataaaaatacctgcaagcaaaccttctgcttctgttcttgttaatttaggcttatcaaccatatactgaataatttctgtgaccatctctgatgtagatgaggcatatacttctatataattaagtatatcatgctctatcatatcaggacttcttctatggtgatctattattacttttctttgagatttatctactagcgataaatcagcaacataactcttattatggacatccacaatgatcactagtgtttgggcatctaaatcactttttgcatcttctactgatataaataaatcatcatatttagattccttgcttaatttatttaagaaatatccgattgcagtaatatcattatttaatataattttacagcccatccccaattgcttaaccacgctagccaatccgactgcagatccaaagcaatccatatcaggattcttgtgccccattatataaaccttgctactctctcgaattagttcactcaaagctctagctataactctcgcttttactttagtccttttttctatttcctttgaatttccaccaaaaaactttatatcatcattagttttaacaacaacttgatctccacctctgcccaacgctaactctttagctatattagcattgttatgattttcaagcggagacattccacctttgccaacaccaatagataaagtaatttcaattgaatttcccttatctatttttgatattacttccattatattaaacttatgttttatttcatcttcaatgtacttatcttgaattgataatacatatttattggtatcatatcttttaatcattgcttttaagttattggcatatgtgtttattgttctttctatttcagctactaaaagcggtctattattatcatcggttttatctattacttctgtaaaattatctacttctattaacattacactctcttgagtggtttcgtaatctatgagctttgtaatgtcattaaaagataataagtatagattttttttatttttagtttcaatcaaagtagcgtatacatcatataatttattttgtatgcttaatctttgatgcaaattattttcattctttaaaaaatcatctagatttatccctctagctatacttaaaatattcttttcagtattttcttcatctgattttaaagtgttaaataaattattataccaaactatttctccatcttcttttatcaatactaatggatatattgactttaatgcattctctgatatacctttatttatactttttataaattggttaaaatcattttccttttccaaataataatttaattggtggaaattatctataaaatagattactaggataattatacctatacctgtataattatatgcaaataatagtattaaaattgtaattagtaatccaggcttaagcaaacgtttaagcatagttatccaattcataaaaagcctcctaagaatatttaatctcttctgttactaatataacgcttcaacttacttaagcttttgccttctttttcaacttgatcctctgctcttacccctaaatctaattttgattttatattatggtctatatctaccaatgaatatcctaacttatcacctagaatatatagtataattatagctcctgaaatacaatctaaaatagaatcacgggctacattgttaccttttgtcaatagtctgaaaaactctcctattatacaaagaagttgtgcttttaaatcttctataattttaatgttagtcattatattaaaattatcttttctcatagtctatcacctctctcaaaacccttgtattattattttaatttttttttgtgagtattgcaagaatttatagacaatttgctatatttttccacaaagttgagaaattgatttaataataatatttttttatattaaaaaccccctgatttctcaggggggatattattactaccattattctgttgtaaatggtaataatgctatgtttcttgctctcttaattgaagatgttaattctctttggtgcttagcacaagttccagaaattcttcttggaagaatctttcctctttctgtaacatattttctaagcttatttatatctttatagtcgataaattcagctttatctacacaaaaagcacaaactttttttctagatcttctcattttaccgccaggtcttctaccgttgttaccttcttctctgctcatcatattccctccttacttaaaattttagaaaggcatatctccgtcatctaccggagttatatcctcttcaaatccaccactgaatgcatcattcgctggtgctgaatattcattgctattaccaaaactatttcctgatgaattacttcctttacttcctaggaattcaactccaccaaattgatctgctacaacttcggtaacatatctcttagttccgtctttcgcatcataacttctggtttggattctaccactaatagccacttggctacctttactcatgtaattagcagtactttcagcttgtttgccccatactactacaggaacaaaatctgcttctctttggccagtttttgtattatatttatcaactgctaatgttaaggttgttactgctgctccacttcctggagtaaatcttagttctggatcttttgttaatcttccgattagaactactttattcatttacaacgccaccttatacttgttcattaacaatgatatgtcttataacaccatcagtgattctgaatattctatctaactctcttggtaattcagggttagcagtaaagttaactaaagtataataaccttcactaacttttgagatttcataagcaagctttctcttaccccagaaatcaacattttctactgttcctccaccattttctataacacccttaaacttttcgatgttagcttttacagtttcttcatcgaatgatgggtttaatataaatatagtttcgtactttctcattaatttcacctcctcccctcggactaacggctatgctttgcatagcagggattacaattaatgattataccattaaaaaaagaatgaatcaagttattttgctaactttctgcagcaattactattttttttgcttcctttttaaatttcactctgggaatcattacgattctaccacagccagtacattttatttttatatctgcacctacccttattatttcaaattgatttgaaccgcatggatgttgcttcttcatttcaaccacatctccgagattaaagttttctaccattactccccatccttatctatattttcattatctaattgtttctcatctaaagatacatttattctatttttatctaaagctaactttattgccattctaagctctctttccattttccattgcattaatggttttgcattacctactactcttattgtaacttttgatacttcaagagctatgaccccagttatttctatggattcacctatatactcttcatttttgctcttaaaatcgtcacaagcagctcttataacgttaatcactttttgaatatcttccagtggagatatatctatatctaccataaacctaatatcattcctcgaatgatttgtaactccgcctattgacccatttggaattgaatgtatatcccctgtaaaatctttaataacggtggctctaattcctatacttttgacaattccgttaaaacttcctattgttacatgatctcctactccaaattgattttcaaataaaataaaaaatccattaattaaatcttttattagactttgcgcaccaagaccaactgcaattccacctatactcgcaaacgtaaatgacataccaccaaatacaattgatattattattgttatccccataaaatatactgaatattttaaaacacttttcaatacttcccccaaagtttttgccctttgagaatccaaagaaatcactgcattgctttcaatctgcttatcaacaaacttttttattaaatgcttacctatttttatagaaaaatacattataataattacaactgctattttaagtgctttatttattattagctcgattgatttaacacttatgatatctactagcgtactattaatattagatttcaattcttttaaaaattggaaatcttcctctaactctattaagtaattaccatacaaacataatcccccttcctatttatcaattagtatatatccttcatcatttctatagtatatatttttatattccatcaaatcattatttattatgttatctatatctgcctttttatctattctcacgcatatcccacaactcatagttatagatgtaggagttggcattattctaaactctagatctaattcttttaattttttttctgctgacattgcatcatatgtatttttgaatactattatataataatccatatttacaccacctatataatctttattataacttatattaatattatatatatttttttaaatttataaaggttaagaacacattcatataaaaacttcataaatttagtgaaaaatatatctttttattttataattatatagaaatgcaattagaaggagaatataatgttttcagtaattaacatattaaaagctatattaattggtttttttacaggttttgttgcctctatacctttggggccctcaggccttgaatctgttagtcgttcaatatcaaaaggttttaaagagggatttaaagtatcacttggtgctgtatccgcagatataacatatatagtaattataaacctaggtctttttacaatacttactagaaatcctaagtttcacagtctattttggatagtatctggtattgttttaattatatctaataaaatatcatttacagctaaaaaaacagactttaacttagaaaaatcaatttatagacgttcatcaaatggttttttaactggttttttgataacgtttctcaatccaacaactccatcattatggattgcattaagtggaaccatattcaatgtttggagacatcatggaaggatatattttatattctcaatctcatcaatgataattggaagtataacttggttctgctttcttaatattttagtaagtaaaggttttaaaaaatttaaacctgatttggccaataatacaacaaaaatattggactacttcctatttgctttgggtataatatttattatttggggctcttacaaattatttttttagaggtgaatacttgatatggaagtttacttagataattcatcaacaacttttcctaaaccaaagcaagttattaatgctatgtgtgactatatgctaaatgtaggtggcaatgcaggccgtggaaattacagtaattctcttcaaagtaatagatatctttatgatgcaagagaattaatttgtaatttttttggttatgattcccctagtaatgttatttttacaaacaacgttactacatctttaaacatattaatcaaaggtattttaaggcctggtgatcatgtaataacatcttcaatggaacataattctgttattagaccattattcttttgtaaggagaaccttcaaattgaattagatatagtagctgcaaattctgaaggttttatcaatgccaatgatttaaaaaagaaaattactaataaaacaaggctagttgtaatgactcaagcatctaacgtcacaggctcagtacaagacctatataacatcggtaaaatatgtaatgaaaacaacatttttttcattgttgattcttctcagggtgccggtgttttagatattaatatgaaaaatataaaagctaatgcgatagcttttacgggacataaaagtttattgggtccgcaaggaattggtggatttatattggactctaaatttaatgactcttgttcaagcctaatacacggcggtactggaagtctttcttattctttatcacaaccagactttctacctgataagtttgaatgcggaactcataatcttccagggatagttggattatcagaatctattaaatatataaactcagtaggtttaaattcaatttatgaacacaataactacttaataaaacatatgctagaaggtttgctaaacatcaaaggaataactgtttatggtgatttatctggcaaaaggctaagttcatgtatttctataaatcttaattccctcgatccttctgaattgggatattatttagaatgtgaaggaataaagactagatctggtttgcattgttctccattagcacacaagaccataggtagttatccatctggaactgtcagactaagcattagttattttacaactaatgaagaagttaattatgcgcttacggttctaaataaaatttcggcaaattgcaataacaaattgaactaatttctatttatgacttaaacacttgtattttcttaaactgcgtaaattttatctaagtgtgcctcaaataactcttcaggagtcttatagttaagtattctcctcggaagagtattcatccattcttctatgaaagcaatgtcatcagaagtgtagtctgaaatacgtttaccctttgggataaagcgacgtattagaccattatgacgctcattagtacctttttcaaaagatgaatatgggtgagtgaaatacacctttgtatcagtttcaatttcaagtgtggataagttagcaaactcagagccattatcaccagttatagtcttgaaagcttggctaaattgcttgccaaataaactgcgcactctattaagagcatcagcaacggcttcagcggtttttgctataatatcgattaccatagcatatctagttttacgctctactattgtaagtagtacattatcattattagatttttgaccaataacagtgtcaatttcccaatgaccaaactcgtgccgagtgtttatctctactgggcgatctgatatgctagaaccaagttttttcttatgctttttaactctagtagattttgtatttctacgtagcttcattggtaagtcagtgttttttatatctaataaaccaagatctatatggttatataatgtttttgtgcagaccatttgagaacgcttaaatctaccgttagcgatagcttcgccaacacaagcatctggtgaccatgaatgatttttaattttatccacagtatagtttatgaaatcactgcattctaagcgcttaaaagtgcggcagcagtttatacgatgctttttatatatggcttcgccagtatcggcaaggtatacttcaacgtatttttcttgtttaatttgagtggtagttccacgtctaatttcatttaagatagtgtttataggtcgttttaactcttttgctatcttataaggtgaaaagccatcttttagacgaagctggataagcatacgttcttcaaaattcaaatgtttatttttacgtgattctgtgttattatttgggtagtccatagtgattatcctccgtgtatgttttttgtttagcgattaaatcataacacagaataatccactatggattttttattagttcaatttcattttacaacaggtctaaataaaatttcaaaaaatctataacaacaaatatttcaagtgctcttagcactggccttaatacataccttttatattattttcttgttagatgtgattattaatttaatttgtattctatttattatttttagacgatgaataaaacctctttttattggaaataaatctaataaaaggaggttttcttatgtgtcaaaatttttctgtaaactcatcttcactggcttcttgtactaaaatcaaagattatttattgactgaattacaaccaatactttatgaagataggccaattatatttatttgtattggaagtgatagatctactggagattcattaggcccattagtaggacataaattaaaacatttttctaagaataatatacatatatttggaacactcgaaaatccaatacatgcaaaaaatatagtaagtaaattaaatgagataaattttaattttataaatccatatattatagcaatcgattcttgtttaggatctataaataatataggtaaagttttcatacagaaaaagcctctatttcctggtttggccttaaataagaaccttcctgccgttggtgatatgagcataactggtattgtaaatgtatccggaggatttgattttttagttttacaaaatactagattatatactgttatgaatctcgcagattcaatttctagaggtatctattattttattttaaagagcttagataggcctaacactactagcacttctgtaaatattcaattttagtaacttttaattcttaattgctttaacaaaacaattctcatttctatgattattaatttattttaaacttatatagttgccatcagtgtaatactattttgtattatttttcaataaagattgtttcacgtgaaacaatcttttgatgattttaacccttcctataacccctcaattagatttaggccaggactatatggagataaaaacattaattcaagtctattcttcagtttctccaaaagcagttgtatcaatttagcatgatgaactttagcattatcaagaataataactatcttacctttttttgggatattgcgtaagcaccttcttaaaaaactcaaggaatgctacagcatcatatttttcatgttcttcacaacatacatggccactttcataatctagtattactattaattttacgcctaccacatttcaataattaggtatatttccttatttcccttttataaaccaagtcttttgaatagcctgataatctcttatcattgattagtcttgaaataaggtaatatcaattaagtcatcaaggtgtgttttttagatattcaaaatccttattgaaaatttcttgtttctctttatcagactttttaaaacatatgttgattttgtacaactcaaatttaatctgtgaagtataactgccatactgctatgttttatagtaattctaaaattaaccctgacccgttgacatattaattttatagtcaagttttttattgattcactccccacttcgtcaatcgtattatttgttatcacataaataagttcttgttattgctcaggatttaattttctaggggcaccagttggcttttttaagcaaggccctttaatccattgactttatattttttaatatagtcaccaacagtatgctcttctaatccttccatttctacaatcatcttattaaaaaaacttagaagtgtttttaaactacaggatcccgcttatacattcgtacacttttagtttctgtcattgccgttaagttctaatactatactgcactcttattatcttctatggtaattctatttagatttattttatatagccttatcaaataatataaatatgagttaagaagaaatgaattttactaattagaacttatatatattaattatatttgccttacagtttcactttttcattatgtagtcctattataaattatttaaatatttaaattttttactctatgtataatatccacacttattatatttcatctagcaattctaaattatatctaaatacatatcatacatttcaaaatattttagattacattcaattgatgaattttaattatgtaaaatatgtttaatcagcatatacctaagataactcttctgtagtattgcaattaaattgaccttttttcttgaaaaagtattcattcaagcttataaaaataaaacattatttaaattataattccaaatcgttttgatatacgttaaaactgcttactaattcatcgttacatttattagtcccatattcaaaagatgaatgtgaatgagcaaaataaacttttttcatcagttttagtctcaatcgttggcaaactagcaaatctaaaactattagcacttgttaattgtaaagactttactaagctgaattccataattgtactaaatacttttaatctcatcaataacttcaagatatgaaccttggtataaattttatacataacggcatctctattattcctcaagaattgttagaagtatatatttcattattgatttcactacatttaatttaaaaggtatacttgcaatcatattatataatctagaaacgctttgacttctataatttcaagttttttcacataataatccaaatattttcatatataattctttatcttcttatatatatgttgcaattcacaatccacatttcacaattcacaattacagctataattcttgtaatatttttagaattatgatgaagaattatttttgcaatatatatataatttttctttaaaatattgccatgaaaactatatgatattttccattccgtttactatactataaattatcaatatccataacagatatgcctcttgtagttcatagttcaagtcagcgaacatattataattttgcaacagtgatttatttcttcacttatagtcaaaagctttctgcaaccataagtaaaacttgtggcatttttaaatgcaaaaatagagcaccaaatttattggtgctcacttaactaaacaatttaactaatttttattttctttattagctgcttcatttaaaacgtataattcttcctctgaaagatcatatcttgatattcccttatcaattggttttgcataagttgtactttcttgccttccatatataccagttaaaataactccgtcatttctatcatctagcatagctatcgaaaagctcaagtcactaccaacattctcgaatgccttatatctcataattgctactttttgaacacaatccttcatcttaacttctaatctcttacattcttctagagccttatcagatctttctttagcatcttcaatactatctaatctttccagtagcatttcttctaaattattattactagtacctttcattaattttctgtatctgctttctacttttccaactgctttaaataataccactaccattataaataataatataattattattgccattccaattaataaatatggcattatatcattcattgcactaattagcatatccaattttatgtcattcctttcataattgtttcacgtgaaacattacatattaataatgtctagtattctttgaagatcttcctctgaataatattcaatttctattttacccttgtttttcttgtttaaaatatttacctttgttccaaaatagttctgaagctgattcttaatttctttataataaggatttacttctcctatattttcattatttttttccttttcaatatcatcattaattctttttattaatctttctaattctctcacggataatttttcatcaattacctgctgagctatttcatactgtttctgcttatcatttattgaaagaagtactcttccatgtccttccgttatgatactctcaattatatattgttgaacacgttcatccagattcatcaatctcattgtattagcaatagcaacccttgattttcctattctcttacttaattcttcttgtgtgattttaaaatcatttaacaattttctatatgctaaagcctcttctattggatttaaatcttggcgttgaatattctctatcaatgatatttctaatatatctttatcacttaattccattattattgctggtacttcttttaagccaaccattttagctgctctccatctacgctctccagcaactataatgtatttatcattttttagctctcgtaaaattaaaggttgaataacaccatgagcttttattgactctgctaattcagctatcttttctgagtcaaacaattttcttggttgatcttcatcacttttaattttatttataggaatgagaaaactattgttttcttgcgcagcattatctgattcctccggtataagtgcgcctaatccctttcctaaagtgaatttctttgccattctatcacctactgtctctctaaaaactctttagttaattttacatacgcttcagcgcccttacatttttcatcatacaacattatcggaagcccaaagcttggcgcctctgcaagccttacatttctagatattgtagcttcatataccttatttttaaaatacttttttacttctttcaaaacttcattactaagatttgtcctataatcgaacattgtcattactacgccttcgatttctagctttttattaagagatttttttactaattgtatggtgttgattaactgactaactccctccaatgcatagaactcgcattgtattggtatcagcaccgaatctgcacatgttaatgcatttattgttaatacccctaaagacggtggacaatctataaacacatagtcatattctgattcaacttcttttaatttattcttcattatattttctctatcacttctatttataagttccacttctgcgccagcgagttccatcgttgacggtgatatgtacaaattctggactaaatcacttcgtactatagattctttcatagtagtatcagaaattaatacatcataaatggataagtctaaattacttttatccagtcctaatccacttgtagtatttccttgaggatctatgtctatagttaatactctataaccttccattgctaagtacgcacataagtttatattagtagttgtttttccaacgccacctttttgattaaaaatgcaaattaccttcataagtacagccctaaaagagcgtcccccctttccatattaatattatatatacttttttattataataaaagaattatgttctaaaaaacaataactcttaataaaatatattctattataaaatattcttcattaattcttaattttctgtgtataaatatgattgacaattctatatttctatatttataaatataagattaatacatatttgaaataataaatttacatttaaaatttcagtaatgtaaaaccaaaacctaagttaagaccaaaattttaaaattcaactacaacatgtatatataattaaagttaaggtaatacttggtaaaaccttaacttccaattattcctcttatttttttgtttttggtatctttacaactacttctataaattcatcatcatctttatatgcatattcagctggaatatcaaacttctgcaaaacttgttttattgtattaacataaagtttagccggtaatacgcctcttatatttcttttattcttattttttaattcttctccagctaatttaagcaattctttattaattaattcttctgttttcttaacatttaatccgtcttttattactttttgaacaattcttaactgcatttcttcagttggaattgttaacaatgctcttgcatgtctttcagttaatttattctttaaacataattctctaacttcactacttaactttagcaatcttaatttattagcgattgttgattgtttctttcccatcttctttgctaattcatcttgtgtaaaattatgatcacttattaaattataatacgcctctgcttcttctatgtaatttaaatcttctctttgaagattctcaagtagagctatctgagcagattcagagtcagttatatctataatattgcaaggaaccgtctctaactcagctaacttagctgctctaagtcttctctctcctgctaccaattcaaagacctctccacgccttcttacagtaattggttgaattattccatgttctctaattgattgtgataattcttctatagcttcttcattaaaatatttacgcggttgataaatatttggaatgactttatttatgttaatacttactatttcattattcatgttcccaacccatcccttattaaaatactacatacatattttaccttgttatccttatttgcctatttaactcctaccttaatattttatcatatacctgcttacataatcaaatttcaattatttatgtaatatatttatttaattggatttttacttattaaccctgctcttcttggatattccttaggagatctatccatctttttcacgacaactagattatgttttaattctgtatcttcaatgttaatttcacaaatttccaatatttttccacctaaaatctttattgcatttgcgctctctataatttcttgatcaactgatggaccttttagcgcaatgaaacttcctccaacttttacatatggtaagcataattcagataatacactcatatttgcaacagctctagatgttgcaatatcaaaattctctcttagcttaacatcctttgctccatcttcagctctggaatgtatagttgttacattagatactccaattctattaataactgtgtttaaaaaactcactcttttgttcaatgaatctaataatgtaacattcaaatcagctctcattattgcaataggcaaacctggaaaaccagctcctgtaccaacatctattaagcttctagcaattttgaattcatctcttttaaatgcttttattgaatcaataaaatgctttttgattatttcttcatcatcaattatagctgttaaattaatcttttcattccattcttgaagaagtttcatataatcaataaatttttcatactgctctttcgatagttgtaaaccaacatcttctgctgatttagacattaaatcataaaacttcataattcctccaataataattaattatttattataataatgttcaagataaataagtaataccgaaatatctgctggagacactcctgaaatacgtgttgcctgacctatgcttattggcctaatatcacttaacttttgtattgcttcagttcttaaccccttaatatcactataattaatatccttaggtaataacttcttctcaaatttcttaaattgagcaacttgttcaagctgactttggatatatccttcatattttgttaatatattaatttgctctccaacgtcatgaggtaattctggtctttctgaatctatttgttttaaatcaaagtaatctaattcaggcctttgtagcagttcataaaaagtaattggctttcttaattcagctgaatttaatgatattaaaaattcatttatttcttttttattagttacctttaaattctttaatcgttctaattcattttcaatattttgtttcctctttataaatttatcatatctttcctctgtaactaatccaactctatatcctaaatccgttaatctaaaatccgcattatcctgcctcaataataatctatattctgcccttgaagtcatcatcctataaggttcattagtcccttttgtaactaaatcatctattagaactcctatataagcatcagatctagttaatattagtggttctttttctttaatttttaatgctgcatttatacctgcaattaacccctgtgctccagcctcttcatatcctgaacttccattaagctgacctgcaccatataatccttcaatatctttaaattctaatgttggttttaattgagtaggatcaattgaatcatactcaattgcatatgcagttctcatcatttcaacattttcaagtcctggtaatgttttaagcattttaatttgtacttcttctggtaatgatgatgaaaatccacctacatacatttccagtgtgtcaagtccttcaggttcaataaatatttgatgttgtggtttatctggaaatctcattattttatcttctatggatggacaatatctaggaccaacaccttttatgcttccattataaattggagatctgcctatattatctctaattattttacgtgtttcatcatttgtataagttaagtaacaagatacttgttccctctcaatattttcactcataaatgaaaaaggtattatattatcatcgccattttgttctatcatcttagaaaaatccacagatcttctatttatcctagctggagttccagttttgaatctcctcaaagaaactcctaaatctaataatgattgtgataggtcattagctggaaataaaccattaggaccaccactatatgatacttcaccaattataatttttccttttaaatatgtaccagttgcaagaattactgccttgcatttaaaaatagctccatttttagtaactacacctatcacctttccattctcaacattaagctctgttacctcaatttgccttatcttaagattttcctgttcctctagaattctcttcattctaaattgataactttttttatctgcttgagctctcaatgagtgaacggctggtccttttgaagtattcaacattcttgactgaataaatgtattatcaatatttatccccatttctccaccaagtgcatcaatttccctaactaaatgaccttttgcagtaccaccgatattaggattacaaggcatcaatgctattgaatctaaatttattgtacatactaatgtattaaggcctaatcttgctgatgccaatgcagcttcacatcccgcatgacctgcacccacaacaactatatcgaattgaccaccatcataatttactgccattacttttacctactttcctacacaaaattcactaaaaattttgtttaataaatcttcttccaattcatctccagttatttctcctaaagctttcatagctgctgttatataaatcgatattaaatcaagatattcattagcattaattttatctaaagccattttacaattttctaatgatttatataatgcttgcttatgtcgtgcattagaaattattaagctttcagagcttatctctccattaaagaataactttttaacttcatcttttaaaatatctattccttggccagttttagctgatatatttattatattacttaaactcttaagtatttcttcttgaatttttatatctttcaaatccatcttatttaataatactatatattttctattctttattttattaattattctactgtcttcttcatccatatatctggatgcatcaagcattagtattattagatctgcttcttcaattttctcttttgatttttccacacctattttttctactacatcctctgtatctcttattcctgctgtatcggttattttaaccggtattccatcaaggtttatatactcctcaattatatccctagttgtccctggaacatctgttactatagctctattttctcttaataatgcattaagtaatgaagattttcctacatttggctttcctacaataactatgttgagtccatctctcacaattttcccagcatccgcattagacaataaggtttcaatttttgaatttgccttatggatcccatctttaacctgtaaaattaagttgtcatcaattatatcctcatcatcttctgtaaaatcaactgcatattcaattagcgctaaaacgtttagcaaataccctcttaattcatttatttccttggataaagctcctttgctttgaatcatagctgctttcatcgataactctgttttagcagttattatatccataactgcttcagcctgactcaaatctattcttccatttaaaaatgctcttttagtaaattctccaggttctgcaagtcttgcaccagctttaataacctgatctaatacactattagtagatataactcctccgtgacaatttatttctaccacgttttcacccgtatagcttcttggagctttcatataacttaaaataacttcatcaattatctcttctttgttctctaaatccacaatattaccatacttcatagtgtatgttttcatgctttcaatatcgtatttatttctaggggtaaatatcttactagcaatctttaaagcattctcccctgaaattcttattattgaaactccgccttctccaattggtgtagcgatcgcacaaatagtatcaaattctttcatttaatttcctcctctttttaaagaagaatattttctaaactaaaactcctttttaactattatcaattttacataacaaaatttaaatagtcaaagttatattagttaaaacttctctttttagtcataaattttatttataaacttaaaaagaaagccataatggctttctttttaagtttaatctttctttaattcaacgactacccttctaaacggctcctcgccttcactatatgtattaacaaaggcatcttcctgaagtgcagaatgaatgattcttctctcgtatggattcattggctctagtttaaatgattttcttgttttcttaactctattagctgttttaattgcaacacctttaagagtttcctctcttttgcttctataatcttcggtatctagtataacctttttatgaggaagttcatgtaccttattaactacaagtgaaactaaatattgaatagaatctaatgtctctcccctataaccaattatcactcccattttttctccggataaattaattataatgctatcattctcttctttaatatcaatcgttgcttcaacttccattcccttgagtatatgaactataaagtttcgtgcttcttcaatataattatattttttagaaactctaattcttgctggtttaactcctataacattaaataaaccctttgagccatgatccaaaatttcaatatcaaccatatccttatttgcatcaagttcacttaaagctttatttaaggcttcttcaacagtctttccttccacttctactgatttcatctgttaattcaccacctctaatatcaaagcaaaatcactttttaattatttcttttttctttttttactagctgaatttttaggttcttccactgccataacaaacttatctgattctgctacagcatctttttgagtcttatcatccatctctctcattgctggtctatagtttaagaaatatgtttgtattgtttgaattaaattaccaattatccagtaaagtacaagtattgatttaaaattcaatgacataacacccatcattccagccataactaaattcatacttcccatattcattccacctggttgtgatggtgttgatttagacattaaataagatggtatatatgttgataatgcagctaatactggtaatatataatatttatctggcgcaaataaatcgtgaatccataggaatgaagcaccttctatcccttgtatccccataaatacccaataaagagccattagtataggtagtggtaataatgatggaaggcatccaccagctacactaacattattctccttgtataacctcatagtttcagtattcaatttttgaggatcgtctttgtacttagcctgaagctttttcacttctggttgaattttctgcattccttgtgatgattttgctgccttaacgttaaatggtaatattaaaattcttataatcaatgtaaaaataaatattgccaaaacataagatagcccaacatctgatattcccatactaactataaagtcatgcagggaatcaaatatccctttcataaagttaactattgcttgaaacattaaaatatatacctcctaatatctcacctaaccggatcatatccccccttacaaaaaggattacatcttaatattctgtaaactgctaatgcactacctttaaaagctccatatttatttatggcatctattgcatattgtgaacaagtaggcacaaatctacagcatgaagaccttccaggtgaaatatattttctataaaatttaattaggcgtattagtaatttcttcattattatataagcctgcctttttaattaaacttttcatagctctttctacctcaaagtagcttttactttgaataggatttcttgctatgaaaacaaaatcatatccctttactatataattataatttaatctaaagctttcagttattaatcttttacatcgacttctaacaacactattcccaacttttttacttacagaaatacctaccttgctataggctaaaagatctttatctttattccttctattttttaatatgtacataactagaagctcatttgcaaatgatttacctcttctatatacaattgtaaattcaaaatttttctttaatctataaatcatagatatttttatactccttttttccctgcatttgcagaaaaaaggccactaatgggcccttaagctgttaatttttttcttcctttttgtcttctgctcttaagaatgtttcttcctgattgagtgctcattctttttctaaaaccatgttctttttttctttgtctctttttaggttggtaagtcataaacattacatatgcacccccttaaatttattatttatagtaaaaactatacttcgctatttaaattttactttattattatatagatatactatttttctgtcaaggtggtaataattgttgataaatatatttatatatatttttttgtggataacttattgaatatgagtatttacttatgttatcataaatattatgttgtgaataacttattaatataaaaacttatccacatgtgtggataaaattgtgcataacttgtttgtttttattgttagtacatgctttatagttgattttatttaggtcttagcatgtttataacacttaataacagattgttattaaatttatagaaatttaatctatacacatagttattaacatgttgatatatttatatacatacttggctataatatatgaatgttaatatccttgttgataaactgtacataactattataaaaatttttttattacaattattggaggaataaga

SEQ ID NO: 2 - DNA, 45420 bp, Clostridium beijerinckii SIID27451-B11
tattatgttagcgttaatatttgttggtggaaaaataatacacataccagcacaattaatcataaatgcattattaaaaattgctatttaatttgagatattctgtaatatatatgttgcaaaactaattccccatcataatcctaaaagcattgtaagaattttagccgtgattgtaaattgtgaaatgtgcattatggattatgcactgtgaatgcaacatatatataataaatgtatcgtagcatatattaaaatttagttgacaaaatttaagataatttgtataatttattatcattaatattgaaaaattctaagaagaggaaagtagtttaattaattcctatagcgaatagggagttggtgtagccctatggatagattataacgaagagagccttggagaaaccacctgaaataagtagttaaaaagataataatctaatatagctggtatgatatattaattattatttttaaacctttagtagggttggtcgcaagttaaattgcgttaaaagttgagaggtattttatttatataaaatacaataagagtggtaccgcggataattcgtctctttttatttaagaggcggattttttttgttctttagaaatctatatcgaagttaaatttgtgcaagtattatgagaaatactgactaagaagataaattttgagaaagaataaagaaatacattcctataaattaaaaattatttaatttatgaggagtttgtctaaatataaggaggatattatggattataaaagtaaagttgcagaactaataaaaaaacatgtagaactagaaattgaagctattgaaaaattaattgaaataccgccaaagccagaaatgggggattatgcatttccatgtttccaattgtcaaaggttatgagaaagcacctaatatgatagcagaagaattaaaaaacaatatgtctaatgagggatttgaaagaattgaaaatttaggaccatatgttaacttcttcgttgataaaggagtatttgcagaaaatacaatcaaaaaggttttagaagatggagagaattatggagcatcaaaaggagaagggaaaacagtctgcgttgaatactcttcacctaatatagcaaagcctttccatgttggtcacttattcactacagctataggtaattctttatacaagatgtttaaaaaggaaggatataatactgtaggattgaatcacttaggagattgggggactcaatttggtaagcttataagtgcgtatgatagatgggtagacgaagaggcattagaaaaggctccgattgatgaattacttagaatatatgttaaattccacgaagaggctgaaaaagatccttcattagaagatgaagcaagagcaaactttaaagcgttagagactggtgatgaaaaagcaacagctctttggactagatttagagatttaagtttaaaagaatttgaaagagtttataacattttaggagttaaatttgattcattagctggagaagcattttataatgataaaatggatgttgttgttaatgaattgaaagaaaaaggacttcttgtagaaagtaatggagctcaagttgtaatgcttgaagaatataatatgccaccttgtatagtattaaaaggtgatggtgcatcaatatatgctacaagagatttagcagctgctatgtatagaaagaaaacttatgattttcataaatgtgtttatgtagttggaactccacaagcacttcacttcaaacaagtatttaaagtgttagaacttgcagacatgagtgggctaaggattgcgttcatgtaggttttggattagttaagttcgcagatagaaaactttcaactagaaatggatcgattgttttacttgatgatttacttcgtgaagctgtagagaagacaatggaagttaaatgaaaaaaatccagaacttgaaaataaagaagaagttgcaaagaaaatcggtgttggagcagtaatttttacttaccttaaaaactcaagagaaaaagatattgtttttgattggaaaaatattatcatttgatggagaaactggcccatatgttcaatattcatatgcaagaggaaatagtatattaaacagaggtaaagaatgcactggaactgttgactatagtaaattatcttcaaaagaagaattgagttagttaagagcatagctaactttaatagcgtaataactttagcgttagataagttggagccttcaatattaacaagatacgtaattgaagttgcaaaaggatttaataaattctataatgcacattcagtattgaacttagaagatgaggatttaaaagctacaagattaaacttagttaaagcaagtttacaagtaataaaaaatggattagagttacttggaatagatgtagtagaaaaaatgtagttaattaatattaaatttattataattttttgaaatagagggatgtcttatgtagcaaccctctattttgactcgttaatttcttttatatgccttaaaaaagtgatatatggtataattgaaaaaagcatggaaaggatgtgggattaattgtttataaatagaaatattaagtatagggatatattaatatttgctttaataggtgtaattggatataaacttatagataattataattttttctttgatataggcagaaaagttttatctattatgtcaccttttatatatgctattatttgtgcttatatattaaatccagtagtaagtttttttgagaataattttaaaactaaaagagcaatatcaatattgattacatattttataattatagctttaattattaatattattttttacaataccaagtatagtagacagtatagtaaatataactaaagaaatgccggcctatgtggaaattatacaaaagtggatcaatactcttcttcaaaatgaaagaataaagacactgattgtaaagcaggacttttaaataagttacaagaaatgtcaagccagataggaagcgtaacaatagggctactacaaaattttattatgtacttattatcatttacatcaaatttagtaagtgtgatttttggttttttaatttcaatttatgtgttagtggataaagaaaagttgttaaaacgtgctagaaccataacatatatgatttttaatgaagaaaaggggaataagttaattacatttattagaacctataataaaatgataggagtttatataggtataaaggcaattgattctgcaataataggtcttatatcacttataggtttattaattgttggagaaccatatgcaccactaatagcgctgatagaagggattactaatatgattccttattttggaccactcattggtgaactagtcggtgctggagttgcaatctttgtttcgcctatgaaggcttttatggtgtttatacttttactttgtattcatctttttgatgcttggtatcttgatcccaagcttataggaaaaaaggttggagtcagcccattagggataatattaggagttgcaataggcggtggtttttggggaccttttggaatgcttcttgggtcacctacaatggcaaccataaaaatatattatgagaaaacagtggaggagtttaaaaaaaggaatccaggattagttaagaaagaaagtcttggagaaattgatttataaaagattataaagaatttaggagaagttttatgaaggaatttattgatttattaaatgaacgtcaaagttgtagaaagtatttaaataaacccgttgaaaaagaaaagttagtaaaatgtattgaggctgcaagattagctccatcagcatgtaacagccaaccatggcattttgtagtagtgaataataaagagctagtgcctaaggtttcagaatgcttacaggatgcagttatgaataaatttactacagaatgtccagcttttataatagtggtggaggaaagtggaaatttaacttcacgtgctggagcactaattaaacagcaggattatagatctgttgatattgggattgcaactgagcatatatgtttagcggcaacagaacaaaatttaggtacgtgtattttaggttggtttaatgaaaaagaactaaaaaaacttttaaatataaataaattaaagcgaattagactagtagtggctgttggatatccagaaaatgataatataagaaaaaaagtgcgaaagaatatagatgaaattctaacttttatagaatagtcatggataaattttaacgacactatcaataataaatatatttggtagtgtttttacttatacaatttatagtatatattgcaaaaataattctttaatcataattccaaaaatattgcaagaatttcagtcatgattctgaatggtgaaatgtgtattgtgaattgcaacatatatatttaaattaagcagatagattttataagcttttctgaaatgaaaaataaagtataataaataagtataaaaggatgtgagttaatggcaaatataggtgcatttttttgatttagatggaactttatacagagaaggactaataacagaagtatttaaaaagatggttaaatatgaaattataggttcagaaagatggtataatgatttaaggcttactttatgaagtgggataagaggcaaggcgattatgatcaatatctgttgaaaatgattgatatatatgttgagtcaattaaaggattacagaagtatcaaatggaatatatagctaagaaagttgtagaacaaaagggcgatagagtatatacttttacgagggacagaataaagtggcatcaagctaataaccatactctaattataatatctggatcgccttcagaacttgttggagagatggccaagaaatatggctttacagattatataggtgcaaatatattatagatgataaaaatgtatatacagggcaagttacaccaatgtggatagtaaaagtaaatcgaaggcgataaatgaatttgttaaaagtatgatatagatttaaacgatagttatgcatatggagatacagcaggcgattatactatgtttaaaaatgtaaaacatccttattgtatgaatccaactaaggaacttttgcaaaaagtattgaaagatcgagaattaataaaaagagtgaatgttgttgttgaaagaaaggatgtaatatacaatttggacattgaggatatacaattcttatagaaagagtgatactgtgattattcgtgaaaataaggtgaaggttgaagaatatagtgaagaatttatgatgaagtctcaagataaagaatatacaccagaagaaattatcttctttgatttagagcattatgtatataagaagcctaagtgtattggagtatttggggcgtgtgagtatgataagaaaaataataatattctagtaacccaatatatgattgaagatagagatgaggcgacacatatactgtatctcgctaaagaatattttataaagatgaaacaaaaaggaaaaaaggccattatcactttttcagggaataatgattttcagttattaattatcttttcaaagaaaataatatatattataattttagtgaagaatttgattcgattgatatccaaaaggaatatgaaaagaataaaaaattgtctattgggcttaaaaagttagagaaagtttttgatattgtaagagagggagaggtaatcagcggatctaatctagctaaaacttttcacaaagttatgaaagataaaagctatttcaaaagaatgccagaagagaaaatagaaaaaattcttctttataatgagcaggatgttataaatttatattatatatatgtaaactggaaaaaatatatttatgaagatattgaagatattgaagatattatcgaagaagctatcgctgaagatgaagttgaagatttagaaaatctagaagaagagtatgatattcaagaaaattcattgaataataattctaattaatgactgcaaaataaataagatagaaataaataatttagaaataattaaatttatttctgattttaaatgactccaagtttttggggtctattttaatgcgttaagaacagctaggatgctttaatataatgaagcatcctttcttatgttgatttatttttttgatatgttagagccgtctgagcaaatgacgatggttccatctttatctgttctataggtttttatattgttttcatctaataattttgtagtaatagcgtcaggatgattgtatatattgtctttacctacagatataactgctattgaaggattaactttttttagaaagtctttactagtagaagttgaggatccgtgatgtcccactttaagcacatctgcactgatatcttcattattattaagaatttctttttctacttccttttcggcgtcaccagtaaataaaaagaagtgttaccatattgaattttattacaggagagtagttgtttaaattatcataaaaatccttattaggagaaaagacatttactttagtattttcacctaagtcaatagaagtactattgtttttcaatacatgtacttttaaatttttatcttttaaagcatctaccatgtcctcaaagctttttgtagtagattcaacttttggagcatagaaagttcctatactataagtttttattatatcatccatattaccaatatgatcttcatgtggatgagttgcaattacataatctaatttatttaagtttagccctgataaatagttaaagagttttcttctatcagatttaggtccagaatctattaaaagatttttgttatttacttgaacgagaatgcaatcaccttggcctacatctatatagtgaacaagcatcttgtttggatcagcgttactggctttatttgaattgaattttgtaaggccgcaacttactatggaaaatgaaaataatagaattgcaagaaaagttagtaaatatttttttacattatatttatttttgttcataaaaaagttgtctccttgattacatagttttaatataattctaccatttaaggaaatgtaacggaaatgaaattgttctaaatgtaagcaaaagaaaaataaaaagttggaataaaacacgaacaaatttgtgaaaaggcaatataatattcatataatgagctttctgagcttttttatagcatagtcagataggagtggaggaactaactttattgaattttaatttaaggaatttcttatgaactcaagtaatttttagatgaaaaaatctttaaaatgaaaaatgcaaaggttgaatattgcaaaaagtgtgatataattatttcaatatgtggaatttgaaataaaaaatgcaatatttaaatatgaaaaaattcatatggggggccaggaaatgaagaaagaattttctatgagtaatgacaaagtgatgataaactttacagcaaagtactgtaatagctttgaggctatactagaaagtgatggatttagacgaattttagaagtttatctaagaagagctaaaaagaaaaattcagtagcatacagatatttaagtaagacattagatacagatagtcttatagacattagaagagatttaactgtagtaataaaatatttaacagttatgagtgttgaggaaattgtagagattagtgactcatattcaaaattattagaggatagggacaagtttgtagtatttatagaagatttctatttattttggagaaaacttgaaagatatacaatagttcatagatataaggttcaacaaggccttgctgcagttagttttacagaagcaaatgctaacttttctacattaattctaagtttgtacagaaaaattgaacagcatgttgcaggatatcagccaaaagtttatagacaaataccagctggtggaaatgcctgcataatgattcatgaaatggaatgggtaagaccaaatggatatgaagctttagaggaagtaccatttattgatcatatacttttagaaacaccatttataacttatcctaaaaagaatacaagagatggaatgtttacagagataaaatataatccattaaagtatgcacaaataaataaagaacattggttttgttatccagctaagataggcgggttacttactttcatttatttccatagagattttatggagcatggaataactttatgtaatctgttcgagatggctagaagtgaagaaacaaggggaagaaagcctgatattatttatgtatttggagctaaagataacgatgaagacctaaaaactgtgttctttgatgatgttcaaaatgatataatgcttggatatgtgaatcattcagaaaagatagattattttggttatataaagaagatgacattaacattatacaacttaataatgataaagagaggatatttaccgatacatggttcgatggtaaatattattttaaaaagcggagatgaagctaacgttgttatcatgggagatagtggagcaggtaaatctgaaagtttagaagcttttcgtagtttaagcgaagattatatttcagatatgactattatctttgatgatatgggaacttttaaaatagaggatggattaattaagggatatggaactgagattggtgcatttgtccgattagatgatttagatcaaggatatgcctttaaagaaatggatagaagtatatttatgaatcctgataaggtaaacgctagacttgttgtaccagtagcatcatataaggaaataacaaagggacatccaatagactttttcttctatgctaataactatgatggcgttaatgaaggagaaaaatatttagattactttaaaactccagaggaagccattaaagtatttaaagcaggtgctagaatggcgaagggaacaacaacagagaagggcttagtagaatcattttttgcaaacccatttgggccagcgcaaaagcaggatgaaacaaatattctgatagaaaatattttaagacaatgtttaaaaatggacaagtaaaagttggacaaattagaacttgtttaggtgtaaaagggcaagaaaaaaatggaccaagaaatgcagctatagaattattcgatgagattaaaaatatgaaataaatattaagagattaaggtaaagcatttaccttaatctctttttaatttatttcttaaagccttaaaaatatttaaagatctataagaaatgcttgaaaagttttgtcttgattgtctattatataaattcatttttagcttactaaaaaatgattcaaagtgtctaattctaccaacagctttttcttttgtgaaattcaataatgaacttggtttatcaaataaaaattagctggcacaaattgaaatgcaaaagacattttttcaaattgcattaaagaagctatagttaaactaaaatcaataagataataaataataataaagaaataaatacctcaccaagtgttttgggaatattattgactatgtttaccactataggatgtattatcttaattatgcctacctcaccaactccccagagtagagaataaagtaaacaaacacgaccatgtatattaaatggatcgtcggtataatcccaccactttgtcttaaatgctttttctaatacaaaaccagtaatatattctaagactgttgtaaagaaacaggctaagaagaataaggcgaaaatattatttttgtagttatcaagaaagactacaagaaataagacaccgaatccatatataggacaaaagggaccatataaaaatcctctattaacaaacctacgttcatttttaaaataatacaagacttcgaggcaccagccagcaaatgaatagaatacaaaaaaatatattaaattataaaaattaaaatttaatactgtacgcaaatgtatactaacctcctagtaaaatataagtattaataatttattccattatatatcaaaacatagctaaagaaatattaattttacattaaaaatttcttatcactatgtataagtcttaaatacaaataaatattatattgagattagcagcgatagaattagcgtttaagtcgtttttattttaacaaatataatattaatatttattatgctgcattatactctagatctttcttgaacgaaaaaagagatagaatatagactagcaattccaactaaacaataaattattgtagataacattgaaaaacttccaaaaaggaaatctactaagttaaatctaaaaaaacctattaagccccaattaatgccgcctataattataagggcaagtgaaattgaatttaaaattttcataaaaaacacactccttattataagatacctttagtatgcatataaaaatgtgtttttattctattttttataattattctaatgatatgtttctgtctataggttgagatagagaaataaatgtgtcagttctttggactccatcaatgttatttatcttgttaagtaaaacattctgtaaatctaaaatattagcacatacaactttagcaaacatagaataatcaccagtagttaaatgcaattcaactacttcctttatgtttgacatttggtcaaatacatagttaaaagaagatgttttatcaacatagatacctacaaaacaacatacatcgtatcctagtttaggtagatttaatattattctagaaccctttattattcctagatcctccatttttttcattcttacatggatagtaccaccacttacatggcatattctagcgatttctaagtaaggagttctacaatcttttattaacaagtcaagtatttgtaaatctaattcatctaaatgattatttgaaattaaattcattatatcacctcatatcttttatatcatatactttttttattttatcaaatatgcgcgaataattaaagataaaactataaatttgttaaaaaaaaattataatattgatattttaataaaatttattactttttgattataatgtatactgatgaaatcaacaccaattaaaaggaatgcttgctaatagtttatatataaattatcatataaccatatagacttttttataggaggatatgtgagtagatgaatctttttacatcaattattttatttgtaataatgcttcttgttatatttgtagcttatgcactatgcaaaaaatttatatttggtaaagtgcgtataaataagtggatacctttagcaatagcagcagtgttatttgcagcccaaatattcgtaggtcaatcaaatacttatatttcaagtggattatctatttttgcagttctatttttcttatggttcatggatattacacaaagaggcggacttaagaaaaaagaaaagcaaatagtgattaagccaaaagctaaaccaaatagagttaaaaaaaataaatagaaacatagaaaagaaatagaatgtatgattaataacaatgtaaatgttttgaaattatatattctatttctttttatatgaattatttttttagaaatatatatacgttgcaaaaaaaatcttcatcataattctaaaaacagtgcaagaattttggccgtaattgcgaattgtgcattgagaattgcaacatatatatttaagtatataaaaaatattattcttgacctctaaaaatgggagagctaatagcgattttgttattgtccagtgttatctttattacataccacgcctcagtttttaggggctcgtgagaatacaagtattttactttatttaaattcaagttagatactttttttattatagtcccacctgtagatattatatcaatttctaatattttgtgattaggatcatgagcaaaaattgaaaattgtaaattatcatcttccataggtattatatcgcccatgaattcattatttattgtaaagtacatagttaaagttctagattctgttgaataagtgcgtcgttttctaaaagcatcgactagagactgagttgtaagttcttctgcaattatacatgttaaattttcatcgtcaccaaagtttaatctatgattatcctgaccattgattgcacctagtttccagtttttatcgagtaaatggtaataatatttttcatatcttaaatacttgtttggataagatccatttccaacttctattgaagttattagtttatttaaaatagagttgtattctaaatatgttattgttttgtgaggatggttaattgaaataaatgcattaggattattaagcatccataaaactagtaattgcatattatttactgttccagtaaagaacctgtttggatttactacattaatgtctccaaatggattagttttgctttcaaaaccaaccacagctaaaaagttttcatgttttttattataacgagcggttaaatattttagcgcatcccatctgcttagctcagagctttttacttttattgtctttgttaaatgattattatggtctgttaagataaggaagttaaggccattatgtcgtgcataatcaaatgcttcaattggagttccatgtccagtggaaaaattgcaatgagcatgaggaattccatagtaaaaattcagatcatctatattaagcttatttttaggtgatttttttttgcccaaagttattacctctaaaaattatttatagtatatattattaaataagttattaaaataatgacaataacataaaagtaatgataaaataactttagtatttgatgaggtggtaattattgataaaaagttttaaagataaagaaccaaatttagaaggcgaattatatatttcagaaacagcagtgataattggtgatgtaactattaagaagaatgcaaatatatggtttggtgctgttataagaggtgatgaagcatcaataactataggagaaaatacaaacatccaagaaaattgtgtggtacatgttgattatggatataatgcagttataggagattgttgtactatagggcatggcgcaataatccatggatgcaccattaaaaataatgttttagtaggcatgggatcaataatattaaatggagcaaaaataggcaataatacaattataggagcaggaagtttaataactcaaaataaagaatttgaagatggcgttttgatacttggaaatccagcaaaagtgatacgaaagttaacacaagaagaaattgaaggaattaagaaatcatatataagttatctggaattgagtaaagatttcaagtaatttagatttaacatgttttgtataaagaaaagatacaagttattatcagattgtgtagtaataaatttacattcaaggttctagtaatgttagtacccaattgatgatagcaatgtataaagttaatttcaatatatagaagactcaagaaaagtaataaagaaggtaacatcgattaaggtgttatgactaatggaggaaattaaaaatgatatcagtagggcaatatagtaaattaaaagtaagtaagaaagtagattttggatattatcttgaagataattttggtgatgaggtcttacttccaaacagtgcggcaaaaggacatgaaataaaagaaggcgaccaattagaagtattcatttatagagattcaaaggataggatgatttcaactctaaaaaaaccattattaacagttggagagattggttatctagaagttgtaagccagaataacattggggcatttgtaaactttgggcttgaaagagacttattcgtcccattaaaagagcaaagttacaagcttaaagaaggaaaaaaatatctattttatatgtatgtagataaaactgatagattagcggcaactactagaatacactcttatttagatatagcagaagaaggtaaatataaagtttctgatgaagtaaatgctatagtttatgaaataaatgagaatgcgaccttaaatgttgcaatagatggtgaatatagaggattaatactagctaatgaacattttgagtacatatatcctggacaagaaataaagggaagagttaagagaatttatgaagatggaactattggagttacaacaagaaagaaaaggttagaagcaagaagtgaattaagtgaaacaatacttaattatttaaaagcaaatggtggatttatgccttataatgataaatcatcgcctgaagatataaaaagagaatttaatacaagcaaaaattatttcaaaatgactttaggcggattaatgagagaaaaactaattacacaggataaagagggaactagacttttataagtgacaaattaaaagtgacaagtgaaaatttataaattaaaagtgataagttttatgttaacttatcactttttcacatggcttattgtacatcgtttgatattcttgttctgaataataaatttttaagagctttccagttaaatggtattaaaggataaaaatatttatcaccagctattgttttcgtacttcccataactactagaatgaatataataccacctaaaaagccccagaaaccaaagaagccacaaagtacaagtaaaatcattcttgcaaattttaaagcaaaattcatttctatgctaggttgagtaaagtcccctatggtaacaatggacatatataatatagactgaggaataaaccagcctgtttttacagcataatcaccaaggattaaaccaccaatcagagacattgcacttccaagtgggcttggtgtatttaaaccggccagttttaatatatcaacagcaaattctaaaagcataaattgtccgagcagaggtaaagcaaattcttcttgcggtttcaagaagtcaaaataactcggtataaaaatattaccatttacaatcatcaaatagactggagttaataatatggtcgctaacattacgaaattcctaacaagtcttaagtaatttccagtgaatagtgggaagtaataatcatttacatcttgtaaaaaatcaagaattccagttggaagaattattacgtttggagaattatccacaataataactattttaccttcaactatatgtgcagctgccacatcgggtctttctgtaaatcttacctttggaaaaggattaagccaattttttgtacacattacatcaactaagctttggtcagaaagcgttaaggcttttatatttacttttgatatgctatcaacgattaaattaagagcttttttatttgctactccatctatatatgcaatacatacatctgtttttgagacatcaccaacttggtgtatatcaaaaactagtcttggatctcttattcttcttctaatgaaaccagcattgaatactaatttttcaatgaagccgtctcttccgcctcttaaagttttttccttttcaggttttgatgaatctgagccaggataagtacgcaagtctaatagaataaatgaatcataaccatcaatatacattattgtttggccagataataatgcgattaaaattttgtctaaatcagtttcagttttaacagatacgtgggaaactttattattgataaagtcatcaattgttttgtatgaattcattgtttcaggtgttatcttaaagaaagattttaatatttcctccatgatagcatctttaataaaaccattcaaaaaatataaaacagagcttcttcccccaacaacaaattttcgttcaacgatatcgaaacttttatctacaactaaatttgaatgaattaagtcaatatttgcttggtaattgtttgcaacattcaattattttaccttctctctctatttaaatatacatatctagtatgttacagataagaaatagtattcatgtttatcaaatatataagttgataattctttatagcatttttagatggagaagctttttgtatgctatttcacttttataggtgatgtactttttataaataggaaaagtttcttaggggacagcgcacttttttgtgcgtaaagtttttaactgtacttgataagctcgcaattgtggttcacgctttttttagatatgaaatgatattggttgaactttgtgcttttttagaggtgaaatgatcataattgtgcctcggcactttgagtactttttataaatgcgtaaagatcatgattgtacttgataagttcctaattgtgcttcgcgcgcgctttaatttttaaatgatcctaattgcacttcatgctctttttaaccgtgaaatgatcttaattgcacttcgtgctctctttaactgtgcgtacttttttttaggtaaaaagatcttaatgtgctatggcactttttcaaatgtgtaaagatcttaatgtgctgtcgcactttttttaaaggtgcatattttaatagtatcaatactattagaaggtgaaatgaatgtgcggaattgctggattagtaaattttaaaaagaatatagtacaagataaagatatattaaataatatgataaagactttggagaagaggggacctgatgcaaaaggatattatatatctccaaatgttttattaggccatagaaggcttatagttgtagatccagaaggtggattgcaacctatgactaaaatatttgagggtaaaaaatacacattagtttataatggtgagctatataatactgaggatttaagaaaagaattaaaggctaaaggatttacttttgattcttattcagatactgaagtattgcttacatcgtatatttgttgggggaaggactgcgtcaataagcttataggtatatttgcatttggagtttttgatgaagataaaagagaagtttttttagctagagatcaaatgggggttaagccattattctacactgttcatgataatacccttgtttttggttctgagataaaaactcttttagcagatccaagagttaaaagagaaattgatatggaaggattaactgaaatatttggacttggacctgcgacaataccaggaagcggagtatttaagaatataaaagaaattgcaccagccaactgtttattagtttcaggtgatggaaatattaaaaagtgggaatattggacagttgaagcaaaagaatttcatgaaacagcagaagaagcaatagttcatgcgagagaattattaatagatgcagtaaagagacaattagttggagatgtgcctgtttgtacattcctatcaggagggctagattcttcaattatatcagcaatagctgctgaggaatttagaaaacagggaaagaagcttactacttatgctattaattatgaagataatgaaaagtattttaaagcatcattatttcaaccgacatcagatgaatactggtcagaagaaatggcaaaatttataaatagtgatcatagaaaagtagttttgaatcattcagatttagcagctgcattaagagatgctgtaatatcaagagacttaccaggtatggcagatattgattcgtcgatgcttctattttgtaaagaaattcgtaaagactttgtagttggacttacaggagagtgtgctgatgaaatctttgggggatatccttggtttacaagggatgaaatgttctatttagatacattcccatggtcaaggtttgttaatgatagaaaggctatagttaataagaaattaaaaaatatgccgctagaggaattggttagaactcaatatgaaaaatctctaagtaaagtacctcatattgatggggagagtaagagagattataggatgagggaagtgtcatatctaaatctaaaatggttcatggttcagcttcttacaagaaaagataggactagtatgtataatggcctagaagcaagggttccatttgcagatattagattggttgactatgcgtttaacttaccagcggatgtaaaattatataaaggcagagaaaaaggattattaagagcagcctttgaaggaatattgccaaatgatattatatatagaaagaagagtccatatcctaagacacataatccagtttatacagatattgtatgtaagatgataactgagattttggataaaaaatcttcgccaattcatgaaattattgatgaaaaagtagttcgagagataatactcacaaaaggagaatcatataaagctccatggtatgggcagctaatgactggaccacaattacttgctttcttaattcaagtaaatatttggcttgaagaatataatgttaatttactaatttaattttcaattcacagttcacaatgcacaattatggggaaaactcctttggagttttaaaaatatatatctaaaaatttaatccttaattgtgcattgtaaattgtgcattaaaaaaagttctgccttccagcagaactttttcttatatatatttaaattttacagatatttctttaatttcaccttttgaattttttctaattgaaaattgttttatgtctttaaaatcattttctaattggtaagttagttctgtaatagtagctttagctttcttagttaacccaccatcttcaataatttcaaatcttgattttctgcaagttgtttcatcatttttatcatcaataattacataatattcaggtgcttcttctatgaccacatattctttatttaaagttaaagttgaacaaagatcattatctatacattttattatcattttaatacctcctaaatcccttttatatgatagattgtactatagatattgtcttgtttcaactataattagaaagataaaaaaagtttgtcaatattcataaaaaatgagcattaaaatattgtaataaatgtaatattttaattaccgaatacctatctatgatatttaattaacttaaatatttcattaagtaaaaatggtattaaagagatacatattactagaagccaatctcgggcacttaaaataaatacattaaatacatcagcgaagaatggaattataattattaaaaattgaatgcatataccaagtaaaattgataataacaaatacttgtttgtgaatactccaagctttaaaagtgatttttctctgcttcgcattgagagtgaaaaaaataattgggagaaacttaaaaccacaaaagctaaagtttgagcgtgaactaaggagctcatatataatctttcaccaagaagaaaagcagccaatgtcacaccaccaattagcacgccatttaagcctaagaataaacccatgtgttctgcaaaaagtgattcttttggatttctaggtggatgctccattacgcttgaatcctttggatctataccaagagaaagagcaggaaaactatctgttattaaattcacccataaaatatgaattggtaataatggtggatcaaaatttaatagaatagctacaaacaaagaaactatttcacccaagttacaggataataagaatattatagcttttcttatatttgcataaatatttcttccttcctctacagcttttactattgtagtaaagttgtcgtcagttaaaatcatatcagcagcacctttagcgacatcagtccccgttatacccatagcaacacctatatcagcagcctttaaagatggggcatcgttaacaccatcgcctgtcatagatacaatgttcccatggaatttaaatgcttttacaatcttaaccttattttctggagaaactctagcaaatactttataattgttaactattttattaaattcttcatcgctatagctatcaatttcggcaccagtcatgcactcatttatattatttgcaattccaagttcgcttgcaatcgcaaaagcagtgtttttatgatctccagttatcataataggagttattccagcttgtttgcataaagcaattgatggcttaacttcttctctaggaggatctatcattcccattaatcctacaaaaattaaatctttttcaagggaatctatgctgacgctttcatcctttatgtctttatagcttaaaccgaggacccgtaaggcttcgtcagacattaaattagatatctttaatatttcatcctttttttcttgtgtaaaatcaattatttctccatttaataagattttatttgaaagtttgagtaaattatcaatagctccttttgtgaagactttaaaatgtgaatcgtatttatttactgtagtcatgagctttctatcagagtcaaaaggaatttcatcaactcttgagtgatctgtgcttaaatcttctttatataagtcatacttgattccagcatcaagcaaagcaatttcagtaggatcccctgttttactaccatcttttgaagtagcatcattgcataaaatcattccctcaaacaacaatttggtatcattatcacctagatcgcaattatcaatagatacaagtttattatttatacagcatttttttattgtcattacatttaaagttaaggttccagttttgtcagagcatatgatattaacagatcctaaagtttcaacggctggaagtttttttactatagaattttgttttatcattcgctgtacacccattgctagtactattgcaacaattgctggaaggccctcaggaattgcagcaacagctaagcttatagctgtcaaaagcatttcgaaccaatctcgtccttgaaacatcgatatgacaaagatcaatatacaaatacctacagctccaaagcctaaagtttttccaagagatgcaagtcttcgttgcaagggggtagtattatcctcttctttatttagcatatcagctatttttcctatttgtgtattcattccagtatttacaacaacaccagttccgcgtccgtaagtcactagagtggacatgaatgccatgtttatcatatcacctataggaatgttgctatttgtaagtgtgacattactatctttctcagcagggacagattcaccagtaaatgctgattcatctatttttaaattggcactttcaattaatcgtaaatcagcagggagataccttccagcatctagtataataatgtcgcctacaacaacctcttcagaaggtatttcttttataataccatctctcttaactatggcttttggagtagatagtttttttaatgcttcgagcgatttttctgccttagattcttgaaaaacccctattaaagcatttattaaaattacaagcagtatgacgattgtatcactatattcgtgcataaatgcagaaataattgctgcaactaaaagtatataaatcataacatcgtttatttgggataagaatagctgccaaaggctctttttcctttgagaagctaatttgttttctccatatttctcaaggcgctcttttgcctctgattcagaaaggccaacatcaggattgacatttaatttttgtaaaatttcttgggaaggtgtgtcaaaccacatggataacatcactccattcataatttaatatatacatatatatattaaagatttaatgaatttatatacatgggaaaaaatgaaatatacatatcaaaatcaaatattaagtagagaaagtaactagattttgatataattaattaaatatatatattgcaaaaataattcttcatcataattctaaaaatattgcaagaattttggctataattgtgaattgcagcatatatacatatagaaagtaattagttatatttagagttttaaacttttagataaacttcatttttgagttaggaaaggattgaatatacatggagattggtagagtgcgaagagggactgtaacttccgagagaaaaattatttctgaaaaaaaagatttttctcaaagttttagtcaggaaaggcataaaaagtcagaagaacagctcaaaaaaatgatagatgacataaaaaaaaggggtaacagactagtaactactaagacttatgttgatgtagttatgtacaagaagatgataaaagaatatctagaatcaatactaaagttcatgtatgagactaaaaaagatattagcttttggcagactcagtatttcgtaacggttgatactgttgatgggaaacttgaagaattaacaaaagcactcctttctgatgaaaaagataatataaatatagcgtcaacaattgatgaaattcaagggatgattgttgatatatatagataataaatgatatacgtgttgcaataacatattcacatttacaaggctattaagttgagtgttcaatcaagataggaatgtggaaatctaatttcagtaagtatataaatgtatattttttataaatagaaatatattagaacatgtttaataattattctacatgttcttttgtcgtttttaatctttattgaaattatatatggataccctaattaagacctgaacttatgcatatgtctcgccgaaataaggattatgctattgttccagtttctaagggaattatgatggatgattctaagatcacaagttgcacccaagatgctagcctcaaaggcgagctttgaactagcatcttggaacaacttttaatctaagaatcaaaaccatcaaattcctaatgaaacatttcatattatgacccttgtggttacaaaagcataattcttatttctagttgagatatatttcatagtatcaatctaacttataatcggggcatctatatagatatccaatcaaaaattggagttattagatgaacatatttacaaggttgctagaactttaagttcatatattcaccagaaatcataaatatatttgtggagaaaacatttgaaaatgagctgctaagattcttagttgtagattgttccactttagcttgtcacactgaaagtgggagcatgccaaagtggtgaaatctgcggcttagaattttcagcgatattttcatagcttttcggaacaaaatatttatgatttcggcaagttatcacataaatatagttttaaagttgaatatccatacagatttggtatttcaattttaatatgttattataattaatagtgaatatcaattaattaatattactattaagtattttgctttaatgcttaattcagatattaatattttttagggggaattaaaatgaaaaaaaaggtatcattatttttaatcatgatattgtgtgtttttacatttgcaggttgtgacagtagctcaaatcaaagcaaatctgaagataataagaaatcaacaaaagatattagctttgtaacaccagatgggcttacagctatagcagtagctaaacttataaaagaaaaaccggaaattaaatctggatacaatgttaattatactattgagcaaaactctgacagtttagttacaagcgttatgaagagtgagccagatattgcaattgtaccttcaaacgtagcagcaactgtgtttaacaagaataaggaatataaaatagcaggaacagttggatttggatcattttatataggaacaactaatcagaatcaaagtgttgaagatttaaaaggaaaagaagtttacaatattggaaagggattaacacctgacataattgcaaaaacaatacttaaagaaaaaggtattgatgtagataaagaaattaactttagttatgtgaatacagtaaatgaacttgcaccaataattttatctggaaaatcagaatatgcagtaattccagaaccagcgttatcaactgttcaaagtaaaaatgataagtttaatgtaatgctaaatttaaatgaagaatggaaaaaattaaatgattctcaatatggatatcctcaatcaacaattatagttaagaaggaattgttagaaaatgataaagaatttgtttcagaacttttaaagcaagttaaagattcagaagagtggatatataataataaagaaactactggagattattgcgaagaaataggagtttcagcaaagaagccaatagtagtgaaagctattgataggtcaaatataaaatatgtaggaataaaggattgttataaagaatatgaaacttattttaaaaaattaaatgaatttgatccaaaaacaatagggggaagtataccagatgatgaaatattcatggaaaagtagattctatactttgttatcatgtatatttttcatagggatatggcagctaattgcattaataataaataatgacatatatgtcccgagattagaacaagtgttagaagctattaagaatatttttagtaataaagattcgttaaagatcattttcagcagtttttacaggactatgactagttatgtattagctttgattttttcaatgattttaggggtgctcgcaatagtgtatccatttttcaagtatttaatggaacctgtaaattcatttagtaagacaattccaaccatggtgttagtagttctttcattagtatggtttgataaggatagtacaccatttgttgcgggatttgctatcatttttccaatcctttatgaaggtatacgaaataaccttttgcaaatagataaaaaaataatcgatatgacgaagatatatgaagtgagtctaaaaaacaagatcaaaaagatctatattccaactatgaaattttatttcatgagcatctttgtatcaacattttcattgacttttaaagttgtaattgcaggagaagtatacggtcagccaaagtttgggataggatcacagatacaggtagaaaaagttaattttaatactccagggatttttgcatggattgtaattattgtcattgtatctctagttttagagtttctaaataagttgttaaggaagagaacatataggtggtccaaatgaatataagtattaaaaatctaaataagtcatatggaactgagaaaatttttgaaaatttcaacatagatttttacgacgataagataaattgtataataggaaaatctgggtgtggaaagagtactctattagacattatagcaggtctaatagatgttcaaagtggagacataagcggcgtttcattaagtgatataagctatatattccaggaagataggttaattgagtggcttactgttaaagaaaacttggaaattgcattaaaaaggtatttcaaggattctgatttagagaatagaattgatgaagtattaaatttagttggaatttatgatacaaaaaacaaatatccaaatgcacttagcggaggaatgagacaaagagttaatatagcaagagcatttggaaagccatcaaaggtcattttaatggatgagccttttaaatctttagattataagttgaaatatgtcataattgatgaatttaaaaatttattagacaaagaaaaaagaatggttatattggttactcatgatctagatgaagctatatatttccgagggaatataatagtatttaacaatagaccagttaaaatagcaggaacattcagtgataatttagataaatgtaaggaagaaattttaaatataatataaaagttatatagtagggatgcactactagtacacatttctaattatatatacaaattttgcttccaactaaaacgaataagaaacttgctattacaaaactggaaatacccaaaaattttttatttgcatttaataaattaatgccaagcaatgtatcacaaagacccaagcaaataaagattaatggaaaaaaataatctggatcagatttacttgctatgatatttaatgagaataaaggcaatagaattgctaagcagaagcttacaaaataaaatagctttttcataaaagttattcaccaccttacaattggaaaattatgtattatattaaagtatatacaagccatatgaattttattcattagaggaaggagattataaatgataagaaaatttatttcattttataagccgtataaattattatttattttagatttagtagtagcacttatcgcatctttatgcgatttagtatatccagttatgacaagggatcttgtgaatgaatcgattcctaataaagatttaaggacaattattgtatttgccatagcattacttataatttttggaatcaaggctgcatgtggttacttcatgcagtattgggggcatgttgtaggtgttagaatgcagggggatatgagaagacatatatttaagcatcttcaaaaattacctaatagtttttttgataataataaaacaggtgatataatgtctagaattattaatgacttaatggatatttcagagcttgctcatcatgggccagaagatttatttatatcaatagttatgcttataggttcatttataatattgtgtacaatcaatatacctcttacagttttaatatttgcattcataccatttatagtatggtttactttatatgagagaaagaagatgaataaagcgtttcttgaaactaaagtagaaacaggagcagtcaatgcaaatcttgaaaatagtatttcaggaataaaaatatcaaaagcatttgtaagccatgaagctgaagaagaaaaatttgaaaaaggaaataaaaagttcattaatgccagagaaagagcatacaaagtaatggcggaatattcttccggtgcaggatttggaatggacgtgctaagttacgtaggtttaataggaggaggaatatttacacttattggacttataaacattggggattttatggcatatatgctgtttataaaaatctttatgactccaataaagaaacttattgattttatggagcaatttcaaaatggaattacaggtttccaaagatatatagaaataatgagtcaagataaagaaaaagataaagcaaatgcaactgaacttgaaaatgttcaaggggaaatagaatttaaagatgttaattttagctatgaaggtaaagaagttttaaaaaatatttctatcaaaataaataaaggaaagatgttagcattagtaggagcttctggtggaggtaaaacaacattttgtaatcttatcccaagattttatgaagtcgatagtggagatattttaatagataataagagcatttatgatgtcaaattagattctcttagagaaaatattggaatagttcaacaagaagttttcttatttacaggaacaataagagataatatactgtttggaaagacagatgcaactgaagaagaattactaagagctgctaagatggctaatattcatgaatttataaatacattacctgaaggatatgatacttacattggtgaaagaggtgttaaattatctggtgggcaaaagcagcgtatttccattgccagagtttttcttaaaaatcctccgatattgattttggatgaggcaacatcagcattagataatgcaacagaacgcataattcaagaatccctagaaaagttatgtgcaggaaggacaaccatagtagttgcacatagattgtctacaattaagaacgcagatgaaattattgtacttggaaaaacaggtataatagaagcaggaacccatgaagaattaatggaaaaacaaggagagtatagtaatttacatagactagcagcagtgtaaactttagataaaagaaggttgccaaaaaccatatgttttggcaacctcttattgtatttaagaataccacaagtttgacttgtggttccggaaagcttttagctataagtagaaaaaaataaacctccgttgtaaaattatagtaggtttgccgaccacaactataaagtacaaggaggtgtgtccgttaatggacattgatagtttagcacatagtaagtggaattgtaaatatcacatagtttttgcacccaaatttaggagacaagttatatatgggcagataaaagctgatataggaagaatacttagattattatgtgaaagaaagggagtagagattatagaagctaatgcatgtccagatcacatacatatgcttgtaagtataccgcctaaattaagcgtagcgcaatttatgggatatctgaagggcaagagttctttgatgatttttgataaacatgcaaacatgaaatataagtatggcaataggcaattttggtgtaaaggatattatgttgatacagtaggaagaaataagaaagtaatagaagagtatataaaaaatcaaatacaggaagatatagcttatgaacaaatgagtttgaaggaatatatcgacccgtttacgggtgagccggtaaataaaggcaagaaataaagcaccttttaggtgcagccggaaaaggttttgcggtcggcagaccatttcaacgtgcgagtagcacggccagtaacaaagccttacaggcgcagagcaagccacccgttttcacgggtggtcatgactagttattagattcattttttaatgaatttagtaattgaacttttttatatatagtagatacatccacctcaacatccatagcttgagcaagtttgttatgcaattcagtttgagcgggattcttatcgctagtttcagaatcttttattttattattgaattttgcctgaaccaacctagagttttcttcacttttcaatcttgccatattttctaattcattggaaaaagacgcttggctgtcatttgatgatgattgtgaagctgatgaatgcaaagtattatcaaaagatttagcattgttttgttttttattggaaggatttctagggttagtatacggcctctttattattttattatcaatagcagcaccagatacactagccacaatatattcacttctagaaattattctgttatcactcatataatatcccctccctaaaattataaattcggcttcaatattagtatcaatatattacttatatattcgtatatctactagaaaagtttactaaatattctataatataatgtatatttatttgattaatataatataacgaaagagtaaaatatatgcgggaataacaagtttatgttcagtattatgaacttaaagaataaaaggttcaatctcaattgacagatatgatatatatatgtgaattatatgatttattctttataaagttatttagtttaaattaactgatagtttaagataaagtttaatcaattaaaccttttagaagatttatagataacacaattattgcttacttatactttgaaatatatctaaactagaaagcagaaacatttttatctagcaggcatttgaaaatgagctattaaaagatcttaattgtaggttgttcaactaatgcttgtcacaataaaattgggagcaagcattagtggtgcaacctgcaatttagaactttcagcgaaattttcatagtcctgtgaaataacaatgtttctactttcggtggattagtgcataagtctaagttatatattgtttatctatagggagttattttaataaaatggaacttaattagagtataaaaaactagtatgaacttattttgggctaagttcatactagttttttaactttattttataaatattattctacttcgtatatccagccttctggagcttcaacatcaccaagttgaattcctaaaagtaagtcatataatttttgtgttataggaccaacttcagtttcgctaaagaatacatgtaatttatcgttgtgttgaattccaccaataggagttattactgcagcagtaccgcaagcaccagcttctttaaattgatctatttcatcaataaatacttctctttcataaacaggcatctttaaataatgttcagcaatgtaaagaagagatctttttgttatactaggtaaaatagatggtgatttaggagtaacaaattcatcatttttagttattccaaagaagtttgcagcacctatttcttctatttttgtgtgagtagctggatctagataaatacaatcagcaaatcctttttttacagcttcagcatgagcttgtaatgaagctgcatagttaccaccaactttatttccgccagtaccatgaggagcggctctatcaaagtcatctaaaactatataattgcaaggagatacgccatctttaaaataaggtcctactggtatacaaaatacaccgaaaatatattcaggagcaggtttaacgccaatattgttaccaactcccattaaatatggtctaatatatagagttgcaccacttccataaggtggtacatatttttcatttgcttttacaacttgtttaactgcatcgataaatttttcttttggaatatgtggcataagaagtttgtcacagctttcattcatacgatctgcatttaagtcaggtctaaataattgaattttaccttcttttgttgtatatgccttgagcccttcaaaacaactttggccataatgaataactgtagaagcttcacttatactaagcatattgtcttcaacaagttttccttcatcccattttccatctttccaaactgaaatataacgaagatctgtttttatgtaatcaaatcctaatttaccccagtctatatcagcttttttccccatttttatattcctccaaatctataaggcttattgccattgtttattattgttatttaataacatctattttagcactatccaaaaaaaaattccacacatttgaaaaaaagtacgcacctataaaaagagcacgaagtgcaatcaagaaactttcacatctaaaaaatgtgcgaagcgcaatcaagaacttttcacatttgaaaaaatgtccacgtcaaaaaaaccttaattaatctagtgatagattaattaaggtttttcatgaaatcatatatattttcatagtttttcggaacaaaaatatatatgatttcagctagctattcccaagctttagcatctgatggcatacgccagtcacctctaggacttaaagaaatacttccgactttaggtccatcaggaagagcacttcttttaaattgttgagtaaagaatctaaaaataaatttatcaagccatttttgtatttcctcatcagagtaatcatctttaaaagcagccttagctaaaaagaatattctctctttagttgagccatgtttaataaagtgatataagaagaaatcatgaagttcataaggacctacaatatcttcagttttttgagctatttcaccgttagcatctttaggtaataattctgggcttacaggtgtatctaatatatccataagaatatcacgtacaacttcagtagattcatgttgagctacatattgaaccaaatatcttacaagagtttttggaatagatggattcacagaatacattgacatatgatctccattatatgtacaccagccaagagcaagctctgataaatcaccagtacctattaagagtcctctttctttattagcaatatccattaaaatttgagttctttctcttgcttgaacattttcataagttacatcatgaatgtctttatcatgaccaatatcttcaaaatgttgaagagatgctttaactatatttatttctctaaggtctgtacctaattccttacataaattaatagcattattgtaagttctatcagtagtgccgaagccaggcatagtaatggttactatattcttttatcaataccaagtaattcaaaagtctttactattacaagtaatgctagcgtggaatccaaacctccagaaattccaactactgcttttttagagcctgtatgttctaatctctttgctaagccagcagcttgaatattaaatatttctttgcagcgaatttctctttctttttcataagaaggtacgaatggatgtttatctacaaatctatcaaatgtacttattgaaacatcactaaattcaaatttaattgtgttaggattcttattgataaacttagatgaatctctaaaactcaaatttttcattctttcagactttaatttgaatacatcaactatggaatagattacttcattttctctttgaaatctgtcattttcttttaataatgaaccattttcacttattaataaatgcccactaaataatacatctgtagtggattcatgaacaccagcagaagaatatatatagctgcagattgacctagcactttgatttgatattaggctttttctataatccattttgctaacaagctcatttgatgcagaaagatttcctattatatgagcgcccataagagaaaggtaagaacttggtgggattgttacccataagtcttcacaaatttcaactccaaagtttgcgatgcttgatgaaaaaattaagtttactccaaaaggaacatctttttggaatggtaaatccactctttcatcctcaactgaaagaccttcagtgaaccatcttttttcatagaattcactgtaatttggaagatatgacttaggaactattcctaaaacacttcccttaaatagtagaaaagcacaattgtataaagtacttccacagagaagaggtgcacctacagcaattaaagtatcatggtctttagtagattctaatatttcaaaaattccatctaaagctttgcttagtaagtattcttgtaaaaacaaatccccacaagtataagctgttaagcaaagttctgggaaaactatgaatttactttcattttttgctgcatcatctatgcactgtaaaatatttttaacattataatcaacatctgcaactctagttttagggcaagcagctgcgacttttataaaatccatttaatcactccttgcaattataaaatttaagtttttttattggtttataagatatagttctaatataattaaatacgttttaagtatattttgcttagtaaacataaacatatcctaataattatatactaacatgtttgtgaaatcaaaaaaagataaagggtataaaataactctttttaagttaataaatatcttgaaatattcataaatgtactgtataatataaaataagattacaaattcaagtatgtatgtaaaaattggacagtaaatcttagaactaatattataatgtttttaaggaggtaaattgtatgggggcagcagttttttggttagttatagctatatgcgtatttgcaatagatattttaactagtaatttttgttttacactattcgcagtaggtgctgtcgtagctgcagtgtgtggagtaatggaagtaccatttataactcaaataatagtattttctgtactgaatataatatcatttgcagttggatacccgttactcaagaaaaaatttaaagcagcaaacgaaagaataccacttatggaagaaacatatgtaggaaaaattatgataagcgaaaaagagattagagataaagcccaagttaaagttggtggagaatattggactgtaataaatgaaggcgatattattcacaaagggataagtttactatcaaaggaatagaaggtataaaattaaaaattgaaaaggttcaggaggactagattatgagtgttattataattttaggagttatcttactattaatattaatagtagttatatcatcaattaaggttgtaaatacagggtatttatatgttgtagaaagatttggacaatttcatagagtgttggaaccaggactacattttattgtgccatttgtagattttgttagaagaaaggtttccacaaaacaacaaattttagatgtggagccacaatcggttataactaaagataatgttaaaatattagtagacaatgttatattttataaggtattgaatgcaagagatgcggtttataatattgaaagttatcaatcaggtattgtatattcggctacaactaatatgagaaatatattaggtaatatgtcattagatgaaattttatcaggaagagattcaataaatcaagatctattaagcattattgatgaagttactgatgcttatggtataaaaatactttcggttgaaattaaaaatatagttccaccagctgaaatccaacaagcaatggaaaaacaaatgaaagctgaaagagataagagagctatgattcttcaagcagaaggtttgagacaatctcaaatagaaaaagcagaaggagaaaaacaagctaaaattttatcagcagaagcagaaaagcaagcaaatataagaagagcagaaggtttaaaagaatctcagttactagaagcagaaggtaaagcaaaggctatagaacaaatagcgattgcagaatctcaagctataagaaaagtaaatcaagctattattgagtcgggaacaaatgaaactgttatagcattaaagcaagttgaagcacttaaagaaatggctaacagtccagcaaataagcttatattaccaaatgagactttatcatctcttggaagtatagctgcaattggagaaatgctaaaaggatcaggaaagaaataataaattaaatacaattaaaagagagcaagataattgctctcttttaagtagtgaaccaaaatcttcgattttgtgtgaatcagttaagcagacatctcgaatctatgattcgatgattgtcgattactctgtgagtacccagtgaacgaatgtgagtcgagtttcctttaagtagagaaccaaaatctttaattgtgtttgagataccgtttttggtggaattattatattatataagtaagttagttaaatggaatttatcattatagaagggattgggtacaactttacatggattatagggataaaagaaaagagagaatattaaatagtcaaatgaaaaagttaataaaaagagaagaaaagttcttttataaaaaagaaaatgaatatataaaaaataagatattacctgtaaaagagcaattagaagaaaaaatcccgaaaaatatgatagaaacttttgagaaagcatttgaaaagggattttattatgtttttgaaaaaggcactacagtaatagagaaaagttataactcagagaaaattaaaaatgaagcagatatagatgagtatattttatccaagcagatgaataacaaaaatttaagcagaatagataaaagagtaaaaaaaggtgtgcttataaataaaggaatcacagcagccgaagggacattacttggtatattaggaattggaataccggatatacccgtgtttattggagtaatattaaaaactgtgtatgagatttgtgtgaattatggatttgattataagtccaaaagtgaaaaggcatttatattaaatataatttgtgcaagttctataaaaacagatgaaaaaattctatactcaaatgaagtggatagaattgcatatagtattgaaaataatcatgatcttaaggttgatataaatgaattaattgagtcagcttcaaaatgtttatctgaaaatatagttgtatcaaaagttattcaagggataccgatagtaggagtatatggtggaatatcaaattatagattattagctgatataagcgaagtggcaagtataaaatataaaaaaagattattatctaaattgaaaaatacgctttagcttattagatggacttgttggtttgagtgtgcctcaatttcattattgaaagattagcaaaaaaatattaatatagactatgtagtataaaacaaattgaggtgaagaaatgaaaaagaaaaatataatgagctttatacttttattaatactttctttttctttaattggttgtaatcttaaagatgattatatacttcaaacaaaagaagatacagatgaaaagccatctgcagataaggttaatgaagtttttgaatcagataagatgaaggaattaatggataaattaaagtctagccctaaggaaatttctgataaagttaatgaagttgatagtgatactacacgtgtaatgaaagaattaaatgataaagcagatgaattgacggatgagctcaataatgctgattttgaaggaaaaagtgaagatattaaaaataaatttgatgatatatctaataaattagatgaagttaaagataatgttgatgatgcgaaagatagagcagatacatttaaggatccaatcgataaaaagcaagtgacagatacagtggatgaatttacatcacatatgaataaccttgaaagagcaatcgatagaatagcaacaaccagataaaaatttatagttctaagtttttggcaggtataatgggctaatgcagctttcattatacctgttataatttagaatataaaaaacacttgattcttttgctttagtatgataaagtgataaatagaaagtgatgtagggggttattacatatgaaaataaatagtttaataaaaaaattaacagtagttgctatcatagctacattgggagtaagcttggttgcatgtggcgggaatgccaataaatcatcagaatcaaaggcaggaaaaagcgcattagataaggatgaattagtaataggcttagatgatacttttgttccaatgggatttaaaaatgagaacggggaaatagttggatttgatgttgatttagcaaatgcagtaggtaaaaaacttaacaaaaaggtgaaatttcaatcaattgattggagtatgaaagaaactgaacttaataacggtaatatagatttaatatggaatggatattcaattactgatgaaagaaaagaaaaagttgaattttcaaagccatatttaagtaatactcaagttatagtaacactagcagattctaatattaaatctaaaaatgatttagcaggtaaaaaagttggtgctcaaaatggatcaacagcagtagatgcagttgaagcagctaatggaattgaaaaaactttgatggtggaaaacttgttacatttgaagataataacgcagcattaatggatttagaagcaaagagattagatgcaattgttgtagatgaaattttagcaagatattatatgaaagcaagaggacaagaaaaatataaaatcttagatgagaattttggaagtgaacaatacggtgttggaattaaaaaaggtgatactaaatttgtagaagcttttaacaaagctttagatgaagtatttctgatggaactgcagcagaaatatcaaagaaatggttcgaacaagatataattcttaaataatgcaaattagataatcataaatatttatacaaatagtttgaaaataaagaggaggaaataactttgagttatattttagagataatgcctcaagtattagagggattacaagttacattagaaatttttgtacttactttagtattatctattccactaggataataatcgctgtaatgaggacatctaaatctctaatacttaaacaaataagtggaatatatattcttataatgagaggcactcctctgttattgcaaattattgtaatcttctttggtcttcctctagtaggaataagctttgatagatttccagcagcaattttagcgtttactttaaattatggagcttatttggagaaatatttagagctggtatagagtctatagataatggacaagttgaaggggctaaggttctaggcttaagttctaaacaaacattttttagaataatacttccacaagcatttaaaacagtaataccaccagttgcaaatgaaataacaactttagtgaaggatacttcgttagtttatgtagttgtatggacgagctattaaagataggtaagactgctgctaatagagatgtttcgttggtaccacttttaatagttggtgttgtttacttaatagtaatagcaatttcagtcaagtattaaagaaaattgaagagaagtatgactattataaatagtgtggaggagattatatgcttaaagtaagtaatttgaaaaaaagattcggaaatacagaagttttaaaaggtgttaatcttcatataaaaaaaggtgaaatattagttgtcgttggaaattcaggtggtggaaagacaacattacttagatgcgtaaatgaattggaacattgtgatgaaggcgatatagaagttaacggaaaagttttatgtaaaaatggtaagtatgtagataaaaatgcgttaaaagaaataagaaaagatataggattagtatttcaaaatttcaacttatttccgcatatgagcgttttagaaaatcttattgaagcaccacaaaaggtgttaggatggtcaaaagaagaagcaataaagaaagcggaagaaactttaggtttcttagatttgttaggaaagaaaaataactatccatttgaattatctggtggtcaaaaacaaagagttgctattggaagagcattagtgcttgaacctaaaataatgtgctttgatgagccaacttctgcactaatccaggactaactggcgaagttgccaatttaataaagcgtttaagcgaaaaaggaatgagtatgatgattataactcatgatatggattttgctaaaaaagtagcagatagaatagtatcaatggatgctggaaaattacaagaaggtctaatgtttgaagaagactagctgtattaggattgaggttgaattaaacctcaattttttaacaaattatttataagttaataaaagctttaatatattgtaaattgagaaggtttaaatttaacaatttaattgtaagaattagtgttgaaatatgtggcaaagtgtggtattctaagagtgtaagataattcaagatttaatcaatactgtacattcgcctctgttcagagattgggtctaggtatcaggttataatctttggaaaaagggaggatttttataatggaagatagaactttagtatgtaaagattgtggaaaggaatttgttttcacagttggagaacaagaattctacaaagaaaaaggatttgataacgatccagttagatgtcctgattgtagaagagctagaaagcaacaaagaaacaacagaaacttcgacagatagtaagttgttgagtcataagagaaatcttatgactctttattttgtatagagaatatacaatttaaattacacttgaagagatatgtgcgtaaaaactgcatatatgaaaagagtgcgaagcacaatgaataacttaactgcattgactgaaattttattctactctggcaattatatcattggatgatgcataaagaattattaaaagcataaaaacatatagattttattgctgagaatagaaaaataaatttttagacgtagataattataggatgaatagaaaacactataattatctgcgtcttttttgagcatatattatgttgaaattgatgttttacaccaataaaaatgtgcacaatttaagaaaaagaagaaaagccttataatacataaaaatatatgtcaaataaataaaatgcgaattatataagatgaaacaaatatataatcgtaaaaacataaattaaatgaaattttaacataaaataggttgacaacatacgtgttgaatgataatcttatggtatcgatacgaaagttagtggagtgttataagaaaacattcgccatgcgaaggcgtagtgagtaggtaaatgaagaaataacaggttcaatatgagagtatattgacgtggtgtttttgaatgcacctaggctaaatctcataatatttttggagaattaaaatgttaaatattagaagcgtattcgttgaaaagaaaaaaggatttaatgtagaagctcaaagtttactaaatgactttagagataacttgggagtaactggattagaagacgtgagacttgttaataaatatataatatcagatatacctgaagaatattataataaggctttacatacaattttttctgaagcaacagtagatgtagtttacgaatcagaattaccaatgaatgaaggagaaatagcttttggtgtagaatatttgccaggtcaatacgatcaaagagcagattcagcttcagaatgtctagctctattaacagcagaagacaaggtagaaataaatcagctaaagtagtagtattaaaaggaaacctttcaaaagatgacattgaaaaaattaagaaatattatataaacccagtcgattctaggaagtagatataaatagcaaagatttatcgtcactttcaaacatacctaaagatgtacaaatcttagatggatttaccagcaagacattggatcaattaaaagagtttcatagtggacaaggtttagctatgagtattgatgatcttctatgattcaagattatttaaagggagaaaagagatccaagtataactgaaataaagttatagatacatactggtcagatcactgtagacatacaacattctcaactatcttagaagatgtccaaattgaagataataaatatacagctccaataaaagcaagttatgaaggatatataaaatctagagcatacgtttatggcgagaaagaaaaaataaaactcttatggacatggctgtaattgctatgaaagaacttagaaaaagaggaaaacttgaagatttagatatttccgaagaaataatgcttgttcaattaatgtaaaaattgaaactgataaaggcatggaagattacttagtaatgttcaagaatgaaacacataaccatccaacagaaattgaaccttttggtggagcagcaacatgtcttggggactataagagatccactatcaggaagaacctatgtatatcaagcaatgagagtacaggagcagcagatccaacagttccagttgaagatacattagaaggaaaacttcctcaaagaaagataacacttggagcagctcatgatatagttcatatggaaatcaaattggtcttgcaacaggtcaagttgaagaagtatatcatccaaactatgcagctaagagaatggaagttggagcagttattgcagcagcacctaaggaaatgtggtaagagaagaacctgctttaggagatgtaattatttactaggtggaagaactggaagagatggtgttggaggagctacaggttcatctaaggaacacacagtagattcaataatgaatgtggagcagaagtacaaaaaggtatgcacctactgaaagaaagcttcaaagactatttagaaattctaaagtagcaaagatgattaagagatgtaatgactttggagcaggtggagtttcagttgcaattggagaactttgcagaggattagatatagatttggataagttccaaagaaatatgaaggtttagatgaacagaactgcggtttcagaatcacaagaaagaatggcagtagttgtaacaaaagaaaatgcagatgaattcataagactttctaatgaaaatttagaggctacgttgtagcacatgttactgatacagatagactgagattattctggagaggtaaaaaatagttgacttaaagagaactttcttagacacaaatggagcaactcaaaaaacaaatgttacagttaaagctccagttgattatccatatgtagtagcagatattgatgttaaagaagaatggataataacttaagaaaattaaatgtatcatctcaacaaggtttatcagaaaatttgatgcaacaataggtcacggaacagtgcttatgccatttgtggtaagtatgcaaaaactccagcagaaggaatggcagctaaaattccagttcttcatggtgaaagtgcagatgcaacattaatgacatttggatttaatccgagcttggtacttgagtccataccacatggatattatgcagtaattgaagtatatcaaaactgcagctatgggtggagactacagaaaagctagacttacattccaagagtatttgaaagattaggatcagaagctctagatgggggaaaccattgccagcatgctggtgcatatgaagctcaaatagcatttgaaacagcagcaatcggtggtaaggactcaattcaggaagctttgagatttagatgtacctccaacattagtatcattgctgtaggagtagaaaaagctagaaagataatatcaccagaatttaaagaagcaggatctagtttagttttacttcaaactgaaaactagaagatggaactataaatttagataagcttaagagaactagacgtactatataataatccaagatgaaaagtaatttcagcatctgctgttaagtatggtgagtttcagaaacagttactaaaatgacactggaatagaattggtgtagaaatgataacttaacaaggatgagttatttggatttaactatgaacatagtactagaagttaagaatgtgttaatgtaagaaggattcaaagattgtttatataaagaagttggtaagacaataagttcacagttataatttccaaggaatatgatttgaatttagatatagaagctttagaaaaacatacgaaaaaaattaaaatcgtatttaagataaaacaaaatgtagaaggaaagtagaaacagtttatatgataaaaaacaacactttcgcctaactaagtagctaagccaaaggttgtaattccagtattcccaggaaacaactgtgatatgactgtgctagagcatttgaaaagaagagcagaagttactcaagtagtattataaatattactaaggaagctcttaatgattcaattgaaagattgcaaaagaaataataagctcaaattcttatattccagagggtctcagcagggatgaacagatgttgggtaaattcattgccaatgctcttagaaatgaaaagataagcaattgtatggaattacttaaaatagagatgatagcacttggtattgttaacggcttccaagcgttaattaaattaggatagtaccatatggggaaatagttgatattaaagagaatggcaacattaacttacaataatataaatagacatatgtcttcaattataagtacaaggttgtttaaataaatcaccttggttagtgaagtaatgtaggagacataattcattgcaatctctcatggtgaaggaagatttgttgcaccagaaagcttaattaaagaataatcgctaatggtcaagtggcaactcaatatgttgatttgatggcaatggtatcattaaatatgccgttcaatccaaatggatcaatgtcggaatagaaggtataataagtccagatggaagagttttaggtaaatggctcatagcgaaagaataggaacagatttatatagaatatcccaggagactttgatcaaaagatctcaaagcaggagtgaattactttaagtaaataagtgagagtccaaatctacgatttgggtctcgacttagttaacgccctaaggtaacctctttaaaaatgatttggtgtaatcagttaagcagacatctcaaatctatgattgatgatggtcgcttactctgtgagtactcagcgagcatatgcgagtcgagtttcctttaaaaaagatttgttctttatgaaggttgattaagtaagtttctgggcgtcttattagctagaatgataaatgccagaatataagaatataagaatatagaataagaatataagatataagaatataagaatataaaaacttaaatggaaaatagtttatatttaaaaatttaaaaggtatatatgtaaaagttaaatttttaaatatgtataaagttaagtatataaatatttaaaaagataaatatgagatatgtaaatatttatagtataatgcgggttgcagtgattaaaggaaactcgactccacttcgttcgctgagtaattcgaatggcgaaatcaaagatttcgattctcacttatagtaataatgcgggctgcgggtatttataaggaaactcgactcatatgcgttcgctggagtaagttcgaagagcgaaatataaaatttcgattctcacttataatgcgggttgcagatacttaaaggaaatataaattaaaaaacaggaggcttaagatgcaagtagcaatattttttggaagtaaatcagacacagaggttatgagaggagcagcaaatgctttaaaggaatttggaatagaataaagcattcatactttcagctcatagataccagaaaaattagaagaaacattagaagaaattcaagctcaaggatgtcagtttattatagctggagcaggtcttgcagcacatttaccaggagttattgcatcaaagacaatacttcctgtaataggagttccagttaagcagcaatagaaggtcttgatgcattatattctatagtacaaatgccaaagtcaattccagttgcaactgttggtataaatacagctacaatgcaggaatgttagcagttcaaatgttatcagttaataatgatgaattaaaaaataaattaaaagaattcagattaaatatgaagaaaaaattcattgaggaaaatgcggaaggggtagaactataatggaaaattagaaatttatatgaaggaaagcaaagaaaatttacgcaacagataaggctgatgaagtaattgtatattacaaagacgatgctacagcattcaatggagaaaagaaaggccaaatcgaagataaaggtataatgaataatgctataacttcagtattatttgaaatattagaaaaagcaggagttaaaactcactttatagagaaactaaatgatagagaacaattatgcaaaaaggttgaaatagtaccacttgaagtaatagttgaaatgttgcagcaggtagcatggctaagagattaggtcttgaagaaggatttaaacttaagactactgtatttgaattatcatataaagatgattcactaggagacccattaataaatgattatcatgcagttggaattggtgcaactacttttgaagaattaaaagtaatctatgatatgacagcaaaaattaatgacactcttaaagctgtatttaaagaacaaaacataaacttaatcgactttaaagttgaatttggtagatgtgctgatggaacaatagttttagctgacgaaaatctcaccagatacttgcagattctgggatgcaacaacaggagaaaaattagataaagatagatttagaagagacttaggtaatgttaaagatgcttatgtt

SEQ ID NO: 3 - DNA, 34111 bp, Clostridium beijerinckii SIID27451-B11
tcattaggatattgagttgaaataataattccttgcttattaaataaacttatctgagaacttctcattgcttcaactggatatgagtctaaattcccagcttcatcagcaagccataaccttgcaagcttaccatccatattatcattagaatatgctaatgctacatattcagcttcatttagtttgcattttgtataatctctagtaactttaaaatgcttagaaagtaatggactacttaatattatttttttgatagccaattttacttctgaagataattttaaatcagggctacactaaaatatctatcgaatctactttctaacaacatttctaatataaatattattgcagcataaaaagtctttctgttttttcttgctatttctaataaactagtaatatataatttacttccatcttcatatcttgtacataacgatgcatatataaataattcagcataatcgtctaaaacatatattaagtggtatatgtaaatcaggatgaatcattaatccaagcaaattatatactctattatataaatttcgtcaaaataagattctgaatcatatccatgtactatatacaaccattcatcacactgtgattttacatactttcctactttcctattatttaaattaatacaccacttggcatacttatacgccttgctttctttaatattcattactcaccttttaatgcttttagcaaaggatcttctttttctttatttgataataaattaatatttgctattttagctctgctctgtggtgttaatgctaaattatcacaacatttagagaaaatatcaaaataaagcttcttactactcttaaaatctttattaaaaataagtgctggcttttcatttgctttttcatctaaatattgaagttttatcagctgcaatagaaaattgagttaataaaaaagaatctgcgttacttaatatttcactttcttttagcagactcctaacatattcaaatattttattttgatttttatttaatttttgtgaaggttcaatattatcatttttaccctttaatttttcttgaacttctttctattttcaatttcttcttttgtcctatggccaacacatagttcaattggttttgcttcactcattaaaatttttttctcctttctcccaagtttaaaactctcctgcgggaatttcgtgtgtaaaaaggtgggcatgtggtcatggagcttttgcttcccaaaactcaaaaagtagggggggactatattttcagatagttttcaaattttcctagtgttttatcaccttttgagtatgtttctatcattaatttcaataactcttgcaccctcgccttgtccttcttatataattcatgaattaaattatgattgtaatattctaaaggtattaagttatcataatcataagccaacgtttcatcatcaagtacttcaactatatgatgaactctatttgctgtaagtatttgaccatcaatatataaactccataagcatacatgattgtactcatctaatacttcagttcttaatttaatccatctaatatctctatatactttcttatcacctctctgattatccctattccatttaactttgttatgtggacaatgatgtggtttacttactattccacaatacttacatgtcatcttcatacatcaatcaccttcgaattgacttctttctctttaattttagtaagtttcttatcattagcaaccttgttaggatcttcctgcacttagctttatctctattgtttaaccagtacttttgtgctgctaagtcaggccctttgtatttcttaacactacttatctttacatcttctgatactgttttagttccatctggtgctgtaacttctgtcttaaccttcgtaggaacttcctcataatatttataaccaatacagtttttatatagtgcttgaacaacactttcatttttcttatctttaccttgagcaattgctctttttaggtcgccattttctgtcttatagcgcctaaaagtcgagtaactcatccctaatttttcggcaatttctttgtctgtcaaaccatccgaaacccatgattctataaggcttaagctactacttataatctcttcatttgacttcatttttccacctccaaaagtgagcacttactatgagatggtgtgctcattttttgatgtatttcccatctttataattaaccttagaaatccaataaattttaatttgttaataaaactattctacctattgattttactagtcttgaagctgtttttatatttcttttataataggtaataacatggaggattactgatatcttttttaaggcacatatattagtaataattttttaaaactatataaaataagtaccagtttattttttacgcattatatatcttcgtcagcaatttctgctgcatcctctttcatcttttctttatgcctagatatctttttgtttcttcaactgattgatgattttaatgcaattctaactttttctaagtccttacctgacttttcatatatttctagtcgcataagtctttctaggactatgaccacttatattttttaatcccatactcttgccaacttcagtaagaattgcactaaatgatttttgttctattggttctaaaccatttttggatttatttgatggaaatgcatattcagctctttttttacctttaacatattcccttaaataattttctaaattactttttatatatacttttcttttatcaggtttctttttgttaggatacctatgtaagttcgctaaccactgtttatattgtttagattcctgtattaaaaaatatccgtcatctagcgcatcttttatttgtccaattgtaagttcaactaaatcttgcattctatatccagtcgctctagccaaaataaataagtttaaattcctatcagcatattttttactatgttcaatcaattgctctttgaatctttcatatttattttgtggtattggcgatgctgtacctttttcccacttatgttttctttcttccattatttcacctgctttatcgctcctttgtgtcttttataacttgaatgagacattaaatcttttatatcactttcacttaatttctcatttttattcttatctttcattttcataagtttgttgtaacttttagtatcactttcttttaaaacatcttttaccctcataaacaccctcctaaacataattaaaaatgagctgctatattattgctaatataacaactcattttttctatacccacttttaattatcttccgatttatttctttttcactattttcatttgctaatctccttggagtatcatatgtaattattggcgctatgtttgtatcaactactaagtctccatcagcagtagttttataaatagatctattctttttaataaatgttgcatcactcatatttttttggattcatatcttgttattctatctatttctttatttctaattttattagctgaatgtgaattcctgaaatcttttaaattacgttctatgcactttctaacagtttcaggtttacattttagaatattagatattttgacatgctccataaccttttagatataattcttttactctgactttatctaacataatgtaacctcctaaaaatagatataattattccataccaaaaacgtgacattttttacttaaaaagctaaatgagaaatataaaattgttttttatgtttattacttatttatgtacatatcttaccattagttcaattacaaatgtgagaaattttcgagaaatttttgcaacaaaaaaagaacaaaaacacgacaaaaatgcaacaaaaaagtgccaaaaatatgacacttttactctattaatccttttgaaatccttattaacgctttgtttatactgtaatctatttgcctttttgttctatctaattctcgtgctactttcttttttctttcccttgtatataaataagacttataactttataatctttttcaggaagtaatttcaatatgttatctatcttcttattttctaattctaatttttttatatctaattttagttttttgattctttcatcatcttctttaattccatttataattaaattttctatttcaatattcttattatctatcttacaaattctttctctatataattcaaattgattttttatttctcccatttatatcacctatcctttataaaatatggtataatttagataggttgattagagaactaacgttccaaggtctattctctaattgaggtaggtgttcgtgatgaacacctttttattactaatgaaaaacaacctttctagtaataattcctgccttgtttagattatcatatatactctttaattcctgcttgtaccaatccaaataaggatttctcaatgcactatcttctctattatcgcaacacaccaatcagcaacttttagcacttcagttctacgcgttagtacaagtggttctggatattcaaataatttctttataatatacacaaaagtctttccagtacatctcccagtcatcctcatatctatcaacattggctcatttaaaagatacttacgttgccatttataaaattttatatttaaagctttttctatttcctttattagcttttcactcattttatccataaattaattactcctttctacatactgtagtagtatgacgtactaataaaataaaatttcttcaagatttatatactcttctgcatcacaaagagtaaaggatgcatcttcatcccaagcaccttcatcgtggtcatatttatagtaataaacatttccatcttcatctaataacggattagttacagtatcatagcatggcgttccattaggccaatatgtcttaacttcctttcccatcataggacagtatatctctccccattcgttcatatcggggttctacatcttcatctataagtaattcccaatataacgtattctttatttaatcccatgctttctgattcatcttttaagatgtaatttatttgtcttaatatctttcttccagtgaaatatgtttcagcaccctcaatggtttcatattttcttgtagattaaattctttaagcattagaacgtctccaacttgaaaacctctatcatcttttcttaattcaaaagtctttttgccttctctcacagcattaaagtattgtggtaatattttcaattcatgtattttactcattgctcttcctcaccttcaaaataatactcttcttccaaggcatcttgtagctcatgataacaaactgaacacatcccatctgtcatatagttttcttcttcccagtcaccacattcgctacattttgcatacttagtaagctcaacatcttccatagaatcatattcatctgcaagtttcttattttcttctataaatccattgtaaatatcttctcttaatcccttattttctgtggttatagcacatggacatgcatgttcccaacataaattccaatatccgcagccatgctccaattctattttttcaaatgcttctttacttaacatagctctatccctcctcttagtattacgcattaaacaatcattgcttttttcaatctatcttctgtaataatccatcttccttgcataattttttaagtttttccaagtcaaaaccatcctctttttgaacttttacttgtatccaatttggttcatgttctctgtaatcaagccatgtattaggagttctgcctataatttttctaccattctaactattctttccccagcctctttacatttaacgaacccagataagtcataccctacacctcttggagaccagtattctccatcattttcaggcttaatgtcaggtttaacatatttatgtttaggaatacctttccttgggtgttcttgcaactcaggataaatagttggttcaccaaatccaaatgctgattgggttaagtccatctgctaatataataaaatcttctccacattcgccacaaataacaggtgaagtcccctaccttgtattccttgactataacaatattcgcaaccacattttacacaaccatgcttttcgtaatcactccaacttacagcaataattttatccatcttaaaattcctccttaatattttaatcattaattcctacgcaatatctacactttgtgcattatttactcttcattaattgttcaattcttttattaatatcctcccatttcttacggttctttctatcagcttcaataatatctataatttcttttctgtttttggcttttgttatatctccagtatcaatttatttattttctctaatctatttaataatgctgtaattaaataatgtctagctgttgaaattccaccatctttactaatacaaaaataagcattattgctgataatacagtcaactaattcctctttggtcatttcatttaatagttttctacctcaatgtttttagcactcattccttttactccttaactctacactttacgcattattacaatcaatttttatattataccaattatgatttttctttaatatctctaaatttttattatgaattgatacgtcttttttagtggcctgtcttaattcctctatattttccttagtgattgttaatagaatatcgtcacaatcttcactgactgcataacatacgaaaaatcataatctcatagaattcgttttaccaaaagtttcatgcattactttaaagaatttctccatttgatctaattgaataggtcttaataccaaaattcatttgaattttcttgtagctcaatgactgctatctctaatccagctactaatttccaatcatctgtagcattttctttaactttagcaattaattgttttatcatgatctccctccatatatatatccgtttgctactagtaaatcttttatattattactcataattgttactcctttcccctatactgcggtcacataccacacatcaaatatctcttccggcaacacataagtacatggctgccaattagctattactggattataaaactttaatttattctgcttttctgatatatcaattttgtagctttcgccacttttttgctagtaattatcacatttgtatcatctattcctttttcccatgcttctagaaatttatattccattcttttatctatcttaatatccatacttacaccttatttactacaagaggatttctccccttgtatattttttattgcagtaaccttaacattaacaattcgtaacccctgccaacgctcctagtcctgcaagtacttcaatttactatttcttttattttttatagaaagatcttcttttatcatccgaaaatccttttgtatattccttaaaaatttcttctaaagttttatcaggcttttcaaaatatgctttaacaaccttatctataatttcattcttattctccattcgctctacctccttataacatctagagaaccaaatctctgaaattgccctagccatgcaagtttagtagtggttgtttgtccattacgattcttagctgtaataacttccgcaatgtttttatcttctgtttctttgttgtaatactcatctctatagagaaaatgaattacatctgcatcctgttctatagatcctgattctcttaagtcagataaaattggtctatgatccgctctttgttctggagctcttgataactgagataaagcaatcatagtaatatctaattccttagctagtgccttaagctctcttgaaatatgcgagacctcttgctctctacttgatgtcttcattgttgttcttattagctgcaaataatctattattacaacatctaagcccttttgaatttttagcttcctgcatttagcttttatgtcgcttaaaatagttgttgtatcatctagaactaatttccttgccattaactcattagccccaatagaaatgtcctcgaactccttgtcatttaattgaccagttttaattttcaaatattcaattaaacatttagctgatagtaatctatctgttaactgatcattagacatttctaatgaaaatatagctacacttgcatctttggatgctgcttgtcctatatttagtgctagagctgtttttcccattgatggccttgctgctattattacaaaatctttttttatcaaaccgcatgtaattttatctaaatctgaaaatccacttgatagtccaattaaatctccaccattactgaatcttttctctaaatttatgaatgctttttctacagctttatcgattggaacaaaatcatttgtattttgattacttgatattttatataagtcattttcggttctatcgattacgcttttaatatcttcctcataagcgccctctaacatagctttgctcgctctaattaattttcgcctatttgctttttctttaactatgtttgcataacttgaaacattaatactttcaaaatatgcggttgataattcagatacatatgtgacgcctccacatgcatcaagcaaatctttctttcttatttcctctaacactgtaactagatccgctccaattcctcgattgaataaagatattactatttcatatattttcttatgcttatcaatataaaaatcatctggtaataacatcaactcgacttccagtaatttatctgtattattcattatgcatccaagaattgcttgctctgcatcaatattattaggcatcatcttatctagaatttccatattacaacgctcctaactttgatttatctattttaactggttctttggtcttggattggattggaattacatttgactgattcagttcttttaatgggaatattccacgccaaccattcattatgctattttctaaaatagtaattttagtagtatcatctgatgctatggaattaagtttatttaatattttctttagtgctaaagttgttaatgatgctttgatagtttttctatgttttataaattcatagattgtacttcttaaattttcattctttgtgtactcattaactaaaatatcaaactccgttttatctcttttcttttttcttttttatttataatactgttacttatagtacccacttttggacagggttcattttggacatgtccattttgactaggttcaaaagattggcttatttcctcactttcttgaacatggtcattttggacaggttcatttttacttggttcattttggatacgtccattttgactaggttcaattgttttttgcttgctaggattagtcaccaatgtataaatattattagaatatttgcttcctattctcttttttttgacagtaattaaccccttatctataagttcatttctacatttgtacatctttttttcagatatacataattcggagcatattaaatcaagagatgggaaggcgtttccacctgctccagcaaaactacatatgtatgcatatactaattttgctccagtggatatactagaatctcgcattacttgtttagggataactccatatccatcttcatatattccagtacaaaaaagttcgtcattcattcaatatccctccatttttaaaccaaaggtaagtgcattcgtttattttatatccatgttctaatgcaactcgtctattctcttctatcagtatttcttgaactttatcaaatgttttaaattcaatcctaaatgaattaattgggtcttcaccagttaattcaacgcttaatgttccatttactattcttactttctgtgtatttaaaacagccttagctgctgataatattattaattttggtattggatcatatttaatcatgttttcaaattcttcaaatatgacttccttagatctagattttgggtacatttcttctaaaagtttctcatctttcttattaacaggctgcttaattccttcaacaagtgtctctatctcttccttcgactctttagcattcaattccttaatttcttcatgtataatctcttgttcatctttagttaaactgctaagtgtatgagcttgagtgagtgttatctcctccttatcaagcttttctttaagtggctttatcaagtccttatccactttctgatatcttcctacctgtacacctgaaagcttcatatcttctcctattaggtctctaatctttcctttaggtaattgctcaccacttgccttcttttgctcatagatagctttaagccttcgtataccttccatcttttcagtgggcagtaattccctttgctcaacatttgcttgaataagcattatctctgcatctaaatcgcttatctcttttacctggcatggaactttatcatagccaagattctttaaagctctatatcttctttcatctgaaataatttcatacatatcatcattaatttttctaacaaccaagttatgcataagaccattttctcttatggattctgcaagctcctcaacctcacgaataccataaaaattattttgtgaaggaactagattatttatatctagctcctgtgtgaatcctttattctctactccatttatcctatctgctataccttttaaataagacattgctgcatttcctccacaaaacctttatagtccttagatgcgtttgctcttgcattaaaataaattactggagtagaattaaaagtactcttaatcacatcaacattatcccttatgctctgtttaaatagcatatcccctaattcttctttaagctcttgctttatttctctgttgattgttgtagctctatccattgttaccaaaatacccaacaattttaattcatcgttaaattcttctttaactccttgaatgctacccattagatattcaaacccatctagtgcaaatttatctattttcaaaggaacaatgacatatttactagcagccaatgcattaatagacaacattcctaaactaggcggacaatctattaatatataatcaaatgaatcttctttcttactattaagccatttcttaagccttgtttctctagctttcttagtatctgcaagtatttcaccttcactcataatgagatttatgttggctggaacaatccaaagatttttatatatagttccttgtattggaacatcttcaccagcaagcaattcatatgttcccttagtgttaggattgtacacatttaagtactttgtagcattgctttgaggatcaagatctataatcaagacctttttcccttgtcttcccaactctgctgctacatttacacatgaagttgttttagcaactccacctttcacatttaaaaaacttataactttcatatctttacattacctccatttttctatataatggagatacggagtagtgatccgtatctcaaagattgactgaacctttatgtaaggttcttttttattagtaccattgtttcccctcatgtgttacatgaagccaaactttacttttaccttctaaaaatgcaaatcttaaatattcttttctataatgctctattggaactaaatctttatattctttacgtacatacttatgtaactgccttttcttcccatcagctttaattacattaattacattgcatacacttactacacattcttcatcatctggatcttgtgctacatgatctatatcctcaacataattaattgctttaggagcagtaatcattcttgaatctatacctctagcattaaaataattaattatgaaatttttaaaaatcactttattctcttctgttaaatcctcataacctttaactttttctgcatcaataccatgacaatttttcaaatcttctaagctagtaagcttatagtcatttaatccattttcatgatataatatctcaacatcatatctgttcataatctaatcctccttacacaaattacatattttatgactcccacaacaaaatgtaagtaaatacacttgcctaatatccttctcctcaatcttaattcgcaatttatggctattctgaataaaatgtggacattttatcttacacatataaacttatgtctcctttcttaaattcaaggcatttaagcctatttatctatttagtaactgcattcttatctccagttaaaattgccaatgcattattcaaaactttgagtcttaattcctttggacacattctcatagctgcttcaacttgtgcttcagctaatagatcgctaaatcctttcctatcttccaaatccaatattgttacctttatttcatcacctttcattactactcccccattaatatcaatcatttcataatatgattgatgatcttcatgtgttactttgcaaatttcaaagccataatagcttcaacaacatcatctagttcttttactatctgatcccatgttggcttttcatactcatctataattccatcacaagtaatttctatcatcgcatctctaagcttaaggaaatcagctacttccttttgcagccttaatatagcgactggtaattctctgatttcaatttcaggcaaatatttttgacctacctcagcacttgttttcaaatgttgataagctaaatattgagtatcataaatttcaatcattttgattactaccttatctggtggtgttctcttccctccttcataggcccttaagctgtcaacagatatgtccatgcactctgatgccttttcttgcgttaagcctgtactctctctcgctatttggtaaatatttctgtattcttgcactattccattctctcccattcttgtattaaaatattattatgatttaaaagcataatttattttaaaaaaatatctattatgtcactgtcttttatgtttaaaattatccttagtaactttatttcttccaatgtaaatggatttatgccattttcctttttattataggtactttgagatatactgagcttgtccccgatatattcttggctatagttagctttttttctcaaattttttaatttaacaattcccattgtccgcctccctttatgctctaaaatcataatctatatttttataataatgctttgaagtcataatgtcaatgatttttatgaaaaaatattctttatagtcatatttatagattttaaatcatattagttataaaatttaataaggggtgatatagatggcaacttttgctgatagattaaaagatgaacgactaaaaaaaggattaactcaaactgaattagccaagacgttatttttaggccaaacttccgtttcaaaatacgaaagtggaaagcaaatcccagaaatgcctacacttcaaaaaatagccgatttctttgatgtatctatagattacctcttagggaagtcagatattgcaaaagctaatggtatttcatttgaagataatgatgaaaccacaatagctcttcacagtgatattgattataaagatcttccgcctgaagcaaaggaagaaatttataattttatagattatataaaaaacaaatataaagataaaaagtaaggtgttcaccatgaacactttttttgttctcattgcgcgaacatacattctcgtgttataataattccataatttacatggtggtgattgacaaatgaaaaagttaaatacaatttttaatataattaacaatgaaaatattattcttgaagaaacaaactttaaagatagttggtcaaaaggactatattttaagattcctgggattccaccgacgataggcatagataaatctattgttacatgtagctataaatatatatcagttttagctgaagaacttgggcatcattttacgacgttaggtgatttaattgaagactcaaatagttatgctgaagaacttctaaaaaataaaaaagaaagaatagccaagttatgggctgctaattttttgataagtgatgaagaatttgtacaagctttgcataactgcatttctaccataccagacatggctgaatactttaacgttactgaagaaataataaaatataaaattctatctataactttagatgaattaaaatatattaatattagaaataattttaaagctagggaaatcccctataatgcttgtgcaatatagtactttttctactactttttattaattatatgtagttatactcaattaacttagttgttatataaaactacaatcaatatataaataatttggaggtatgatatgagagctgctatttattccaggaaatcaaaatttactggtaaaggtgaaagtgtagaaaatcaaatagaactatgtaaaaaatatgcacgtgataataattactcagaacttgagatatatgaggatgaaggattttcaggtggaaatataaatcgtcctagatttaaagaaatgatgaaggatgcgaatttaaaaaagtttgatgcaattatctgttatagacttgatagaatcagcagaaatgtttctgacttctcaacattaattgatgaattaaaatccttaaatataggatttatatctatacgtgagcaatttgatacaactagccctatgggaactgccatgatgtttattagtagtgtatttgcgcaattagaacgtgaaaccattgctgaaagaataagggataatatgtatgagcttgctaaaacaggtcgttggcttggaggtactactccttatggatttgtttctgaacctgaatactatttagacagtaatggaaaacagaaaaaacttatgaaactctctcctattaatgaggaaatagaattaataaaatacttctatgaacaatacttaaatttaggtagcttaggcaaattacaaaaacatttaataaaaaataacattaatacgaagcgtaatgcttcttgggatataaaggctttacagctattactcagaaatcctgtttatgttaaatcttctgattttgttatcagttacttagaatcaagaggtgctaccatattcggagaacctaatggaaatggaatactcagctataataaaaaagattctaaagataaatatagagatataagtgaatggatattatctatttcaaaacatgaaggaataattgaggatgtattatggttaaaagttcaaaagcttttagatagaaataaagacttagctccaagattagttagtggaaattcttctggaatatttaattctgttctttactgctcgaaatgcggtgggcgcatgatccaaaagcaagggcataaatctaaaaagactggtgatcttttaagatattatatttgtgtaaataaaatgaattctaatagagaattatgtacaagtaaaaatatacgagttgataaactagaaaatgatgttatgaaggccttatttaaagagactaccgataaaggttcattaataaaagctatagaaaattataaaaagaatttagagtcagaaatgatagataaatctgatattaaaaattatgaaaaacagatatctcaaaaagagatccagattagaaatttactagataaaatatcattaaatcctaatctatatgatgtatttgaaaaaaggattgaggaattaaacggggaaattaaatctcttaaattcaaaaaattcgaattagagaatttgaataataacttcaaattagcaataaaagaaattaatgcatcaacatctatgttattgaattttaaaacattatggatgggtgccgataatcctatgaaaaaacttctaattaattctttagtagattatattaaatataatcctgatactaaggaagcaaaaataaagctattttgtactaataaaaaaaaaggcgctctttaatgtagcgcccaaatgctcggtacatgaaaaagcgataaataattacattgtaaaaattgatttaagagatgaatttaaagaattgcctagaaatactatagctgaaaatttaattagacttagaaagttacataatataactcaaatggatttatcaattgctactaacatcggtaaatctaatatatctaaatatgaacgtggagaattatttcctacaaaagaaagttccttaaagcttgctagattttttaacgttcatagtaaatacttttatgattcttatctggaatctatggataattttcaacaatatttatccactgtactcaacaaaaatatccacattagtaagaataaattgtgtggactattaggtatatctaaagtaactttatacagatattattatcaaaatcatatacctactcgaagtgtattcgaaaagatgaaaaattatttaaacacttaaaattaagatctattctcttaattcaattttatgtaattacatcatgattattttataaaatcatctatatattttccgaagataagccatcttacaaaatttgaagtatctaggcattgacatcttgctaatttttcaattatttctttttcatcttcggttactctaatatatagtctctgatcacgtaatgattgatattcttttttcggttctctacctaataattttagaattacttctcttaaattcattttaaccactcccccactctcaaaaaaatattttgggaccccaaaagggtatgcttgtgtaaccagtgtgcgtacagtggggggactactccccctactcttgtatttttttattatccattgatggtaatgttggcaatggacatcttcccattaaaatatcttttacatgagcaggtggacttgaatatctaataagttcttgatatagttctaagtcttccattttcttttttgagaactctagtacaattcgtagcctttccatacattgtagcctcccttttaattactatgttaatttatatgtacaatgtatacaaagtattccaaatatatatctataattttaatccacaaaataaaaaagctaggaaattaatcctagcctatagagtattattgtatccatattccattttcattaactttatatccatcaggtgtaatggcattaactaatagtgaaccatcagaattgtaataataccagttaccatttattaagtgccatcctgagcctataggtgttattgttttggcaagttcgccttgttgacctttagacaaatcattatgtttagcttcactatataacccttttccatcaggaccaattgtatatccatctataattacattctttaacattttacctgtcttatcgaaatagtaccaatctgttctatgtacaggatcccaattaccattatcatctctattcttaactaaacaccatcctgtttttaagtcaaaaccatctgtataatatttattaccgtttatttcatgccaacgttcatacatccatgaaactgtaactttctcgccatcaattgtgatatctttagtgtcaatactttttgcatttgcgcctataggcaataataaagtcaaacttaaaagtaaaattgaaaatatttttttcataatttatacaccctttcaaacttatttgcttttattgtatattatttaccaactttgtcaattatataaacaaaaagaggtgaaatatgatagaatttatattacttatgttagcttttatgtgtgctaatattgcttattactgtatgcaacgaaaaagagtagacaaccacctaaaggtattagaaaaggacctgctaaatgaatttaaggtaaaaaaataaaagggtatagaaattaatctacacccttgacactcttaacctattaaattatatttatttttctatggagtaaaaccaacttcctaaaatctctcttagctcattacacttctctataggcatatatcctgtttcaatccatacacccttatcattgcctctcacgtacggtttgacgccttggaaataactaaggatataatttatgtctactccatcataaccttcatatgcgtgtggtagataagttgtaacaacatatccttggcctgtagaattagaattattccctataggttctttaggaatattctcatctattgcgttacataaaacatgtgctaatttctcccatgaatatttattataaatttctatatcctcttgagaatcacagaaacaaatttcacttatgatatttccacaattaatatgattcatttcatataacttctcaaatttaacacctctacaggtaaatcctaattcgacaaaattacttactaatctttgtgcatgagtataagctgaactattttcgctacttacaagtgcctcagtcccatgtgcctgtccgttgtaacaattcatatgtaagcttataaacaaatcacaattagctgaatttgctttattagcaccttctgaaagttctccattttgagtatctgcattactattgcaatctataacagtatgtccatattgttcaaatactgcctttacagcaacataatactttttcatttgctcatgttcatctacgatacctatagcaccagtgcaattatcactatgacctgctcttaatcctattttcattattcttcaccttctttgttgcctatagaatcagaaataccgcttgtactagggtctacaataatacctaacataactaatatacttaatatagaattaactatatctgcataattagaaggtattaaatctttaaaacctaattgttgaataagtaatactacagcactaataagtgatacccaaaaagttttatttgttaatcttgatttccagttaatattcatttttacattccacctttactaaaataattttgattgaattacataaaaaaagaagcttattaaagctccacctaatacagttataaaccaccgtatcattcctgtaagtgattttaaattttcgcataagtttttaagttctgtctttagttctcttccatcttgttccagtttgtcaagcctatcaccatgattatcaagccttttatcatgcgtttctaatttatctcttattaattcttcattcataagtcacctctctattttcaaatttgtaaaaatgagcaacaaaaaagaccctctaaaggtcttaattattgttttttttatttagttttatagttagtcctattttcctattgcgtagcagttaatctttttcttttaaaagaaaaatcaagtttgaatctacgtttaacatcttgatatacttcttgttctacaggggtagctatcatcattatgaatggattatatgctaaatctaaaaaatgatgtgctatcatgctgttcatagcaattaaagctacaattattaatatcttataattattattttttatatatttgttgcaatttaaaacaaataacatacaaatcattattaaaaatatagttccatatttcaaagctattaacaaatatgaacaatcaataaaaaaataattactagttttctccattgtgcctccattacccattaaggttatctgctgtccaaatgctgaaaaaccataagtatcaattcctgtactacctaaattaagtcttgaagaaagaattttatctaaatgaatataagcatcattgtattgattttgattataagcaattgttatgcctattgatacaatcgcacaaattgaaacagagtattttaacataatatttattattttgccaaagttacacttagttctaattttcataaagaaaaatactactgctgttaacaatatagaaatcgaatccagtctagcatcgttatatacatttgtaaagattgctagagatataaatacaattatatcaatatatgatatttgttttttcttaacataacaataagataaaattaagtagaatatatgtgcagaaaaatctgttggatatgtcaaaccaagtgattctctgatttttccgtctggtctaaaatattgtagattttgtattattcctgctttagatgctaatatagaaagtgttactattatagttgttattaaaaaatatgttttcactatattttttagctgtacatttcttgcaccaaacaaaattattacaagatcaaataaatctgaatatccactcataatattaactaatacaacacaacttactataataatatactttattatttgcttaacgctatatttgtcaaacaaaataatttttcctaatatcatacataatgctgaaatacgtataatattatacaaattatttggaatgtatactctaaacattgttgtttttaaaactattataattgtaaaaatagagaaagcaaatatgtatatataatccgctatttttttcttagatattgtactatttttaaagtttatcatataagtttaccccctttattgcgaatataattatagcacaaaaattaccgcactataattatattccttatatgaaattcttatttatttacattcgtcgatgttacattcttcaaaactatatatatcaagtaaagtgcttgaataattatcttttacttttactatcttaccagtatctaattttataataacagtaatgttggttatatcttcaaaaactcttatacatttcttatattttttgtcgattatttttccgtgtatctttttcttcttaaaatgaatttttttatacacatatacttcttcacctattttgcatttttccaaaatatcatacttcataatattgtctcccccttataattttattttaacatgattaagtgcaaaataaaattatatcaggtgaatttatgaaattttcagtgctaaactattctaatttgatacctataaagtctaaatcagtagatgatcctgacataacctttatgtgatgtaatcctaaatctaacgttccaattgcttgcgattgacttgttatagctgttgatactccatctataattatatattgcgttccaaccgtttcaacataagtggttaatgttaattgaaatttagaatctataaatatccaagcatccatcattactacatcatcagtagttgttctagttgcttttgctctataagcaaatccttgtgctcttgttgtaagtcctactatctgtgtttcgctagtatcatctgcaaccagatcagtttttattttttcatctccaaatccaatactatctgcttcttcaatccatatagttcttggtatcatatgtgcgaagaacataccagcttcatatttatgccctatatctttaaaatgtactttatctgatgatattgtattgccaccgtattgactatattttacaaagttttctgtgaatttagcaacgtctattaactctaaattatactttttagcaatttcatatttagccttatttgcaaaattacccatccaccatgattgtctagtataagaagttgaatgctcactttgatgttgacttgttagcagaaaaggttggatattctttgcgtaacatttattaattagaatttctaaattagatttaaaggtatcatattcagcctttgtatcaactctatcatttattccaaaacttattgccaacattttagtatcggcataatttgtattattggtaataattgaatcaaaattatcaatgaaccatgctaaagtttttccactaaatccagcattatatattcttaaacttgtgttagaactaatttcttcctttagatagttttctaatagttgagtatagagataaggtgaagtatggtctgtacctataacatttgcaacgtaacttgttgttttataaccatctgttgtagaatttcctgcgaatacgattggaaatttctctccattcatccaagctataaatgcatcttgcaaagtatataataatacaggagtatcataactagggatatccgttaatttgtgataagataaacttttaatttcttcatctaaaattaagttgtttcctcttttaatactgtttattgttatcctatcattgcatatacaattatagattttagtatcatcaaatgaacaaataaaaatatccctagatgaagtaggacaataggcgacatagaatgtaagattatctttacttacaaataaacacctagtatatctatgtttaccactataatccactccactcaaaaaacttgatgtataagttacaattgatgaggggattgttatatattccccgctttctagtaatatgcttacagatgtattcgtaattcttttgtctgttgtattgatacttattgatccactatcatatacaaatcctcttgtgagtgattgaggtaataaaatattaatatctgttaatagtctaacatcacaattatagtagttgtattgtccacttgaaggatttgcccaagcagtaccattataatatttattaggataagtagttgttgaacttaataagtttgaaactggatgagctgtattgtttgaagcaaccccaacacctatatcattattaatgaaatgaatagtaatatatacattatcataattgctaacatctaaataagtttcaaacgattcatgaaatagtttatagtaagtattataatcagctacgatacttacggtctttgttatagtttttattatattgtcaaaattgctaccatctcgaatagtcatttccagtacatataaattgtttgcatttgaagtttttacttttacataagtcttaaattcaaaacctcgtatagatgttaaatcacttgtatttagtctataaccatatccacagtaatcatataaattaaaagcgttataatttatactaccatcatcggaacttagtaatttagatttattataagtaatattaaaattatcagaaatatttttttctaacataggaacaactaccgaattatccgctatgcctgtgctttgataagttcctcctactgtccatgctgatgtagaactattccaataataccaacctccatctgctataactatatatatacctgtagttcccgtaggaaaagctgtttgtaatgctgataaagttgcataagttccttttggtgaagcgttgcctatgttagaaatttgagtttctacatatgatttttctgcttttgcagctatctctatttcatgcaatgctaattcatttgtatgactagctaccgttgtattagtagcatctaaatcactttgattcgctttatctgacaattgcgtagtaatctgagcaatggaatttgttaaaatattgatatcttttttagttgctaatataactgtaggatctatttttaattcaacacttgatgcattagtaacttctaaggtcattttgatataaagttcttttgtggaaccatctgttgcaactggtttgtaagtttcaggatatttcccaatagcaattaaactattactatcatcaaatacacctacctctctaatagaaaatcccccaatatctgatggtattgcacttgtaatagttatccattgcggattaatttcatcaacttcaacacttgttatattgcattcatatactttgtgtacaagatctgtttggttttcacttggattataataatttccattgctatcccctattttcattttcactaagttcaatttttgtccagttggtaatgagttagctatcttagctttacctacatttgttagtattgtataaaattgttctgccatttatattcctccttatagtggattaacgcttattatttctgcattttgtgtattccctaacgcaatagttaatttacccttagaaccgatattggttatttgataaggaaatacttgtacttcttctccaagtagcattgttgatctgaaaatcaaatcatcatttgttattgaagccattttatagttaattctaagatgtgctggctttatattttctaatgtttcaagtaaattcattataaaaattggaaatccataactgcttattaattcaatagtgaaactataatcagaattattttctattatatttgcatcttccacgtaacttaagcaaatgctttttatctgctctatagtacttgttcctaatcctctaagctttgataatattctttttcttctttcatctatagttaggcttttattagttgtaattccaaattcattttcccatctatcaaggctagtatctgcatctaataaaaaaaattgattaagagtattaattatcttttcttgtgcttttgtaagttctatagagttagcaaataatatgtttttaattacttctgaatttttataataatcaggcatatacgataatagagtttctttatccatttactatcacctcacctaataccgctacctgctcactccctatagaaatattatctgttccattatttatttttaacgaattgtagtctataactccatctgtatctaatataaaagcacctacttttgcgatacttacatattctttattaaatgctatttcttttaaataacttattattgttgtttttatttcttcttttatactgtctaattcataactactttctatatttagattgaaattaatatttataggaacttcttctgcacttataacagttacagttgcacctataggtctattattttctatattctctattacagaatttatcaaactactatctgcacctattttattagcatttataacaactacttttacagttccattgccattccataatgggattattctgcaatcaccaactccagtaacttctttagtccacaattcataatgatatatatttccactagttgctggggtccttacttttatataatatctttctcttaagctttcatcgtcttctgtatcatacccatttttaaattcagccttattagttactgtttgcagtccttgtaaggtttttgggaaatatttaattgcaccagttggaatatttccttgtgatccatcaatttcacattctacaagcacatctattgtcttatttattattactttatcctctaaaaataaatagtttagactatctgtagctaccatttccccttttgttattttggatccatttattcccgatatagttacataaccagttgctttagtagactgttttctgcttattccaacttcactaactattctttctaaatcttttccagtagtagtatctgcaaatcctttattcaatatttgttctgtttgttttaacaaactttcaaattcaatagcacttggagcaagtgaatcatatataaaacttccaatacttttatctagttcatcatcaatattagacaacattcgttctaaaattatatttctatcatcagccactatatactcacctcactttctattaatccaagatttgaaattacattaaaacttacttttagtaatttcccattacgttcaaattcaaagttttctacagatttaatattattattttttaaaagtacctctttcacagttctttcgatttcagattttttatattcaaaaggataatcacttgtaattaagtcttttaaattttcaataccataatctatatttttatatatttcatattttcttttatctgttattaaaatttatttatccagcattttaatgcttctagtttttctattgtagatattttaccatcttgcaattcaaattcagaagaatcgaaatcaaataaaaaagacttacctgttatagtagtctcagtattatttatattattattttgtattgtattgtcttgcgctggaaacattaaatcaccaccttatcgacaataaaatatgtttgacctaaatttgaaggaatacaaagtactttgtcaccagtttttaaacttctatctattgtacaagttcctgttttcccatcaactgtacaagtaccgcttaaaatacttaaattagaacataaataatagttgctattatttaaaataacacttccattaaataaactaatgcttataggatctgtacttattacagttccaattattgcttcatctatatctttgttatctcttttcttaaattctttagctaatttgtattcccaactcattatggattcaccttccattctaattctacagtaactttgtgcaagccgtcttgtagcgtgtgattagcactttttattttatagtatcccacaaaatttcctttatttaaatatataagcctgttactcttaataatattatttatatcttcctttattactagtagtggcacacttgcactctttacaattttattaagttcatttagcttattattagcaatattagttgctttagcaacatcttctacattaatatctattaactcgcttagcttaccataccagttgaattttgaactatcttctgcattagcataaatattaatattatcttcactattatcaactacggttatgctatttttcatattctctgtactgctttttatttctgcgctatcatcaaatattatgttaggattaatctttaaatcctctaaccttctaatataaagaatatttgcttcaagttcttttacatattctattccttgatcatctgtagcttttttaagcatatcgtctattatctcattgatagattttttatagatagcattaattaatgttggtatagtagtaatatctccagtaatatatgcttcacctaataaagaatttattgcaatatcagcttgtaagttattaaattgttttattactttatcattcatataataagaataatcttgaataacatagttataagaaatactgccttctttttcagtcttatctataacaacgcctctaaatatttctttatcaaacaaatataaagatacaacttgctgcatatataagttttttatactgttaaatgaaagttgagtacctaaactactatcagtatctcccatgataagctattagagttatataatatatcaataccatctgtaactaatctatacatattattccctccatgctccactagagtctatatagtatccatctattgtagtattgctagccatacttccatcagaatagaagtaataccacttaccgtttatttgtagccatttaccataaaccattttgcaactattatctaaatagtaccatttgttcttccatagaacccattgatcagataagcataaccactttcattaaaatagtaccattcactatcaattttttgccacccattagaataccaagtataattttcaacgcttgtgcaataccaccaacctgtagcattttgattcccatcctgatctataattattagcagtatattctctatattgctttaatcctaaactataagaataatctccatttttctttacgccataactccaactttctattgaaaatttatcatttacataacttttaccatttgcaattatagttaattgtatatattctttattatttaaagcagtgtttattacagttataacatcatttgctaacacatcacttttagcaaatttatatttctttataggcaaccaacactctaaacttacagtatctaaccctataggttttatattattgtaagatccattactataagtcttaaattcctcgttttctatagatttattaagtgtaggaaattcctgtggtactataggaagttttaaaactttagatttatctttattacttatatatatattatattctgccactttaacccctcctaactattagctaatgctaaactaattttgtcataaatagcacttccaactttatctataaatgattgattaccaataacatttccttgtattgtaacttgtatcggtggtatattacctgaagcaattttattactttgagaattagtactaatctttgttcctctaggtagtgtcattaattctggaccatgttctcctacccatgtagtgccacctttaaaataattagtaccaacagcattattatctgctgtatctgtttcacttgcatcctctccaccaccaaaacatgcttggttatattaatcgcagcatttattggagttgaaagccaatttattaatccgtcccatattccttttatggactcaattattccattgaaaatttctttgataccattccatgccttctcccaatttccacttaaaactcctgttacaaaatccactaatccttgcaatatttgaaatgcaccttgtataatttcaccaattgcattaaatgcgccacttacatattgacatatagtatcccaaactccactaaatacaggtgcaagtactccaatacaccatgataagaatggacttaatacattattccataaatcatttaatgcactccatatttgctgtattattggtaatattgttgtacttgcccatgcaaggactcctgatccaaactctttatttttacccaaagattattgataatatttctaaaagtctctgatttttgataagctaaaacaaatatacctacaagagctgttattcctattattatccatcctataggagataacataatagttccatttaatattgcccatacaagttgaaatgcttttactgcaaatgatactccacttatagctttgcttactaatgtgaaagttactgccatgcttgcaattgtaattattatatctttatgctcaacaataaaattaatcaaattacttacaactttatatacatttccaaaaacttcactaaatttatttgcaatattatctagagtcccatcactttgccattcagtaagtttatctgcaagaaattgtactttttctcttactttatcaataagacttccactttttacagttccgtcttcttgtatccctactattttagataatgcacttttttgttataccagtaacagttgacacatacctttagttgtcttactcagcttttcagctccaccagtatatctttcgtccattatgcaagtaatgctttattaaagttctcttgattagttatttgtccttggttattaattgtctcctgtcctgcaaacatctgattagccttagcttgtatgtcagtttctttattccaattccttaagccgttctaactctccagtttgagcatcaataaatgcttctgttgcttggtcaattggtttatttgttgcagccgccatatcaactagttccccaaataacttttgctgataaccccatactttcaagttttgatgaagcttcaaccatttcaccaccttcaaaaggtgttttatttgctagatcaatagaatatttcattatatcagcagctttttgagtagactttgtagcagtttctaattgaaccctataaccttctaagtccatagcttgactgagaccagctcctaatgctaatcctcctaatgttgtagtaacaccacttcctagctttgctacttttgaaactgtattctcaattcctttacctatattatttaatgatttttgagctgataatgttgctctttgagcttctttgcttaaccccttaaatccgccagaaacttttacaagcttggaaactaatattatcttgtaaagaaagaatagtatttaatgttttactccccattttcttcacctctttctcctgcaagagctttccaatttcatttcttcaaatttaattcttttttcaatttcaaaattcatactttcaataaaaaaaacttttctcagttggttttaaatttaataaatagtccagggaatgacctcgatctaaataatagatacatattctaaatgtccacctcttccgtcaattcccctaactagttttttatgtctttagtcacctcattacttccaaatgtatcacttattttttctgcaagtgacattgatacatcaattccaaatatttaaatacaatatcataaggctctgctagctccaattcttgatgtaattcagaatcatgcaagtacttacatgatttataaactagaactttagcagcttgagcaattggactaatattagcacctgttacattaccttgcttatccattcttgcacctttagctgcttcatctaaatattccaataaatcatcatcacttggtctattaaactcaacttctccatacccttctactggtaagtagactacattacatctatttttaattttttcaatcgctttttttctaaaatcatctaatgtcaatctttttatattttctttattcataactacctccaaaatttaaagatgctcaaaaattaagagcaccttttactaagcaatcttttcaagtattctatatttgctaaatttaaacggaaattcttcttctatagcttctttagctttaaatcctgctaatgtaaattcagtaaatactattccttcaatacttactctttctgattttcctgtactcatgtctgttaaacatgttgttatttttatatctggcatcactccagttaaatatgcttctgcaacctcaccccatagtttactatccatctttttaaaggtaagagttccttcaccactccacccatcaaaagatgaatatgttgctggatctccacaaaaattatgatctgaaaattcaccttttacttttgctgagatctgagttagatttgacattaattctgtgtctaaccaaacattaccgctagatccttttaataatctatttacatttacggacatctaaccacctccattaaaaaagagatatattgaattttaagttcgtcatagaacctaaaatcttttatatctccagctaaaaatacatctcttttaaatgtatttctcctaacttttgcatcatcccatgatgcagcttcaacttttccacttgaagtccatgcttttctctgagcatttacatcaacacttgctatgttagcatgttcttcatcaagaacatcagtctctacaagtccatcaaaataaccattaatagcactaataagtaacatctgattattgagtttatttttataatttcctaaatactgatttttaaatacagaaatatatcatccataatcatatcatagcttctacagtttcaatatatctcatatcctctgtattattttcgccatcagtagtagtcattgaattaactccttgagcaattctcacataatttgtatcattaaataatacaaaatgtcctgcttcaagctctgcatcaatatcatctacacctgctacactagttaagtttgtacacttaaagtatgtacatccttttgttacattacatgatgcaaatattccaactaaagacggtaaatattcttctccaggaacttctccacgctcatcagcaaacgttactttctcattaaaaaaattaactacatgcttacaatctgtggtattaactttatatacagcagccttataagtttttttattattttcttggctcttaatccaacttgtaagtattgaatattcatcagccttaccatcacaaatagtaatccatgctgacggcagttgcttttgtaaaatagtaaatgctgttgaaattacatttgcttctgaatcagtaccaattttaacaacagctacttcatatgttccaaactcaaatgcatctttaatatactgataattagttggcgtatataagctcttatcagcttcaacttcagtaatatccttatacatcttataattaaatactgcacttgtatcatctctcattataagagctgcaatacctcgttcacttctttctggcaaacttgtcgctaactgcttgaatataatatcaagcttaggcattgtaatgctcattcatcattcctcgctttctaaattaatatttaaattttccattggttcataattaactccttcgtcaattattttttcaggaatatcttctagcatttctaaatcaaaactacaaataagtacagtatcacttactacactttcaacttcatcaacttcaatataaaaggtatcattaacctttatagtgttaaaaactcattttctataagttcttctattttcatattttcaattgcatattctcttaaatttgttgcaaaaaaataaactcttacagtaagagttctttcttttaacttattaagtcttgctgattttgtattatctaataaaatcttaatgctcggtctttctattggctctgataaatcacttgccactattgaaactgtagcaaattcactgctaaaaagtgcattttcaattttatttttaatagctttttttatttctgatattgctatcatttaccaagctcctttataactacatcttctatgaatttttgacaatctgcattaaattcactctcaaaattctttgctgcattttcaaatacatcatatccctttacgaatcctacctctttccatcatgagttaccattctatgacctttttctaataaatgtgctttaggatcagttgaatatatcctattacttatagctccattttgtctgtatttataaaatttaccttgttttatagaatcataatatttatggcttttatgatgtattcctgaaaaaatagcttctttttgagtttcttgtaataatgattttccttctttttttataaattttttgctttctttcggcaagtcatcattagcaattttcaataattctttggcataattgtcaagatcgtttgtattcgcactcattactccaccaccaaactacacattatttctattctgtctttatatttatagttaggctgagtaaacttaatgtcaaacctttgactattgtatacaaagtacatatcattacttaaattcggtattatattagatcttattgttatcttatgacttacttctgcataaacagtatctccttctgaagctttcacattcccaccagtaggtaatatttcgctccatatagattttacaatatcatatttataagaaatctcatctaactcattagtaaatttaacctttccatatacatcaattaaacagtttagtcttttacttaaattatccatactatatgcctccttataataaatttatagaatgcatatctaatatagattgaattatgggattaatagttcctttatctactgtaaattgcctattatcatacatttctgcgcataatacaaaaactggtaatgacaaatcttccttttcatctatttttatatcatcaagtccagtataagatttaacaaaactttttgaacctgataaaactgcatctaaaaaaatatcatcatcgtttgtatcaattcttatatagttttttatgtcatctaaacttatctcacttactttcatgtggttgacctcctatttaaattaaaggtggttttcaacctttaactaagctgatgctttcatagttaatttggtgattttttgtgcattctcaactttgctatctatttcaatccatccaactactccaatagcatgttgtgtagcaaatttttctcttaaaacttcaatacttacattttcagataatttaacagctaatccagacatatctccataatagatagcagttttgcctgctaccatacctgacatattctctgaagtatacacatctttcccaaataatgtatatccccattttgaagttgcatctttatttaaaaggtagtttccatcaccatcttttaattttctgatcgtctttcttgtagcctttgacattatccaaattgcattagcttgataatcatctggaacttcttcctgaacatcaattaattcatcagcagtaatttctgtttcacttgctgcaataataccgccagttactgtgcttaaccca

SEQ ID NO: 4 - DNA, 29427 bp, Clostridium beijerinckii SIID27451-B11
ttctataactaattcaaaaaacaactatgctcattaactatttgtctaaaaaaaatatttaatgatatgataactttaaaactacttacctagtttccttaaaataaataaatctaaaattgtttataattccttatgatttaaaatgaaggagaaatgcctaatgatagatttacacattcatacaaataattctgatggagattttgatgtaatagacatattaaaaatgtcggaagaaaagaatttagaatttatttcatttacagatcatcaatctttgatgcatataaaaaaattaacaacctaaatataacggatttatacggtggtaacataattaagggaattgaaattgctttttcatttaatggaatcagcatggatatgttagggtataacattaatatagattctatagaaaaatcaagaatattacaagttaataaaatattaatgttattgaaaaagaaaattctaaattaaattatttaataaaggtttgtaatgaactaaaaattctacattctctaatttatatataaaggccagaaatactcctgctaacgatgttatttgtgatgattttaagctatgatgaaaatttgtatattctaaaaaaattagaaatcactgatagaacaactttttatagaaaacactatttaaaccctaatagtccattttatatacagccaacagaagaccttccaactatctatgaagctgcagaaacaattcatagttcagacggtaaatgttttttagctcatccttatgtatatgacgtagataacatatataattatatcgacagtattgtcaaattaaacttaatagatggtattgaatgcatacatcgtaagcattctcactcacaaattaatgaaataattaattattgtgacggccataacctgttaaaaagcggaggcagtgattttcatacttcagctcatacattaggatttggaaatgatggtaaaataccaattagttatcctatagcccaaaactggctacataattcattcatatttatttagcttaataatatattgtgaactcccttttattatataccttgagtttctcttaataagaatacagataaagtgaacccttttaagtaaatcctcttccagcgtttttagctttctctacttaattgggttcgctttataataatgtttcttataattttcatataaatatattttttattttataattatctcttttcctttataggttttccatatccatatgcaccttcaatcatgcaaatatctgccgaataattacttgccttttcaaatgcactgagtatttcattttcagttaatttattattatctttccacccaaatcttaacaaagtaacaataaatgccgcgatgaaagaatctcctgctcccattgtatccactggattaactaatttcacttttctattatagtatttattgccatcaaaaaatacttgcccatttttccccatagttactaagacatacttacatccaaaatcgtgaatcttcttttgaaatatctttatctcatttatattcatattctcacatgaaaataagcctaaatctatatacgttattaatcaatttccatctagaattcactttactctaatgtccaaacccctgatgtttcctataaatatttatatattttcatattttatataaacctataaatatataaatctaggaatatataaaatatgaaaatttctattacttaaaatgaatcactgaatatctgcatcatctctaaaaagatcttaaaagtaagaatataattttttaatcttcaacaatatcatcaataatacttgaatttttcaacataaagtttttttatctaaaattaaaacattatcgtaacgttaacacttttgtttacatataataattcatggtaatagttcaagaatatatatcttaagataaaataatattatggaggaaaacaaatgactaaaatatatgaaggagacgctataaatcaatatactggcgtaaagccaactgaattaatgcagaatcatcaaatcttttatttagagttcctgtattcctaagccatccaagtagattgaattctattcaacaagaatttgttgatgctataatatctaaaataagagaggctttattatttccacgtaccctaccagtaaccgaacaatatcccgaaactccattaacaaatatcagaagaatgatgctatctagctatggatttatttcacttaatcttaatcaacgacaggtgtatataattcaaaataatcttggtcaacctcaaaatcaatttgctcttgagggtagtccttttgctcaaattgaaccagctatggcttatcaatacgggcttcctattcttcttatacgagaagctggagtagaacaaagtggcatttggtcatttggtataggtccatttctaattttggagtgggatcctacaagaccacttgaagatttctttacaagtaatgcgtggctagaaatatttcaaaattggatctcccaagtaagaaacggattttatcttcaaactcagcctgaattccagtattcttgtaataacactgatgtaaggtaaattaaaaatatttcttagtttttatactccatctaaaagatctaagaaaagctgttacatcacaaaggaattctttatgtaacagcttaacttttcttttaactgacattaaagtactttttaaacacgattcttaattattcattataatcttattaagacatacaaaacttacacacgctaaaaatccccatgataatttaatctatcatggggattaaacaaatactagtaatatctgaattaatcaacatatattaattaatatatatttgcttcttattattcttcctctaaaatttcttctacttcctctacactcagccctgtggcttctgcaatttcatcaattttcaaagcccattaaatcacgagctaatgaaatcataagctttttcacattttcttcaacagttggaggaagctcagacatatcagttaaattttctgttaaatcaaaatattcttctccataagactcttcttcttctccttgttcaaaaagtcttcttttcttagccttttctctatcaaactcgttaagatatactaacttactattgtttacttctaaatcttcatctgaaaatactgttataccttcattctccaataaaagagctgtaattcctttgccttttatcttattacctgtaaagttccatcatagacaaagttagacccacatgaaggacttccttcttttaatatagcttttgtggctccaagttcttttgcaatttttaatgtttcatatgcaccatctataaattgctttgtaacatcctcacctttattacttaatgcttttccattcccatctaacacttcacttgctgcactatttagctcaacaggatttcttggagttggtaatccgcctaattgttctggacaaactagaaccgctcttccttctctaaataattttaaacatctatcatttagattatttttaccactatatttacaattaactccacacaagcatgcacttattatgtacatattatcacctcttatctaacgtacacttaacactataaaacaaaaacttaagagaaatttaattatagctttacttaattatacattaatatttgtataatattcttactaacaataattttaatgatatttttaacttaaataagtaaaaatattaggtatatgaaaaaataactaccccttaagttctaccatagtaactccgtctccaccttcaccatgcacctagtctatatgattttaatgaggatgtctcttaagcatatcatttattgctttacgaagtactccagttcctttaccatgaactattgttacttctcctaagttagccatatatgcatcatctaaatatttgtctgctttatagcatgcttcttctgcatccaatcctcttaagtcaactctggattctacattacttagattaagctttacttctctttttcttcttactttttcttctttagtaacttgagtttttcttaaatctttaagcttaacatttattttcattattccagcttcaacttgaacttcgcctctgttatctggcatagaaacaataattactttttggtttaatgaaggaaggtaagcttccataccaagagtcacattagttatagactccccttcattttccttcatcttgtgaattcctttttctctttcttctaagctatctttaagtttctttctttcttcttcaagcctttgccttccaccgcctgctattccaagcttttcaagctctctcatagcttttaaaatatcatctgcttcatctttagcatttgcaatttctctttagcctcaccctagcatccatataagctttttctctagtattttctaattttcaagcttttcctcgtacttctttttaagatcttcggcttgatctctaagcatcttagcttctcttgcttcttttttagctattatactttttcttgaagttctctgattagattttcaaattgaagattttcttcagacatgtattcttttgcgcgtttaatgacaccttctacaagtcctaatctcttagaaatctcaaaggcatttgatttacctggaacaccaattaataatctataagttggcctcaaggtttctatatcaaattcaacagaagcattttctaccctctgtttttaatgcataagccttaagttcactatagtgagtagttgcgattagctttgcgcctctatttcttaaagtttctaatattgactgcaagagctgctccttctgctggatctgtacctgcaccaagctcatcgaataaagctaatgacttgtcatccacatgcttcattatattaactatattagtcatatgagatgagaaagtagataagctttgctcaatgctttgttcatcacctatatctgcaaatatttctttaaagaatgctagaggagttatctctagctggaattaataatccgcttagtcccataaatgaagtaacccaacggtttttattgtaacagtcttacctccagtatttggtcctgttatcattaatgtttgaaattcttctcctatatatatctgatggcacaactttatcactttctattaatggatgccttccagataatatgctaaatgctccatcttctctaactatcggctttatagcatttaatgcagatgcatattttcctttcgcaaatataaagtcaaattcaacaagtacctttaaattactcaaacatgagtccccattaattttaactttcagagaaagatcagaaagtattctttctatttcagctttttcttttaaaaatagttctcttatttcattgtttaaattcactaagctcataggctcgataaaaaacgttgctccagttgaactttgatcgtgtacaagccctggaacttgacttttatattctgattttacaggaagcacgtatctatcgcctctcatagtatataaatcatcctgtaaatattttgagttacttctaacaatagaacttattttttctctaactgaagagttcttttcttttaagcttcgtctaatattataaagagtttggctagctttatcactaatttcatcctctgatactatagctctttctatttcgtcttctaacgcttttactggagccaatatgtaagctaagtcttcaagttttggatatgacttttcaacttcttctcttttaaagaattccttcatatttctcgtagctttaagcattccaccaacttttaataatgccctggtgataaggttcctccctttttagctctttctataccttcatgtataatcagctaatccttcaagtggtggattccctttgatattaagattttcaagagcctcatttgtctcctctaacttattatttatttcatataaattatcataaggctcaagagcctcaacttttgctttagcagcatttgttcttgcatatttcttaattttttcttttatcttattaaactctaaaattcttagagatctttcattcatatatcccacatcctaacaatcaatcaacaattgacagcatataagagataattaagactttatacttataaaacttaaataatttcttactaacaagtttcaatgttatctacatcttaattatcaattacaagccgtcaactatttcttgtattattctactccacgtttgtagtggcccttagtatacttattattttcgttttttgctttattcgcaatttgatttaaaacatcttttacttcatcatagctttcatctttaaagtctactctaaaatttgaaatattaaagacttaagttcttccatttcatcaattaaattgtagctattgaatttaaatataacttctacagctattatcacccaaacagtaaaactttcattcattctatctattaacttaaagttgtccttcatacacacaccactacattcttttttagatgacttattaccaaaagtacttcccataggacaatattcactaatcataagctcagtttttccataaatatttattcccatgttgcagttagtgttcttcattaattctttatttcttttcgatttagttcaagacttaagaatggaatgtcaacgtcttgcgcataaaattcagccgcttctttattaaatatatttaacttataatcacctattataaatagtttatctttatagatttttattattccagcattagatgtaattattccctttatataaggttttagttcatctattatctttactatgctattaaattcctgcttaataatacttggaacttttaaatatatatttttatcttttgaagtctcatataaattctttaagtcatttttattcaatgcatgtttttgcctgctgaaaaatatatctaacgctatattttgagctttattatcctcaagtagtgcctttaattgatcttttgtaatacaactataaatatagcctaagttttcctgacattttgcattccattctttaataggcccttctgttcttttccttctatatgaacttacttcttcttttaaaatctttcaaataattctcttcttagattatttatagctgaaattcttataaatccatcatcaaaaatatcgaaaaatatcttgtcaaatttatatggaatttctcctgatttcttaagcttcttcaactctttctcttgttaatggcttattagttgcttcttcaaccatttccccataaactctatattcttttttattgtattttgctttaatacaaagaggtgcattaactttaaattcaatctctccagctaaatttatcttccttttataaggttttaaatcatcatttaactcatcataaagttttttatcagacatcttatatagcttatagccttttttatatcccccagttggaaataacttgactgtttcgcccttaaaagcttctttaacttcattattattatttaaaattttacttaaagtaaatccatcgtcattaaaccttataccatcgcccaaagatacgctggcttctagtttaacttctccactgttagatacctgacctatatatacaccagtatttttagggtaattatagctcatcatatcttttcctacatttttatatagatatgctttagcaaaaccttctctattaaatagttgtgctaattcttgtcttcccctttgtaaatcaaactttgtatttactaataccttatcaatagcttttctataattccttgtaactccagcaacatattctggctttttcattcttccttcaacttttaatgacgaagttccactctttataatagcctccatatcatcaataaagcatgtatctttaggacttaaaagataagcctttctttctccaaaattttcaccctttaaagtatactgcattctacaaggttgtgcacatcttcctctatttccgcttcttccgccaatcatagagctcattaagcattgtcctgaataacatacacacaaagcaccatgcacaaatatttctgtctcaattcctaaatcttttgaaatgtacttaatttcatctaatgtaagttctctagataaaactattctctgcattcctttttctctaaagtataaggctccttctgcattatgaattgtcatttgtgtagatgaatgaagttcaaaatcaggatacacatctcttattaattttactaaacctaaatcttgtattattattgcatctactccaatttcataaaggtatcctacatattttaaagcttcctttaattcactttgttttaaaattgtatttatagtgacatatacttttacattatagctatgagcataatcaacagccttcatcattgtttcattatcaaaatttgatgcataagctctagccgaaaatttatttccaccaagatatattgcatctgccccattatttatagcagcaattaaactctccatgcttcctgctggagccagtaattctatcttattcatatttctccttcattgattatcttttcttttttacaataggacctacttgttcttttttagctcttgcaatctctatttctttgtttattatttctgcctgtagttcaaataacctattgtgaaaagttcttgcttcttgattaagtttatcattttcattagttaattcttctttttctttagatagtattgacatctttccttgtaaatcatctattgatgccttgcttgtatttaagtctttttccttagcttctatttctctttttaattttaggaaaattccttctttatcttctaattccttttctaatctagctaaggctctctctctacttgctaattcttctttaattcttcttaagtcattttctttactctctaatgtattacttacttcctcaatctcttttgccttaatattaacttctatttctttttcttcatgaacttctttaagctcaccttttagcttttcattatcatttcttgttatttttaattcctcttctaatctttctttttctctatcagaattctctatttcttgtgataatttatcgttagtatcatttatatttttaatttcattatttaaaatctcttgttccttagttaacttattcatttcgcttactaaagtatccttttcttcatttaataaatcaatttgacttattaaagcttcattttctttatttagcttgcttaatttttgtttacattctgtaatctctttctccgattcttcaaataaatcatttagctgtttattaagatcagctttttccatattattatcttgaatttcttttgttaatctaacagcattatctttttcaagttttaaactattatttaattcctgctctctctcaagtaattttttaattttcttatttaattcttcttcacttaataacaattctgtaattttattttttagtatttctttttcttctctagctttagaagttattgcattattagtcgtaatttgattttctaacttttccttatactctgcaagttctttagtacatttatgatgatcctcatttaatttttctaaatttgctttgcataaagcatattctttatttataacctctttattattaatttcttgttttaaactttcacttgctttttttaattcctcacaaacattattataatcagcttctagcgagatattcttttcttgtaatagaagcatcttattttctaaatttaacttagtttgagtaagttcttttatttgtttatctaactcaaaatttacggcagtcatttcatttaattgttcagctaccatatctttttctttattgactttagtaagttcgctagttaaactacttacttgttcattagcttgttgcacttgcttatctaatctatgctctttgtttttagcctcatctatcttcttataaagaatcttgctcttctctttatagtctgaaatatcttttgttaaggcttcattactattcttatttctcttattctcatcaattattaatttattttcttttttcagcttttcattttcaattttcagtttattaatttcgtcacttaacgaactatattttacttctacattattatatttcccatgtagttcttcttctttcttctgaaaattattttgaagttctgatttttctttacttatattttctaactgcaagctaagctcgtctactttcttctttaacgaagaattttcaccactaatggcttcttttattttaattgctttatctaattctaaatcacactcgtaaagttcatcagctatattcaccgctgctaaaacagaagcatctgttgtactaaaactagctttcttagacagaatttctttaattcttgtatcaacaaaatttgctaccccaagcaaatatttttcgtctttttccccttttaagttataattcataccatttatattaactgttaccctaatcataataatagcacctcgtaaaattctttattacttctaattatatggtatattcactaataaaacaattatgttaggttaactgaaccttgaattcttgcactttttctttaaatttacgaaaaacaacctatatctattcaattgctaaaaaagttttcgtacttcttaaattttatgctatacttattttgattattttattgtttaattgtataaaaatgattaatattactttattgtgttaatcattcttatatataactagaattgggcggtgagtgaaattaatattaaatctattttaagcatattactatcaaaaattactgcattttctgcaaagcacattgtaaaaggtggaagtaatttcctggtaagatagctttaaaaattgataaatcaatcttaaaacatgttagtaatggatacaaggtaattctagttactggaactaacggaaaaacaacaactacaagcatgatttataatatcctaaaggaaaataaattacacgttataacaaatagcactggagccaatttatacccaggtatcgtagcttgttttgtttccaactattctttttttaagaaaaaagaaaatccttatgcggtaatagaagttgatgaggctaatgtaaaattcattacagaacatataacccctgaaataataactgtaactaatttatttagggatcagctagatagatatggagaggtttatacaactctagttaaaattttagaaggtgtgactaaagttcctgagtcaaaactagttttgaatggtgatgaatctttactcggaaagttagatgtaaaaaatccagtagtatattatggttttaatacacctattaaagaagatactacattggaaataaatgctgatgcaaagttctgcaagttctgcaaggcaccttattcatataatctagttacttataatcacttaggcgaattttactgtcctgaatgtggttacaagcgttctgaacttgcttatgctgtaaataaaatttttgatttaacacctgaaaactcttctgtattaattaatgacactgaagttttcataagccaatcaggtgcttataatatttacaacgccttatgtgcatttgccatttcaaaagaacttggaatagaagactcagtaattaaagcttctcttcaaaatcaaagttcaagctttggcagacaagagcaaatatctattgataataaagatgtacaaattatattagtaaaaatcctgctggatataaccaagctttagatacccttgctcttaatacgagtgaattttcagcagttttcatgttaaatgataattacgctgacggacgtgatgtctcttggatttgggatgtagacttcgaaaaaatatctagtttaaaaatagaagatatttttgtatcaggaattagaatgtatgatatggcagtaagattaaaggttgctggattaaatgtagataaatttattttaaaagaagattatgaagagcttacagataaaattaaggaatctgcgtctaaaaaaatatatatattggcaacttatactgcaatgattaattatagaaaatatcttcattcaaaaggttatataaaaaaactttggtaagataaggagaatactattatggaattaactatttgtcatttatatccggatttactaaatgtatatggtgacgtaggtaatgtactcattttaaaacatagagcagctcttagaggaattgatgtagatataataaatacttcaataggtgaaaatatagataaagacaatgtggacatcatcttcttcggtggtggccaagactatgaacaatctatagtctctaatgatttaaatgagataaaaaaagacgctttaacaagttatattgaagatggcaaagttatgctagctatatgcggcggatatcaattattaggtaaatactacactgctccaaatggagaaaaaatagatggacttggtattttaaatctatataccgaaggcggggatactagatttattggaaatacagaaatatttaacgaagaatttaatgaaacttatgttggatttgaaaatcattctggtagaacatatataaatgaccatactccccttggaaaatgcattcacggatatggcaataatggtgaggatgggtatgaaggatgtatatataaaaatacatttggttcgtattttcatggttcttttctttcaaaaaatccagaatttgcagataggcttctaactttagctttgaagaacaaatacggagaagatgtaaaattagaaaacttgaatgataatttcgaattaaaagcaaaaaattctataatacaaagactaaagtaaatattacaaaattgtaaattctcatatattgtttgtaactttttacataacatttattgttatagcattacataaatgttatacttaaaatgttttattatacttaaggcatgttaaaaaagattattattttatatatgtttaaaagaagtggagagatttgacttgaaaaaaaatttaattttaaaagcatttgcattaaccctttctctttctttatttagtccattaagtatggcaagttatgcagcaagcaattctgcaaaacctaagactgaaacttcatcagagaacttaccaaacattaaagctgaagctgctttaactatggatttagaaacaggagagataatttattgcaaggatgctgacagcaagagatatcctgctagtacaacaaaacttttaactggcttattattagctgaaagcaaagacaaagcagatcagcttgaatatactaaatctgcaaaggaacaacctgaatattctttaaatttaaattatatgcataatactatgcagcctggtgacaaagtaactgctgatgatataatgaagggcttattacttttttctggtaatgatactgcatatgtaatagcagacaatatttccggggacgttaaatcatttgctgaattaatgaataaaaaagcaaaagaacttggcgctaataatagtaactttgttactcctaatggacttcatgatccaaatcattacactacagcatatgacctttcaatgatcatgaaggcagcttttgcaaatccttgggaaagagaaacaatggaacttgaaaaagctcctataaatttaaaaaattctagaataattttagaaaatagaaacttaacacttggtaaaaatggtaaccttgctggtaaaactggtacaactaatgaagctggcggttgtttagcgactgtttatgatagagatgggcgtcagttaattggtattgttcttaaaagtagacaaattgataatgcagatatgacaaaatttaatgatatggatgctattatggattatagctatgctgctgaaaaagaagtttataaagcaaatggtgaaagtgttggaaccgctgatgtaaaatataaaccatttatattatttgggcctacaaaaactatctctgttccaattaaattgactcaagatgtgaactattataaaaatgctataaacgattctgaatctcagattacttataaaggaacagattctactgcatggagtttactattcaataaaaatactaaacttacttatagtacaagaaatcattctgaagaagttacaggttcagttgatatttcactaggttcaataattaaagataatttaattatctacatttctactttagtaggtttggctattatcgtaactcttattgctcttattaaaaatgctgcatctaattcaagacgcaagaataaaaattactatagccgttctaacagaagaagaagataattaaataactttacttaatttctataatatatcttaagcatcttcaaaaataggttgtattcttcctaggtatttgaagatgcttttatttaaggagtaattaacatgaataaattgaattttaaaggcagtgttatgcttaatcccacgcctgtagtacttgtcacatcaaaaaacaaagatgataaagttaatgtttttacggttggctgggtaagtactgtttgcactaaagaacctataatagctatgggaatacgacctgagagattatcttatgattacataaaagaaagtggtgaatgcgttattaatttgccgactagagaaatggttaagatcgttgattattgtggagttcgctctggaaagaaagaagataaaattaaacattttggtttgcaacttaataaaggtgaaagtatatccacaccttcattgcaaaaatcgccgatagctttagaatgtaagttaaaatcaattacgcctctaggtacacatgatctattcctgtttgaagtaacaaacgtaaaggtcgacgaagacttaattgattcaaatggtaagatatgctttaacaaagccaacttgatttgttatagccatggtgaatattatggcctaaacgctaaaccattgggcacatttggatattcagtaaaaaagaaaaaaaaagtacataaaaaataataatcctcaatttatttttatatttatatgttgcaattcacaatgcacaatttcagctaaaatttttgcgatatttttataattatgatgaataattattttgcaatatatatatttaaatttaaagcagttacaatgtctttcgctatgtaactgctttcttgtttatataatatattttcaatgtagaataaatttaatattaaaagacaatctaatagtaaatcttacaatttgaaattgtcatatggaggattgaaatgaaaatattaaaaaagatactatcgttcataattatattagctattatacctacttataatcttaaaactgctttatatgcaaatgcacaagttcttccagagaagccagtaaaggtagccacactgttatttgctttagatgatccttatatatctttagtaagaaatagccttgaggaaattcaaaataaaagcaaagattctattagctttacttttttggatggcagaagaaatcaaggtatacaaaatgctttattagattcagctctccaaagtgattacgatcttttattaataaatttagtaagcttagatagaaatactgtagaatcagttattagaaaagcaaaacaaagaaatattcctgtgattctatttaatacagtaccttttgatactgaacccatcaaatcttataatagagctcttcttgtatcaacaaatgctgatcaatctgggattttgcaaggaaatctaattgttaaagaatggaattctgataaaaaaactattgatagaaatggtgataacgtattacaatattttatgttaaaaggtccaaataatagtactgtaacaaatgcaagaagcacatactctatatcaactattaatgatgctggaattaaaacacaagaaattttatctaaattctgttattgggatgaaatatgcgccaaagattctactgaattactatttttgagatatggagataaaatcgaggcaataatttcaaataatgatgccatggctataggtgcaattgaagcattacagaaatacggatacaataaagaagataaatcaaaatatatacctgttttcggaattgatggaataccagcagctaaagacctaattaataaaggtgttatgacaggcactgtttttcaggatcctaatcaaacagctgaagccctttattccataggaatgaacttagttggtaataaaaatcctcttgaaaatacaaattataaatttgatgaaacaggagttacaattcaaatgccctatcaagaatatactcctcaaaaataacactatacacattctattaattaataaggctgttttaaagtaattaagatatatatatacccaattaatttaaagcagccttattatatgtagctaagaaccgaaatttacaaattaaaataacccagctcatccctatgtccgccaagtaaataattaatgtaattttatgaacttacttataatataaaatgtttttctaattcttcaatcattttagatttaaaagcagtaaatttattattatatttacaaattactttttcatgcttcttgtcatataccacaaaagaaatataaactgtatcattatcataacaaagcaaatatcctagttctgaattttcttctaaatctatttttttatactcattggatactatttcatataaattggtttcttttttttctaaaataacatattgtgatctcttctcatcattttcattcatattacaatatctttcatcacttaagtttataaaaatattatcatcattatatttcccaaatggaagatacaaatacctcttctctttaatgaaagaaataacagaatcttttatttcgtcttttctccccttgtattttcttccatccttgttgattgaaaacattaaatccgtatactttccatcccatttaaaatatttcctttgccattcctcaagaaacaataacatattcaagaaatctaattcactgtacttcttttttattaaatagtccttcttaagtaaattctctaactgctcccctacatttttatctatttcttctaaaatagtagcttgtcctcgcttactcaaaaaatctccaaattcatctccaaaactacttgttaaaattatcttaagaatcattttgttatacttcaaggatttttctttaatattcttagcgtatgtattttcactacaactatctaaatattctttaatcaaagttgaatctttttgaatatacccttcttttctcagcctcatctggcttagatccttttttacatactcatccataagatgattctgcttgtccacatctttggcttttatcgatgtaattataggtatagtctttgatactttttcttctaaagcttcttccacattagttaagtagcttttaggaaatttcaaagcacatttactatctaacttttctttaaatttgttaactatatttatttcttccataatatttacttcttttttagatacaactttttcctcaacttcagatataataagcaatttacttctttcaaaagcataccctagtccataagttataagaacttcatcatcgtgagccatatttaatcttctcctacaccagcattaattttttaatatcataaactatcattttttaaattattcataattactctatcttaaataattataatttgcttttcttcctataatcaacaagtaaatattactaaacctcttttatagtcccattatttataatatacatgtataaatatattttttgtaaattctaatacttatatttaccttataatctacctattccacttcatatattgccacttataagaaaataacggattatttctaaataatttctttagaataacccgttatttttactgctaacttttaatagtctttttaagcttttactttattatatgatatatgtataatgctaaattatatactaacggagcaatcatcactgtcattattcctgcaatgccaattgatagactactcattgccccttctacttccccaagctctaaagccttactagtaccaactgcatgagatgccgttcctatagatacaccaactgcaaccttattttttatcttaaaaattttacatatagtcggtccaaatacagccccaactatacctgtgattataattgcaaggactgttattggaacaactcctcctaattgactgcttattgatattcctataggagttgttactgattttggaactaatgattttattacacttgaattaagtccaactaaataagatattcctattatagaaattatccctatagcgctaccaacaaatatacctgttaaaatagccttagcattctttttcaaaagatccagctgtttatataaaggtactgcaagtacaacagttgatggtccaagaaacatatttataaattgaccacctttattatatgtatcaaaatcaatatgaaatgcaaacaaaaaacatattataattcctattgcaattaatagtggatttaaaattggtattcttgtatttctgttaatgaatataccaacttcaaaagccgcaagtgaaagtactagtccaaataaaacattgttcgttaatatttgcatatattctcctcttttcttatcactttatctgtacgtaaactaactatttttccttggctttcttgaaatagcctgaacgacaataccagtcaccccaattattattatagtcgtcaatatacatactaataataattgccaccatgtcgcttttattattccaagcgacgtcattaaaccaactcctgctggaataaagaaaaacgccagatggtctagtaaaaaatttgttatatttgaaatgctctccactttaattacctttgtgtataataatataaataatattatcattcctaatatatttcctggtatcggtagatgaagcattgatgatataaattctcctaatagataaattccaaatataattagtgcttctctaaataacttcaattttatcacactccaattatttaagcatatttgttaaaaaaccaacttctctctattcttaatatgacctttacaatttaatttaccatcattacatggataagtaaaattcctttacactttaagtaaaggttacctttttgttaaatatccttatattttcagtattatatattaattgcactttaaatataagtttctaaaaatatgtttaattttattcattataaaaattaaaacgacttatttattatataaataagtcgttttaagagagtatttgtagagtttaatagtatacttttaacttctatcctttactagtttattttctactattgcaaccacctcatacatgataaatgcaattgctgatagtattacaatgctcatcattaccatatctaactgagccacttgtcctccatatactatcaaaaatccaagaccattcttcgctactaaaaattctcccattattactccaacccaagataaaccaacatttatctttagagctgatatgaggataggaacagagtatggaaatattaaatatcttaatatctgtatttttgtcgctctaaaagtattcataagcataattttctctttatctatttcattaaatccagttaacacacttataattgttgttattactgatattaaaagagcaatcactattattgctggaataccatttccaatccaaaatattattattggagccaaggcaactttaggaagtgcatttaaaactactaaatatggatctagtatttttgatacaaaaggactccaccataagattactgcaattagtgaacctagtattgttcctaaagaaaatcctaagattgtttcatagcatgtgactgcgatatgcttaattaaacctccaccttcatataaagatacaaatgattcaattactctagttgggctagaagtaagaaacggatctatccacttaagatttgcagctatttgccataaggctatgaaaataaccaatataagaattctagtaattaaaatttttctttttattttctttaccttattcaaatatatttcatgttccttagacatcttatttacttcactagcatttacacttttcttagccatttccatcattcaactccttccataacatgttaaaatagtcactaaactctggagctcttctcttttggaaaggagttaattcttcatcgctaaaatgtataggaatttctgccttcacactagatggtctcttagataatactattactttttcagacaaagaaatcgcttctgctatatcatgtgtcaccattattgctgtctttttttctgtttttattatcttataaacatcgtcacatactaaaagtctcgattggtaatctagtgctgaaaatggttcatctaaaaagagtatctctggatttagtgctaaagtccttatgagtgcaactctttgcctcatgccacctgaaagttcactaggatgatggttcttaaatctcgttagcccataagcatctagcaatccacttactctttcctttgattcattatttagctgcttttttatctttaatcctaagattacattttcccaaaccgtattccattcaaataaatgatccttttgaaacatatatcctattttatctaagttcttttttacatcttcacccttgtatagaacgctaccattagatggttctaacagtccgctcattatatttaataatgtagattttccacatcctgacggtcctaaaatagaaataaacttaccatcatctacttgaaaattaacattatttaaagcctgtgtttcacctttaatagaatgataattcattgatatatttgatatttctaacaagctcaaataaaatcaccaccttttcatctttatgtgacctttatttagctgccttttcagcaaacgaattatccacaatcttgctaaattcaggtctttgcggcattaagcttgaatcataatcagtaattatatccataagtctatttaaattttcttctttaatttctggtgtatgagctatagcatcaatctttttatagttatctataactgtcataattgtatctttatctgtacctgggaaataatcaattatgctatccgcaacttcctctgtactatgactaaaaaaccactgctgacctttatagatagcatttgtaaaaccttgtattacttgtggatttttatccatataggattttgttgcaaaataacaagtataaggaattaatcctgattcttcaccaacagatgcaagaatatatccagttccctctttctgaattgcagaagctgtaggttcaaagagagccacataatcacctgtaccgcccttaaatgcacctgcagttgcagcaaaatctatattatttaccatattgacatctgtttttggattaatattattgtgtttcatagcatattcaaaagccatttctggaacaccacccggtcttcctcctataatatttttccctttaatattttgccacttaaaattgtcttccttagttcgtccaaccacgaaagagccatctttttgggtaagctgtccaaaaagtactgggtagtcttctcttccttgattattaatgtaaatagtttgttctggtccacaaaaaccaatatctgctgatttacttaaaactgcttgcatagttttatctgcgccttgacctgtttgtaaatcaatttcgattccattctctgcaaaatagccttctttcattgcaacatacataggagcgtaaaaaactgaacgtgtaacttcatttaagcgtacagttactttaccttccttagttttattattgctactacagccaaacatagatatggcagttatactcgaaatcaataaagcagttaatacttttaacttttttttcattaaataaagcatctcctaatactgttttatgatgtatcatatgatatttaatcaaagattgttctaatatatatgctctatttgctggatacaataagtcttaatttatataaactatttgggcttaaaactttattttgtaaacaattcacatttaacaattttagcttaaagcaacgcacaaagtataaacttctaaatttaattgtcgatttttaaataatatgataatataatcatatcgtttttataaaaaaggtattttatccacttatcatttctaagaacaatatcaacaacattaaatgtatagaaaggggaatttaatatgaaactatggtccattatagcaataggagtatatttacttattttgcttacaataggatactactcttacaaaaaaacatctaatctttcagattatatgataggaggaagaggactcggacctcttgttacagcattatcagcaggcgcaagtgatatgagcggttggatgcttatgggacttcctggagcagtttacctaactggtatatctaatatttggataggaattggtttaaccgtaggtgcctactttaactaccttctactggctccaagatttagagtctacacagagattgcaaatgactctatgacaattccagactatttagaaaatcgttttaaagataagtctaacatacttaggcttgtatctggtatcgtaatacttgttttctttattctttatgtttcatcaggacttgttgctggaggaaaattattcgttgatacatataagctaacttatacaatgggtgtagttgtcactctatctgttgttgttctttatacgtattatggtggattcttagcagttagccttactgacttcttccaagggactttaatgtttatatgtttaatcactgttccagttgtagcgtatatgaatataggggtagatcctggaacatttgtaaataaggtaaaagcaattgatcctaaattatttgatatatttagagggactagcatagctagtattattagccttctagcttggggcttaggctattttggacagcctcacattattgttcgtttcatggcaataaaatctgcaaaagaattaaaatcagcaagaagaattggtattggatggatggcaataggtcttttaggtgctgttgtaagtggtattataggtcttgtatattttactgaacataacactccattaagtgatcctgaaacagtttttcttagacttggtgatatattatttcatccatttattacaggaattatattatctgcagtactagctgctattatgagtactatctcatctcagcttttagtttgttcaagttctattacaaaagatttttatctagctttctttaataaagaagcttccgaaaaacaacaaatggtaataggtaaattagctgtattagtcatagcagcatttgcgacagtacttgcataccttccaaataagactattttagatattgttggccaagcatgggctggttttggttcgtcttttggtccagttcttttattaagtctgtactggaaaagaatgactaaatggggtgccttatctggaatgattgttggtggtataacagttcttttatggattgttttaggtttatctagttttctatatgagatgattccaggattttcattatcacttctatctgtaattatcgttagtcttttaactaaaaagccagatagtgatgtcagtaaccagtttaataaaatggaaaatatattaacagatatgaaataatacatttgttttctaaaggtatagtattcaattaatattgtacctttaacttataaaaaataacagtaagactaataattctatggtcttactgttattttttatccttatttgcttattttaaattttgatactaactcatttaatctatgggccaatttcgctaattgattagctgaatctcctatttcgtccatagtaacagcctgttcttcagctgatgctgatacctcttctgttgctgatgccgtgtgttctgatataattgatgtttcttgcatttctactactgtatcttttgctgttttaatcatagattctgtagaattatatacatctcgaactacatcaaaaatgtttcttatagctttttctatattatcaaaatgagtttcagcctttaacgctgtttccataccaacagtaatttccttagaaccttcatccatactactactaatggtctcaatttgattttgtattccacttattaaagccgaaatctgactggcagcagtagcagattgttccgcaagggttcttacttcatctgcaacgacggcaaatccttttccttgttctcctgctctagcagcttctattgctgcatttaaagcaagcaaattagtctgacttgcaatattagttataacttcaacaatcttaccaatttcatttgatctgtcaagtaacattttactttcttctaaattggttttattattttcaacaattagcttcatactttcaacagctttatccaccgcttcaaaagcaaccgcacttatgttatgtgattcttcagcagtttcaagcatatcattacacttattaacaacaattctacttacttcttccatttcacttgttttctcgctagctaaagtcacttgtcttgactgctcagttgtattttctgctattacttgtattgctttagcaacttctccagtgactttaatactatcatcacacgagtttgcaagattagttgaaacttcatttacctttgatgattcattatttatatctgtaattatgcctcttaatgcttctatcgtatgattaaacgctgtagcaagatttccaaattcatctttggattttacttctattgaaccacttaagtctccagtagatataacttccgcgaactcattaaggcgtactaaaggtttgatcaacttagttgctgctgtaaatatagctgctgataaaattactataatagctataactatcccaatcataattagtatcaaatgattagacgaagcaaaaagttcatcctcataaacaacatttataactgtccacccagaaatcggtgactttgcatagaatgcaatttttttctcagatccacttccaaatttaaaaactcctggtttatcaccttgaatggcttcattaagtttagtaagatctgaatcgttaactgtatttattttctctttcatggcccaatctttatttggatgaactataaaagttccgtcacttcctaataatattccgtaacctttttgaccatattttagatttttcacttgattttctactgcttcaatagccaaacttgaggcagctccggctgtaacttttccttgtgcatctttattccatgcaaccatcattacaacattcttatcataagcttcagaatatgtaggcttaaatattgcatcataaggaacgccatttgtctttgaatatctttctgaagcttctgttgcagcacctttagcccaattagcagttgcaaattttccattgcttacattataaaatctcgcttgtagcttattcaaactatcagcgttactccattcattaggctctaggctatttagtatatgcactgctgcatattcgtctggatatgtatttttaataaaattaaatcttgataaatttaaatcatctattatgtttaatgatccatctgtgctatttaaatttaaaccaggatttttttccaaaacttgtttaagcactgggctttgagctgtttcttgaacttctgccattctactcgtcagccatgtattaatatgaccagttgcttctgttgttcttaatgacatggaattcactaattcgctttctataatgctcctaaaattaatatatgcaaatcctgtcagcgatatcaatccaactattactagcggcaatattattaccattaactttgatttaaatgatattctcatgattaatcatttcctccttaaggtgtacaaattttttaatcttgaaattcaccgttatgcaaccatatatgctttaattcttcctgatttctatctaatgtttttctctctctcatagcctttgctggtatacccgctaccaactcatttttttcaacatttttaccgactaaagaagaagctgctactattccttgtttttcaattgttactccaggcaatatagttgaattagaatatattttagcgtaatctttaattactacttttgcatatgtccttaattcatgttcatgctcctcatgagaatgagtaaaaattgtaacgccttcgccaattcctactgagttacctattgttattccaccttttgaatctaggaaagcacctttgttcataaatacgttatctcctatttctatattgtcaggaacattgaaacgtacattttcttcagctataaaattctttccgcatgacttaaataatttttttgctaatatctgtctataaggaatagcaaaattggcaattaagcacataggtgatttatctagtacatcccataaaaaatgaagatatcttttttcttctgaaaattctaattcattatttttaggtaaatagtccccatataatttcatttcatctaatatttcgtatggaaaataacattttagagaatttaaaatttctattacgccctctttatttatcccttgttttactatgacttctacttcatttaataattcgtctattttactcatatcatttcagattattaaaatcgcaaaaaataatcttttcgcctccttcatagtcaaactttcaacgcgattttataagcaacattaagtcaaactgtttgtccaacttattttagttttgctactaattactatgattatattttattagccttctccactcccttctgatcttttaatattatttataattcaaacttcgaatctctagcagcaaatactttgcacatgaaaaaataataaaaatagctttcttattgtaagttttaagagcacaaaaatggtgtctacataattgtggacaccaaaattaaaatataaaatttattattcatagatacattttggcaacctgacaatcatagaaaattaaatttttccttagactcatagctttgcgaccctatttttcaataagtgtgcctattgatattatatttttttcatttttattctattattacatcttttacaacatttttcaacttatacacactaaatttaagtcacaatattgtaaaaatggatattatttaatcgtttaattcaatataataccatttattcaatagtatatatttataaatttaaatatattatatatatttttcttatcgccatgctaataaattcatttaaaaatcaataaatttttcaattccatatatactaattcatgaaaatatatctcctaaaattatttttttatagaatttactttttaagttctgtatcaaactctcttcttgtccaagttttaaaatcagctggattttcttcattaattaaaaatactcttgcaccacgaggaattttgtcatctccatatcctccgtatccagtatatccagcatatccaagcctaacaccatctaaagcagcacagtaattattaaaatgatcatgccctacaaatatacctttcacatccccaattttaactattttgttaaataagcataaatttatcttggcacagctctcatcttcaagcctttcaccatttactaatccagtcttccatgccttttcaaatttctttaaaggtatatgaaagaacataagcgcaggtattaatcttttatattttttcttcaaatttatcgctgttcttttataccaccatatttgagtaagttttatccaatcatatcctccaataatggtaggagcgtattttcctgaatctatcatatatatattaaatttaggcgttttatcttttgaactttctacaagaagattataattacctatcctatcaaaagttttataccccacttgactcagattatgtttaaagctcatatataaattcatcatttcttctttcgtcatcatattatgttcatcatcatgattaccaaaaactatacaccaaggtacatttctattttccattggctccgctatatgatttatagctttttttacatcttctgctgtctgacatttgccgtcaataatatctcctgataatataaccatattgggtttttcgtaatctaatatcttattcataagatctatagatttgtctctgctcggtccttcatgtatatctgtaaattgaactattttaaacttgccattactatcaaacctaaggttatttttcatatatattcacctttcttaaaatataatattatatgaaaactaggttgtatctgacactaactatttgctaattagaccttattttaaattgtaaaaggatcattgcattttgcaacaatcctttatatcttataaaacattaaatatatattttttaattaaatttctacatttatcaattaatttatcacttggctcactagagtcttaaacgtaaatttattattacaacatatatatcataatgattttatatttttatagtttaaattcttcaattttttctttcaattcctcagccatatcttttaaattattaaaattatcaacaaagctttctgttgacgctgtcacttcttgcgctgtcgctgaaacttcctctgttcccgatgctgtttcttctaatatcgctgataagttttctactttttcaactacatcatccttcatattatttatggtgctcacaccttcagctattttactcaccttttctgttaaactttctatagctgttactatttctgtaaatatcacttctgattctttaactgcatgctcttgatcatctactgttccacttgtttctaataccctgtcaactgctaattctgatttactttttatttcttttattatttcatctatttgtttggctgaaactgatgtctcttctgcaagctttcttatttcatcagcgactactgcaaatccctttcctgcttctcctgctctagctgcttctattgctgcatttaaggctaaaagatttgtttgctctgtaatcgcacttattgccttattcatggtgc

SEQ ID NO: 5 - DNA, 23200 bp, Clostridium beijerinckii SIID27451-B11
atttctaatatctaaagaattacttatcactatcgctgacatttctaaaaaatctgaatatacttcccaaagggaatgtttgtatgataaatcttgaaacatcttaaccatatttgctttactcatatagcacctctaattcatatatttttcatgagatttcttaacatctgattcatcaacctggatgtaaagctgagttgttgcaaggctttcatgccctaacatcctctgtatttcttcaatcttcatgcctctcttacttgctattgttgcacatgttcgcctaaatcgatgcggatgtacatttttaatttcagtttttttccctatattttctaatattatttctaatccagatacttttaattgtttatatggactttgtacactacaaaatacatattcactattaccttttctatttttcaaataatcctctagacgtataagtgctgcactatttaaaaatgtaattctctctttgttgcctttgccagtcacttttacttccccggtattaaaattaacatcactaattttcgcattagaaacttcttctgctctagctccagtcgataatagaaatgtaactattgcaatctctcttttatcaccacatgccattttcaattcttcaatttccttataattaaaggcttttttaataacttttttctgcttcactttcttaatctttttgcaaggattttttaaaatatactcctcatcttctaaaaattgaaaaaatgtattcattgtacgtctcatattatccacgctagtctgatttacagttccacctaactgataatttgctaataaatactttatatcatcagatgttattaaattaaaaggtttatctattctcttaaaggcttgatttaaagtgtttctgtaatattttaagcttctatcagataatccctgtaatttttttgttataaaaaacattttgaaccatttttcactttcagttaattcatattttattaatcctgtttctctttggttatcttatatccgttcagttttactgtaatgaaattgtttaaatgcttatatacatcatcactgcatttaatctttatttcttgcaatatttcattaacaaccgcctccacctatctcaccactttctttaatctatctgaaatgcttaaatgagttttatttagtatttgagcaatcgcatatgtgtcatatcctttttcatgaagatcaaacattcttttattttcttcttctgtccatctaatgtgagtatctagcggaaccggcctatatggtactgctaaatcatatagtcttctttttattgcattttcagttctattaaagtctcttgccaaatctttatatgtgtatctgcaagacttagttttttctataagtaagttatcatcttcctttgtccactttctactatgattaagcttacttggattagttaaatcagcctttcgcttttcatccacccatttaggttcttcaccaataattcctttttcaaatttagcaaaacttagatcttgcttatgctgttccgcccatttccaaaaatccttaatataaataaccttataacttttctattgatttcttatgtttgattggaaaacctagctttaaaagacgtttctctaagtagctatagctgccactatatcctatagcttttataaatttgttaaatgttacatactcaccctgatctataaatcgttctagccctatcttttgagctttacattttactgcatttactgttctcctaaagttttagctatttgaggaatagatactattccccatttatcttcaagtaaatccaattcttcttgactccatgttttagctcccataatttactcctttcccttgatactgatagttatttgagaatagatacttaaattactaatgctttaagctctattctctatttagttattgttctacttctctaaaatttaatttgaataggttcttctaatgcatgatatttactgcatcttcctattccatctatacctttattacaaaccttacattccttgcattcgtaagggcagtcagaacagcaacaatatttacatccttcatacttttctatcggaattactgcttgcatgattttatatttctcatattcatataattctggctcgctgtatttacctcttaattcttcaaaatgtttatgtgctgcaataagtgccttttctctgtatcagcttcaaatactttatttttataggtatttgattctttatctaaccatagtaatatccattccatagcttcaccttatttttttgaatctgatttattaaaaaattcatcataacattctttacaaatatcaatagtatttttatttatttggtcattcttatcttgtttttataaagtattgttttttcacataaatcgcattttatttttttagccatttagtctcctatctttaaaggtttaataacctcatatcttccaccaaatatcttttcaaaatcgaaaccatcatctacaaaaggacttccaccaaatgttgaggatgtaattcccattgtttaaaccaattctttgaatgttcataaaatactttattgtggcccagatcattgtatacagtccatttcttttcttcataagagtactctggatgctcttttattaacatttcaatgctgtacttatccctcaaaggattttgtccaaccttccaaagttttatcttattatcttttaatattactgaagcaataattatatgtggccatgtatcacaccaatgtgccattattcttccaccttcccttgctttataaaatatttgcttaattcttctttaaatctgtcaatacattcatttgcaattgattcagaactaaaatatattgttccaaatgatgaattttgcatttctacttcccaacaatataaattattactcacgaaattatatcgattacccatttaaccccttctgtatcatctaggcttgtcctgaatttattatgctgctttgcaaaatgctctactttacatttcagatctattgatcaagtttggattcatctatatattcataagcttcaccttcatcttctatatcttttattaaatcaataaggcttttaggtgaaatatcaactaagatttccctatcagcttgattactttttatatagataggttcacatttataacttttttcaataatctcactcattttaagttttctgcctttcaactaactcacctcacttatgtttatggttccttaatctttttccttatgaaatctatacctttttgaaataccattgttttatattaatcttggtttctccattagggactgtatacttttgctcccaatactctgaagtaaccacagtcaacatattgctgataaggaatgttatttctgtccaagacctttttatctcttagcaatgcaaataaattatttttcctatgcccctgattccaagaacctttgcaacatgacccatttcgatactgtcttttgagcctgcaacatcatcatagaattctcctttaggcccaatacttttaccttcttttcagcttccaaccttgcagctctttcctcttttaatttgtagctgcagcaataagtaaatccggattatctaataatcatctgttgcatacattccatgttttctgattgcaggtaatacatcatcaaatacccaactttcaaacttttctgcccctggtaattcactattagtaataaggcggtatatatcaccttctggaattacatttacctctaaattcttattttcactttgtgggtgaggtatataacgttttgttacccacctacaatggtctttgattgccttgcttgtatttatataaccaagtgcttttgcaatatcagtagcaacaaaatacggtttcttatcaatttcaagcattcttatttggccaaattgttcattattgaaaacttgtaaatcgttcatttgtttattcccctttctttaggtactgatactaataccagcacctaattcttaaaatgcattgttccatcatcttctactcgttccaaatcatcatcacctaatcctttataaggatcatcattaaatgaattttgagattgtccctgagccgctttgcttaaaaatttaacttcctgagctacaacttcagtaacataaacctttttaccatctttgttttcataattccttgtttgaatcttgccaaatacagccatctgatggccttttctcatataattagcagtactctctgcttgtttcccccagattactaccggaacaaaatccgcttctttttggccagtctttgtgttatatttatctactgctaatgtaatgctagttgtagcagcttccactacctgaagaaatcttaatcaggatcctttgttaatcttccaattagaaattacttattcatttatatcttccaagtcttctactttaagctgatatgtcctagctccatatctatctcctgctttcctgcaccatacaacttgtccgcctactccagttgcaataatttcatgtttattcttagtatctttatcttgcactatctttcctgtataaacttcaatcataggtctacctcctattcatttggttcctcatagattattaatacatttgaactttcattatcagctgatacttaatgtctaaaatcattttatctttattttctgaaagccatttattcatatcatttctattgatacattattaatctctttaactttcattatcttaagcttacctccctattctccaatagctttaatcccaaataattgtttagcaaatcttcttattgctggttgtcttaggttatatacttgtctttcacaaatcttaaacttttcttctaatgctgttccccttaggccttcaatataaaatgcctttaatactttagcttctttttcacttaatctttcaaatatataattgataatgatagtgtatttgttgtagattctaatgccgcttctttcactgctttttatataataggtttactaacgatcatcaggtaaagcattcctccgcctcctggcattccactgtagtcaattgcctttgctcctgttatttctaactccaagaattctaattccttttttatattgactatagaatcttttaaatcagagtaacttcttaaatactcttccgcctcttttatataattcattagtcgatctccccttctcatgtatttctacataacataattactataaactcttaccctgcttttctgtcatactcttttactaatcgaagtcgctccttaaatgtcttgaaaggtatggcttcaattactatcatcacattgccctactagctatttgttaactctgctctcatccaagctaattttgttcttattatttctatttcaagtcttaaattctctgttgcacttatgcatgtataataagcactttctgcaatgtcttttttcattcctaactctgcaacttccggatcactctttgctaatgatgaaattaatgttgcttggcacttgtccatttttaagtgcagcatcttttgattatatttaattctataatctctttctgttttggctttttctaaacctaatttcttttgttctatattcccttgagataaggctaatatacatgtatctaatttattcattaatcctgtggattcattttattcatcctctctttagtaaaagctggctttcacttttaaattttattggcatacctagtggatattgtaagcttccctaaagtctaatatctcatttccatattttgagccagccaactttcatgagatatatcttgaactaattgctctttttcaggaatatcaggaatattttctaattcctccagccttttctctttagatttaatttgcaattgcaaggcatgttttattgcatacatatccttaagtcttaatgctacccactgtttactcataatttcctcccattttttgaattagtaagcttgtatcagtttcaaacaacttgtccgcaagcttactaatgattgatttatttgatactaaaaaatttttctaaatcatactgatatcttgttcttttttgatacatagaatttcaatcccgtttcttcacaccatttgaatggaaatgaacttctttgagctgtttccatatactcttttactttcttagcttcaattgcaaatgtcttttccaaatctctaaaattaaatatgaagtaagtttttatctttggatgctctatctctgacatttgttttacttgattctctcttatgcagctaatcctatacttatttttgcatgtgatttaagttctaataggaataaatgtttattggtcatacctgaaaatcacatatatttttgcttgaaacctcacattttcattcttagctccatcaaagtttgcggtaccatctttaaatctatatacccagtaatcctttggtactgactttttaaaatcttcttcaaatgcttttcctggattcttcaaaacatatacctctatgcaattatttctatatttttaatttccttaagctcttcttgtagatattctttaatgcctaatattgcttgatttctccaagctcctccatcagcttcaaatagtgctgctgtagggccatctttcatcctaaatataaatttacttaatggttgttctatctctggaaatgttcgatatggcgctaaacttactgggttaggcacaagtgcttgtcccacacttgcaactccagtcttaattgttactgattggcttattccatcatcacctgtatcttttacattttcttctttgattaagcctgtatattttaataaaatttctttatctccttgatctgtgaaagaactttgcaacattatattgaatgcctctgtatccaagaatctttcatatcgaatattgtttggtaaatctgcacctgctgctaaataagtttctctgtctctatctatatttaatggtccataaagttttacaacacttggtgatactacatggattaataacttagtatcaatagcatcaatattgctcttaatataatctacaaatcctgttaatgtgcttattgccaatgactctgcccttgttcctttactctgcttaagcttactgttgaaaaagttccttgtggtgtttctataattggtttcttatcttctcctagttgaactaaatattcaaatccgtcttttaatccttccatgtttacatacctccaataaattatttaactaacttaattccttttaaatctatttctctttcctcagctgttgttaatatttctcctgtttcttcgtctactttcattgtagattgtcctggaatttgctttctatattcacttgctagtattccacctgatccatcagttccaataacaatcttagctgctaacgctttgcttggtgctaatttaggttttgctattattgctacttcagttaattctcttgcttcatctgatacgaaagtcatatctatagttaattttctttttattttatagtcagtatttggatcagtaatatttgctaaaacttctcttaatgccatatttactttttcagcaaaagctccatctgcgaagttttctaaattaatcatgttttccatatcttaattcctcctattttttaatatatttttccacccatagcttgtcttatgatatcctccttactatatccgacttcatcaccttcaatgattgttagcaatggcttgaccaacttataggcatctttctgtggtatttttaatatttttttaacttcatcttcggtatagcaattcttagttctaaacaagtcctccaactttttttgaagttctcttttataattaaggtctatatctctattgagatgtggaccactattacctttatggcatagtgcacatagtctttttttattgaaagggcaatttatcattgccggttgctgttttctaaaaactatatgatgtgtttcagaataaggattcttacaaattagacattcttctgccatgctatttcaacaactcctttatccacccatttccgcattactaactttttattatgtctcatgcacatttgttcaatgttaattccaagtgattcaagcttatcaagtacatcaatgcatatttggagttgatcaaatacctcttctgcaatatgcattgtgtctttttcaattaaagctatagctagttcattggattcttcaaggtgtttctttgctatttcttcaaaagtccatttattattatcctggttaatttctttattatggcttaatatcatcatcttcatcagctcacctatgaaatcagaatatctaatatttctgaagctctaactgcctgctctgcttttgtttttaattcctggatttgcttgattgaattattatcagccattgaaatatgaattattactgataaagctaaatccacaatattcttaagtctcttcctatcatctgataatatttcattttgcttatcagcttttgaaagtaattctctaagtctgaatatttcctcagctgctttttgctctggacttggatcattaaactctgaaatcattttttttaatatttcaggagttatacccttaacttcaactattttcaaatcaatgttttccattgttctccccattttaaattaatcagtatcccaacctaataactttttttccaaggaatcatagtcatattccctcggttcaaagttattaaatccagaaactgcaacataattactttgtgattttgaaggcttccaatcctcttttatagctgtcaataaggcaccaaccttatttcttatttttttcatgtgatttattatttcaatcttttcaacaacaacatcagcagcaacattattttcaatacaatatttccgtatggattctatttcttcattatcaaaattattttttaaaatggtttctatatgttgttgttctagttctttatctgtatttgtctctagctctgtttctgtctctgtctctgtctctgtgtaacaattttctatattttgagtaacattgttacctatagcagtaacgttgttactttcttttgatggttttaatttatccttttctcttttctttctcattatttcagctttgcttgtttcgctcccaaccattgtctttagttgagttaaatatatttcaccattttctaatacctgtacaagtcctgtctttttaaataactccatagcaactattactgtatccaaatctgttttggtcaattctgctaattttttagcatcatatgggattaacatttgtcccacatttctaattaaaatcccctcattttttaaagacttaaggcataattttaaataaaacaaacaatattccttacctttttcctgctcttctatccaagataatgtatcctcttcaaaaaaatcttctttaagttttaaccagtaatatcgttttcctgccacgtaatcacttcctttgttgtactatttctaatcctggtattgctacataagtttctattcctgtaagctcatttatttctgcttgaaatctatcagggtctccattatcctgacttatatgaattaaaacaatttccttagtattgcctaaattccacgttctaagcgcttcttttaatgtctccaaactcatgtggcttttaatagttctagccctccacgctggcaactgtggcaacacgtcttccgaatagttgcattcgattaatattctgtttaaatcattaaacttgtatttgcaataataagaatcagttaaaaataatgttttaccatctttaggatgatatataagataaccaactggttcttttgaatcatgttgagattgaaaaggtaaaacagtaaaatctccaattttaatacttgaatacctatagtcttcatcatggtctaatatgtgtaatctatatccgtctatatttaaagcttctttagttccctgtgttaaataaacatcaatagcattactcaaagcctctttaaccccttttgcatgatccaagtgctcgtgtgtaacaaaagctcctacaacatttgataaattaaaatttaatccctgctttattttttttaaaggtattcctaattctaaaagcaatatttcgttccctacttggtatgcatatgaatttccagaactacctgttgctagtaccgtaatcactttctatgtcctccttttatagtttcaatagcttcttcaattgtgaatccttgatatattctgcttgtaactaatttagtatttgaattgaacttagtacatatttcagatattgttcccgtgaaatttttataagtatgcttaacattgttcgatttattattagcttgtgcaatatcatctacccatctacaattagacggttcataattgccattgaaatcttttctatcaatagataacttatcagtatatccattgttaattgaccaattataaaaattttcaaatttaagccattcagaacatatttgtattcctttcttaccataatttaagtaattatgataattctcatttttacatcgttgaattattccattccaaatagcatatattcttgtgtggcttaaaccatgagttttgtgagaatctgatatatttttagcttttatgcatccgcaactttttgtatgaccacttcttaaattatctaaaactataggtatttcatttccacaactgcatctacataaaaattgtctttttcttcttttggtatttgtactttcaagctcttttacaattattaactctccaaatttttctccaatctcaatattaacttttcttggcatattctaatcacttccctcagaacaatgaggactactcctcattgtttttagattaaaagctaggttcctcaaactcttcatttataggattaggttgatttattggcttatcttgttttacatgagtaggttcaatatctataatctcttgatttgcattttctttaatttcttcttttacttctgtatgagtattttcaatgatatcctcctggtcatactcatatgttttattaactacttcaactattgcatccgaatcatcacttgtcttagtaaaatgcttgcaggctctattgataactgtctttttacacatttcacccttgaaatcattatgcgtttttgaattaggtgaatatgtcctactcattgcccatgcttgctgaatttgctttaaggtcattaattcaatgaagttgtttccatcttctaaaattactattgcataagctcctcgaaccttatcatcatctatattgtcaaattcctgttcatgctttaatattttcattcttccgtcaataggatctattgcatatttgaattcatctccttgataaattacatttgcaactacatctgttacacctttcaatcttttcgttgctgcaatattccccagatagcttttcatgagctgaagctttccaccaaatactatgaagtaacattggtctttcgctggacttaatccttgtagaaccatattgtaaagtgtttctactatagaatttttgctgcatacttctaatgccggtttcttttctttatctttgacatcctgtagttttaaccaagctgaattaattgcattggccgctgaataatttttgggtaatactatacctgtatctttctttaaagtatcaattttggccattacattgtttagtgcattttctttagtcaatgctaatcctgtatcttgtttttttgtctccatacttttacctccatgcatctgctatttttttagcgcattctttacaaatgcttttattattgactgttcttaactccttcatctccccacatacttcacaacctggagtatattttcttaaaataatgtgttctccttcggtataaatctcaagtggagttcctgcaccaccatcagctccttcaatttttaaagttcttcttagctccattggaagaactattcttcctaaactatcaacttttctaattactcctgtacttttcattcctcatccctcaactttcattattttgtaattttctttgttatattctctagccctataacttttgccacttcttcgccaatttcttgtttaagctttgtattaacatattctttgagttttttaccgacttcggctgctgcatactctacttttctttccatatcataagaaatatttttattgattaagtattctaatcttgtattttcacgaccatatccacttgtttttccactcgaatcaactttttctgttagaaagttatccatttttcttttaaacatttcaagaatatttacatccttttcgactacatcaccccatttatcataaagagtgatattcttattcaataaattttctgtaatagaattaaccttttcatcaatcgattctgaaattcttgcagttacctgctttattgcgttgttttctatttgcttctctatttttgaagctactctatttgatatctgattaataagttgttctttaatagcttcatcaagactttcttcttcatccaaccagcctatatttaattcaacatttaatttagccattactcattcacctcaactcttaatttcttatccttgctaactatcaagtttataatttggctctctgtatctaatatttcattgacactttctcggttatctatgaatataggtacttggaatttatagtgttctgaaagtgtatttataatttcaattccactatttatttggcttgctgtatttgcattagagtatggaactccatttataagtgtttcgcagcattcatcaattccaccatttatttgttgcttaaataatttaaatcttactgtcttgaattttgaattgattctttcttccaacaattcaacctttgttcttatgaactcttcacacatgaagtcatatccctctaatttagcaatctcttccgctaatcttctctcttcatcctgaagtattagaactctgtttcttagagattcattattatccttagccgctaaccttctgtttatagtttctaaatctccctgtaataattgttttctcttaatcaattcagtattatctggtgctatacatgtagccacttcggtttttaatttttgaattttagcagttaactcggctattttaggattttcagcagttggcatatttttaatttcatctgcagcatcttctagttctttaagtttgatatctacttcttctcgttgggatgttaattctttaatacttgtttcaaaagctgctaatttctcaatgttctctgcttgtttttgccttaattcttcaatctcagaacccaatctcttcccatttgaatttattgaagcaagaatctttttcttagtttcttcaaagtggttttgagctttttctttaagctcctcaatcttttcagcttcgtaagctctgccacaatgtgggcagcatgtttgactttcatcaaattcaaaaactttagccttttctgtcttaaactcatctctcaatgaatcctgtttctctaatttagctttaatgttttcctcaactctaagattttcttgagccaaatgagaatgatctacatttttatttttcaatttccaatccaagtcttgaatcttactttttgtgtcccttatatcttgttgaattatttgcaaaggttcattagctttttctctgtcctttattgattcatcctgaagctctttatttaattcataaattttattctgtaaatctaccttttgagtatttccttgaccatcatttaaaagctgcttatccaatgcttcaattccattttcaaccgtcatttttcggccttccaatattgaaaaatcttcttcaacaatgttttcattgcactcatcaattcgataaggtatagactctttatctttggtatactttgcaatttgagcttttatttttttcctgaaatcttctactgttgtattcccttctaacaaagtttgtaatggccttaaactatctttatggttaataacattttcctgatctatatcccctattatttgtaacaatatttccctttgctttttccactccagattgttaaaatatagaggattggatattaacttaaaggtgctatcaggtaatatttcagcgactttttcgttatattctttttgtttagctgggacttgattgatataataagtagtttcgtgccctgaaaatactttatcggcaagcccctttttcttagtccatttctcagtataaattctttgtagtgtaacctcttcaccatttatctctaatattgcttctacactatgctccaatccatgaagtgcttctccagtaggtgataatgttttgatttcaaagtcctttcggtctttactatcctttccgaagagtagccagcaaaaactatcaaatatggttgtctttccggttgcattttctcctaaaatattagttactttcttaaagtcaatctctaatttcttaatgcccttgaaattcttaaggattaactttttaatttttactgtattcatattacgcctcccgattattcaattttaatttttcaaaattagctctatatttttcttcacatcactcctctcaagtatgccttttcatttaattacttgaagtaattacttgaagttttggtattgttttaagattaaatcctgattcactaattaatagaaatgcatcattatactctttgataatcttaaaagcctctttttggatattaatactatcacctaacttcatagttttccctctcttcaaccttcttaagtgcaccatcaatcttctttaaaatttcttcttttgcttcatttgctttaaatatgataatgaagcttttcaattttcattcctcctggtactaatatttaattgcctgcatataatatagtgagaaagtgttttctttttttggataaaaaagattttttaaaaggcatctctgcccaattatcataagtatttaatttaattccctggctttaattccagtcaatccatgtacttctgttccatcatcagctataaagtaataatcaccatctgaatgtgaaaactccattcttccattagtccaaatatcatctactaaaatttgaactggctctccgcttgtaaaataagttacattaggaatttcatatcttccctgagaattatgttataaatacccttctttcatatctatccttctttctttaaaccttcaagaataagctttgctccatctacaccatattgtgctatcaatgctattgctaacctattattaaaattctttttcaaatcatctgttatagtcccttctataatcacccttatttccttggccatttaatcaccttcataaaaaattcaatttatattattcatgttggcttaatttggttactgaaattttgtcacatcgtggacatttaaattcaacatcaaatacaccgtttaatttatatttgagaattaatttgttacattttggacatcttaaatcgttcatttccattcctccgttttgtttaatgtcctctcattcccaatgcattttactatttaattttttctactttcttcaatatctcactttcagaattcatatccatctgatagatcatttcacgttgtattgatctttcggttatttcttttccattcttccttaactcgtttactgcaacttttgcataagcaattgcctcataattatccatactttccgctcctttcatgacattatttttactacttcggacaaactaagtttgaatagaatttgttgattttaaatcaacattactattaaaaaaaatttcgtccactctttgcggagttaaatttaaaacttttttacatatagaaatatcctttctactaaactcgttaactccatttatttttttacttaaagcactcttgcttatatttagttcttctgctaattttgttcggttgactttatttcttagcatttcaactttaaattctgtaatattcatttcatcacctcttttctcaaaagtcgacttgtaatcaacctgatacaataaatatagttgatttgtaatcaactgtcaagtggttttataaaaaaagtttctaattagtcaacctttatttatttctaatcaactttacctataatataattaatggaggtgatttaatggcaacttttgcagatagattgaaaaaacttagaaaagataaaagaattactcaagaaaaattagctgagagattctttataacaaaaagtgcaatatctaaatatgaaaatggtgttaatacacctgaaaataaattacttcaagatatggctgacttttttgaagtatctgttgattatttattaggtagaactgataatttaaaacctcctacaaaagaatggcagccacaattaactgaaaaagatgaaaaagatatagaaaaaactttagctaaaactcttgaaatgttagaacaacaagatggtttgatgctatcaggagagcttatagacgatgaagattttgaattaataaaagctgctatccaaaatggacttgaatatgcaaaaaaagtaaataagaaaaaatatacacctaaaaaatatagaaaataacattatagagggtaatggtcaataattgggggtatgctatttgaaaaaaattatagataaaaaagtcactcaactaaagatgaaatatcacacaaagaatccgtttgaactttgtgaaaatcttggaatcgaaatattatatgagaatcttggtaaaaatataaatggattttatcaagctgctccacgtaataaagtaattcacataaatataaatttaaatgaatattcaagatatttcacatgctcgcatgaattaggacatgctctttttcatagtaaactgaatatattattcttagaaaaaaatactcatattattaaaaataaatatgaaaatgaagcaaattatttttcagcgaacttatatttaagtgatgaaaatttatatagtgataaatttagtggtatgactattgaacaaatagccgcacaactacacgtacctatagaattattgaaattaaaattaaaataaattatttggaataaaattgatcagtagagagccaatgagcacctaccctaaatatttactatagaatcctcatctacatggggattctttataatataatttaaaaaatataatgttggataagagtaaagatctatcacagttacaaattaagtcttttggtataatgtacaagttaaccaattaatataaatgttttatacttaaaaatgaggtgaaacaaatgaaagtagcaatctatagtagaaaatcaatatttactggaaaaggtgaatctatagaaaatcaaatagaattatgcaaagaatattgtacaagaaattatataaatgaaaaaattgagtttatagtttatgaggatgaaggattcagtggtggaaatattaacagacctgaatttaaacaacttttgaaagatgccagagtaaagaaatttgatgcattaatatgttatcgactagatcgtatatctagaaatgttgctgacttttcagcaactctagagcttttacaatctaataatattgattttatatcaatcaaagagcaatttgatacaagtactccgatgggaagagctatggtatatatttcatctgtatttgcacagttagaacgtgaaactatagcggagcgtgtaagagataatatgcttcaattagcaaaaactggtcgctggttaggaggacaagttcctcttggatttgaatctgaaaaaacatcatacttagatgatgaatttaaagaaagaacattaatgagactaattccaaatcaagaagaactagaattagtaaagttaatatttaatacgtatcttattaaacaatcaataactcatgttgcaaaaaaattaagccttagtggtattaaaggtaaaaatggtggtgatctaaaaagctcccaaatttctaaaatacttaaaaatccggtatatattaaatctaattctttaagccatgaacatttaaaaaacactggaattaatgtatttggtactcctaatggaaatggatacttaacatataataaaactaaaaaaataattgtagatcgtgatataactgaatggattgctgctgttggccaacataaaggaattattgatgctgctgactggattaaagttcaaaatataatggatcaaaataaagtaaaacagaccattcgtttaggaactggtgctagcaataatgctattttatcaggaatattaaaatgtgctcattgtggagctaatatgatagttaagcatggccatccatcaaagaataatcctgatataaaatatgactattatatatgttctaataagaaaaatagatttactgataaatgtgataatcctaatatccgagttgatagattagataacatagttttatcagaaatgaaaagttacaatgaggatttactaattcaaggacttaatgaaaatatcgctaaagttgatacagattttgaaagtgaacaaatcaggaaacttaatactgaaattgaaggaaaacaacaagcagctaaaaatcttgttaaaagaatttcggttgaaaaagatgatagtatttctgatatgtttagagatgaattgaaatctttaaatgatgaaattaaagaattgcaaaattcagtaaataatattgaatcagataaaacagaaataaatactcaagtttctaatatagaattagttatagatgcattaaagaaatttaatgctaacattgatattttagatgatcctaatcaaaaaagattattagttcagactgttgcttcaaaagtcttatgggatggtaaagagtatactgctaatataaaaattttaggaatggatgattctaaaaaaaaataatctccattctgccaccttctcccaaaatatcgtcatttagtaagacaagcatgaccttagtgtataaaagtgcgactttttggaaagaatatataatttatatattaaatcatgaagtatcaaaattaaatactaattctcattcaacaactataagctattggttaagatatcatagattaaaagaaaatatatcgcaggctactcttgctaaaagaattggtataaaatatgcaaattatattacaaattcagaaatacataatatatatccaaataaagagatgtctagaaaattatcaatatattttaatcttcctactaaatacttttacgatccttattttgagatacttgaatcaattggtaccatattagtaaattatagaactgataataatctaaatatacaagatgcagcttcattaattaatgttgcaccttatacatggtcctgttgggaaaaaggaaaatatgaactaactagggaaaattattataaacttgaagaattaaaaatactataaatccaatctaccaaaaggaactaggattaataccctagttctattttaattctggtggtaaatggcttaaaaaagcttgaatggttttttctcttcctctaataatatttagactatgccatgcaggcatttttatcaaatcatttaattcaaagttagatcctatttcttcttttaataatgtgaaattctccttctcacatccagctaataacatgaagttacatccagttccttttactgcatcccaaagcttaccgaactgctttaagaattggcatgtgaatacatatgttgttctaaatttcctatcctctgctatgttcttaatcataagacttgtactattatctaattgatgtatttcatctaacatgatgtgaactacttttcttttttctctatctttaataagtgcagctctcttttggccagctaatttcattctagataaaaagtaagtcattactatatccttaagttcatagtctgtaaaataatcctctgacattaaaactaatacaactttattttgttcaaatatatcaacaaaattaacattgtttctatctatacctaaaagcatttcctcagtcctgctatcccttaatagtgcattaaatctgtctaacactctatcagctttatcattagttccaacaacttgaatagttttctttgtacctttggtttctttcacttcatctaacgatttcataacttcaaatctaaaatcatcatcattgtaaattttcatctctttcactttttcaaccactgtatatctgaatctataattagtaagaactttatatatagaatacatatctgtaaatccagctaaaaaagttaaactacaagcagctattaaaatatttctcatatttgcagtaagtggctgtgcatcaccagtatttattgtattgatgaatttctccataagcatgcagtaatcactggcaaacctcttaacattacgattatattcttcatctttaggaattgttgaaatatctagttctgggtaatcaaatgtgaatcctttgcttaaatctaatgtaataacatcatttttaggtatgtgttttgctacttcccaagcattctgattattttctatatagtcaaaataaataatgcaatctccacctttgtaagcattgtacacataattttcaaagtatttactctttcctgctccctttacagctactattgctttactaagacataataaatcctttatcttactccaataggcaattcctttaccaccatatatatgtcctataggaatatatccttctaataattcttttgctagttttatttctgcaaaatctaatctttccatgccaagttctttctgtagtgaaacttgtggtaattgtaagaaatgttcaagctccgaaactccaagaataaattttgaatcattaagtggatgccaaaataattctctatttttaatcctcttcatattttcttttgtatttttaatttttctcataactaaactattatctaaatccatacatccaaagcagttcttaaactgatctagtaaaaactctctcctactttcagattttgaataaactatacctctgattgcagtttcaaagcctttttctgttccttttctagtagtggagtttgaaagtcctctttctctctttattatgcttacatcatcatcagttgtatctattttttctactccatctggaccgagaataacttcttcaaaacaatataataattctaaacttatatctaaagttaaattgccagctaaattaaatatatctttaggctttaactgaaattttttaggcatcttcccttctttgaagtttttataagctttagtgtaattactccaccaatcagtatttaatggctctataacaacctgatagatgaacatttcatcttcttttaaaatcctttttaaatccagaatgtattttaatggttctaatgctctagatgtagttttaagagaaaacataaaatgttctttattactcatttctgcaacgctcatatcattttttatgggtattttataatctataatattatcactaaatttgatcttatcaatgtacttgctataaacttttttaactttttccaaatccctatttaatagtagaaattctatattgtctttagtgatttgaatttcatatataaaattgttttgaagaattaataaatctgtattttcttcctttgggtctagtaattttttattgtgcctagttttagtgcatctttaataggtattggctttccttcttccaggagcttatctacacatgaaaaattatatctttctgtatatctcttaggctcatgcaatgcttttacaatatcttttatgttagtattatccattgtgctatgtggtattattttaagtcccctcatgattacatcttcctcatttctctgcctatatcagctagcaaatttaataggaacggaataaattgcaatcctatatacccaatacacgcccacttaattacatctagaccctttgatttctttccagtaattatcattatagcacctacgattaacattgcataagttaacggataccccaatcctgccaaaagttcaataataggatttagcccttctttcattttatcagctatattactataatctttagcataaaccatagacgtattacaagctgctattgttactcctgttacagcagaatatatatatttagcatggttatcattttctaaaaaatcaataaatttactttccatttcaagcattttattatgatctggcctcttatattttaattttcttaaataatttttaaactcttttgaataaacaacctgattatctaatataatacttatttccatactgcacctcttttatttaatcattgctaaaccaattaattcaatcaataagcctataaagtatgatatcaaaccatatctaaatacttttgtatttctaaaaatccacaacaacattccaactactattagaattgatgctattgtttctaattttgtaccagcaaatacaagtccatttcctattgcactatcagttacattggctatccagcttgtacaagtattccatatctcatttaaatatttagacattacaatcctcctgcataatttctaaaaacatgaacataatataaactaaaaccattcaagaaaggataatgaatatgatgaatgttttaaataaaatttgggttggctgtggttacactttagttactctgggcattttatctctaatttgcaaagtaattgttaataattagtgaaaacatgcatattattaaatgtgcttgcataaatttatattataaattgtccataaggatagtctactttcccgtcaagtaggctatttttatatatcaaaattaacattcctcttctttggagctactttttcaattttatttggtggctcacttgatttttcttttttcatatctttttttattaattcttttacatagta

SEQ ID NO: 6 - DNA, 1437 bp, Clostridium beijerinckii SIID27451-B11
gacgaacgctggcggcgtgcttaacacatgcaagtcgagcgatgaagttccttcgggaryggattagcggcggacgggtgagtaacacgtgggtaacctgcctcatagaggggaatagcctttcgaaaggaagattaataccgcataagattgtagtgccgcatggcatagcaattaaaggagtaatccgctatgagatggacccgcgtcgcattagctagttggtgaggtaacggctcaccaaggcgacgatgcgtagccgacctgagagggtgatcggccacattgggactgagacacggcccagactcctacgggaggcagcagtggggaatattgcacaatgggggaaaccctgatgcagcaacgccgcgtgagtgatgacggtcttcggattgtaaagctctgtcttcagggacgataatgacggtacctgaggaggaagccacggctaactacgtgccagcagccgcggtaatacgtaggtggcaagcgttgtccggatttactgggcgtaaagggagcgtaggtggatatttaagtgggatgtgaaatactcgggcttaacctgggtgctgcattccaaactggatatctagagtgcaggagaggaaagtagaattcctagtgtagcggtgaaatgcgtagagattaggaagaataccagtggcgaaggcgactttctggactgtaactgacactgaggctcgaaagcgtggggagcaaacaggattagataccctggtagtccacgccgtaaacgatgaatactaggtgtaggggttgtcatgacctctgtgccgccgctaacgcattaagtattccgcctggggagtacggtcgcaagattaaaactcaaaggaattgacgggggcccgcacaagcagcggagcatgtggtttaattcgaagcaacgcgaagaaccttacctagacttgacatctcctgaattacccttaatcggggaagcccttcggggcaggaagacaggtggtgcatggttgtcgtcagctcgtgtcgtgagatgttgggttaagtcccgcaacgagcgcaacccttattgttagttgctaccatttagttgagcactctagcgagactgcccgggttaaccgggaggaaggtggggatgacgtcaaatcatcatgccccttatgtctagggctacacacgtgctacaatggctggtacagagagatgctaaaccgtgaggtggagccaaactttaaaaccagtctcagttcggattgtaggctgaaactcgcctacatgaagctggagttgctagtaatcgcgaatcagaatgtcgcggtgaatacgttcccgggccttgtacacaccgcccgtcacaccatgagagttggcaatacccaaagttcgtgagctaacgcgcaagcgaggcagcgacctaaggtagggtcagcgattggggtgaag

SEQ ID NO: 7 - DNA, 148805 bp, Clostridium beijerinckii
ctaagtcgggaagggataaacgctgaaagcatctaagtgtgaagcccacctcaagatgagatttcccatagcataagctagtaagaccccttgaagactacaaggttgataggtcagaggtgtaagtatggtaacatatttagctgactgatactaataggtcgagggcttgaccaatatagtcaagttgtaaatacattaaagaaactgtgtgcaattttgaaagaacaaagttttttcaaaaaggaaactccctcaacgaagttgaggagtacagttcatgaagccaaatcaaagatttggaatgaactagcatctcgtgatgatggcatagaggtaacactccttcccattccgaacaggaaagttaaggtctatagcgccgatggtactgcatgggagactgtgtggcagagtaggacgttgcgaggtaatcttgtagattacaagagttaagttaaagaaatttaacttacggatctttagctcagttggttagagcaaccggctcataaccggtaggtctagggttcgagtccctgaaggtccaccatgggggtatagctcagttgggagagcacctgccttgcacgcagggggtcaagagttcgaatctctttatctccaccattaaaaactatgaattttattcatagtttttttgttttattattataaatattgttgttaaataatatttattactggtatgagttatatggtgcagaaaatagtagaacaacagtataaaataggctaaaaatactaattgttaaagtatacaatgaatgaattataatatataatttatatgtaaaatatatgtaaaaatgtaatttaatatttttatttattgtataaaaattatattgcgaggggtaggattatggtaagaactattgtctgcaaaaaagatggatgtagcggtaatgaatttcatatatcaacagaagacaataaacttaaattagtatgtaaagactgtggaagtacttattattatgatgtgagttattatgaatttataatgttatcaaattgtgcagagtgtaataacgatacatttaaggtgtttaataatttagataaacaaggaatatatgctaagtgttctaagtgtggtgctccaccagaaaaaatatacattgatgatgaaggtgtgcaagttacttatgaagcaaagttactacaagatataaagcagtttatgtatcaaattgatcaaagaatttgtagcttagagatgaaaatcgatggtttggaaaaagggcaagaattattagaagaatcacttgcttatataaatagatatatgtctgagtaatataatatctgtgaattttaaaattgtacttaaagaggatggaatatgaagaacaaaaggaaaattatttactggtttttattaatagtttggatgatagggatatttattatgtctaatcaacctgctcaaatatctgattctcaaagtgaaggcgtaataaatattctttctgctataggtatcaatatgaatggaatatttgggcagcttactaattttatagttagaaaatgcgcacactttcttgaatatatggtattatcattattagcgtttaatgtgtttaaattgtattttaatatcagaagagttatttttgtgacagtagcttttgtatttctttacgcttgttctgatgaaatacatcaattatttgttttaggaagagaaggtgcttttagagatgttataatagatacggttgggggtattacactaatattgattaatctatttagaatgcatatagttggcaagtttaatgaagataaataaaagataatttgaataattgggatatagtaatttaatattaaaaccgaattaatcattcgaattttaaaataatataaatcagctaattattttaaggtatgagaataaggaataaaagtaaataaaaattgtgaaggctaagtatataatgcaaattaagcattgtatacttagccttcattttctataaaataaattaaatatgtgatgcaaacataaatataagttagtgataaacaaatatagatattggtttaattagagtaaacaaaattacaattactctaagattacttgttaagcctatttatgagatgaattaaattttattttaaatagattatttactttaaatagaatataaacaagaataagcattaataatgcatcaaaagtgaagttgaataaaaataattgtttcgaggtatcagcctttccattgccgacaaaaggcattggaaattgaagtatacctataaatataacagtccaaagcaagagaattttgttcttgatttcagggttagaactatttcgaatatatttatacagtgagcataacagaacaataagataaattaatcctataaaatataaatttctaggcaatattttttcccttatagatgaccaaagtgtgaaacgatggaaatccctaactggggttaaactatcagcttttgagtacttacctagtccggtactagtatagaatgccttacttgcggtatatttcatgccatttaataaacgagtagggtgagttaaatagaattttccaagtttaaagttatttattttactgtagaatttttcatcagttatttctgaaccaggaatatatttgacatattcatcagaatccaaataagcatgtttcccagcctcagctgataaatcaggatctaagcctaaatctatcaagtcttgctctggtgtagtagattcgtttagtactccataaaagactgagttatactgggtgtctttacttaagttgttgctattcatattgatgcgaataggatagattatcaataagcatgtaataacatataaaatagctaaattgattttatttagattatatctattatccaataatattttacatataagaattataataataggtaaagaagtaataacttgtaatttagaacctaaaaataaaaatgctgaaaataatatataaagtattttcgacattaatttttccgttccctttactacgtatttgtacttaatatagttaagaatggatgcaacaagtagcgatagtgtagttatcatcattggttctccatataggctattaaaccaaattaaataattaccatcaaagaaaatgaatgcggttattagtacaactatcatagatttaatattattttttatattcaaagattttaatattatgataaatgaaagaatatatataatactatagatgacagctaaatattgagttttaaatatattatgatcaagtgatttgcatatataattaacaagtattattagatagctcaaactacaattccagatgcttttaggatcagtattgtttaaaggggtaatcttataatcagtcacaataaagtcgtaatatcctacagagttaggattattcgtatctgagtctaataatgacagaccagatacattcataattctatagaaatcaccttgatcagcaacacctacttggggttttataaataagactccgatagttatagaaattgcaagtaaagcaaaccaaaacatatagaagtttcttaaattcttttttgctttcattaaattttcctccacaaagatagatttaaagtaataaacatgattctaaagatattaacagataaaattataatgttttttggttaatactacaagaaaacatcaaattaatttaaaggactacttcaaaaataggataaatataaattttcagaaaattaagaaaataaggaggatttaacaaatagaaatagaaatataacatatagcattattaagtgaaaggcaggtgggagccaatctctagggtagattaagggtttggcagcattatgaaagattatagtattaaaaatttaagaaatgtaggattaatggggcataatggaactggaaagacttccttagcggaaagccttctgtattattcaaaaattacagatagattagggaatattgaggatgggactacggttttagattttgatactgaagaaaagaagagacaattttctattgccctttcagtagcaccaattgaattagataatgttaaaataaatcttattgatattcctggatatgcagactttcaaggtgaatgtatcgaaggaatgagatccgtggatgtaggtatgatagttgtaagcggagtttcaggagtcaaggcgggaactgaaagggcctgggaatattgtaacaaaattaaattgcctagaacattttttataaataaattagatagagagaactcggattttaataaagtattagcatctcttaaagaaaagtttggcataagcgtggtgcctattcagtatcctataggagaagaagacaattttaaaggagtaataaatataatatccaaacaagcaagagtatacgatgtaaagactaaggaaataaaaatattggatatacctgaagagctccaggatgaagttgaaaattgtaagaagatgattatggaagctgtagctgagactgatgaagtattgcttgataaatattttagtgaaggtgaattgagtgatgaagaaatatataagggccttataagtggatgtgctaatggggatattgcccctgttatgtgtggaagtgctacaaaagttattggaatggattctttaattgatgatattgtagaatgttttccatcgccagaatatgctattccacaaaaagctgtagacgttttaaaagatgaagaggtttttgttaatctcaatcaagataagcctttttctgcattagtatttaaaactattgcagatccatttgtaggcaggatatcattttttagagttattacaggtgaagcgaaagatgatatgacagtattaaatgttaataaagataagaacgaaaaattatcccatatatgttttattagaggtaagacacaaataccagctaaaagaataatagctggtgatataggtgctatttccaagctacagtatacaaatacaggcgatactttagctagtcctgattttaaagtaatatatgacaaaatgaattttcctaaaacagttttctcaatggctgtaatcccacaagctaaaggtgatgaggaaaagatatctcaagctttggccaagttaaaagatgaagatcctgtttttcagattgatagggatgtagaaaatgcagaaattgtaatctcaggactaggagaaacacatattaatgtaatcgcaagtaaaataaaaagtaaatttggtgtagaagcagtattaagtttaccaaaggtaccttataaagaaactataaagggattttcagatgtacaaggaaaacataaaaagcagtctggtggacatggccagtatggagatgtggtaattaaatttgaacgtagaacagatggagaggaagaattagaatttattgataacgttgttggtggtgcagttccaagaaattttattccagcagtagaaaaaggattaagagagtgtataactcatggggttttagcaggatgcccagttataggccttaaagcgactcttcatgatgggtcatatcactctgtagattcttctgaaatggcttttaaggttgcagcctctatagcttataaaaagggattagagcaagctaaacctattcttttggaacctataatgaaagtagaagttatattaccaaacgaatatatgggtgatgtgatagctgatataaataaaaagaggggaagagtaatcggaatggagccagaaggggacaagcaaagggttatatcagaaattccgcttgccgaaattagaaaatatgctactgaattgagatctttaactcaaggaagaggagtatttacaaaagaatttgtaagatatgaggaagttccagagatagaggtagcgaaagccatagagagcattaatgaattaagaaaataagattacggaaagttatagctaaaatttacggaataggaataaaaagtactctagtgtagtaattacataaagggtactttttatttattgtcttaataaagagaagtaaaataaaatttactataattaaggaataaggtaaattttacattaatatatataggataaaatcatgtgcagaaagacataatattttagtaatagtatattttatgcaatttaaacaaggaggcatctacaatgtcagattatagcatggatattaatgggaatatagagttgagtgattatagtaatatatttgactatttaaatataatagacaaagatgataattttgtaataaggatagatagaaataataaggatgatatagaattaattaattctatgcttcaagataataaattcaatatcaattatacacaatatgacgattttgggaactattacataagcgctaataaaggatcttgaaaaaatattatttaaaatacaggttttattggaatagcataatatagtataatatgtattagcaaattgttttttattggtatattaaataaaataaaggagagttatattatgcaaaaatatgttataggagtagatttaggaggaactaagataagtactgcattatctaatttaaatggagaagtgttatgtcaaacaacagttcctacaaatgcaagcgagggagaaattccagtattaaatagaattatagaatctgttgaaaaagtaattaaagatggatcagtaacttataaagatataaaaggaattggtatcggttcccctggacctttagatgctgaaaaaggaactataatctatacaccaaaccttccatttaagaattttaatttagtggaacctttgaataaaaagtttgaagttcctgtatttttagataatgatgcaaacgttgcagctatcggcgaatatatgtttggcgcaggaaaaggcgctaaagatgtagtattcttcacagtaagcactggagtaggtggaggcgctgtcttaaatggaaaggtatatagaggacacacttcaaatgccttagaaataggacatatgacagtggcaccagatggaccaagatgtaattgtggaaatatagggtgtgtagaagcaacatcatcaggaactgcaattgcaaaaagaggacaggaagcattagctagtaaagttgagacttcattaagaaagtatgatactattacttcatatgaggtgtttacagaggcggctgcaggagatccagtttgcgtagatataattaataatgcactgaattatttaggaatagctatagctaatgcagtatctatatttgatccagaaattataataataggtggtggtgtatcaaaagctggagagattgtttttgatacagtaagaaaagttgtggataagagatgttttaaatccatggcagaatcagttaagattgttccagcaggattaggtacagatgcaggggtaattggtgcggtagcattagcattgcttgaaacagaagataagtaatataaagaatgaagcaagcaaagtagtgtagatttttagcttaatcctagagctttaaaacatttagaatagacttttataatagaattgcagatagatgtgaataaagattaaaaatttcacataaaattagaacagaaagctctctttgcaatgaattttttcttctcatacatattactaagtttattctaggttaattacttaattaaggagacttttattttgatatttaaagtatttacctataataaattgggatgaaaaaattttttatataagctatctctagatatatttagagatagcatattataaaagaatatattttatatgaaacctattcaatagattgttggataggtttcaatctttaattatgatataaatagagattattgtaattagtaatagtttagtagtataatttctaattaagaatattattgtggacttataaattaaataagaagaaggtaataagatgaaagcagagattatagccataggaacagaaattttattaggtgatataattaattcaaatgcccaatatttagctcaggaattagcagcccttggaatagatatgtattatcagcaagtagtaggagataatgaaataagagttatgcatgcatttgatgaggcatatagcagaagtgatatcataataactacaggaggacttggaccaactgatgatgatattacaaaagaagttgcagctaaatattttaataaagaattaatcaaggatgaaaattcaactaaaaagatagaagattattttaaatttagagaaagagcaatgactcaaaataatttaaagcaaggattaattccagaaggagcaactgttataaataataataatggaacagcaccaggagttataatagaagatgataataagataatgatcattttacctggaccaccaaaggaaatgaaaccaatgtttgaagaatcagttaaaccatatcttcaagagaaatcagattcaatattggtttcaagagttgttaagatacttggaataggggaaagcgctgttgcagaggagattaaggatttaatagatactcaaactaatcctacaattgcgccttatgcaaaagatgtaggagtaatgcttcgtataactgcaaaggctgaaactaaagatgaagcactaaaattgatagaaccaattgaggaagaaattaagaacagacttggggataatgtttatgcaactgaggatattaacatagaagaagttgtagctaggcttttgatagagaagaaactaacaatatctacggcagaatcatgtactggtggcatgatagcaagctatcttattaattatccaggtatatcggaagtttttttagaaggcgctgtaacatattccaatgaggctaaacataatagactaggcgttaataatgatattttaaacaaatatggggccgtaagtgaagaaaccgcaagagaaatggcaattggtattgcaaagacagctaatactgatgttagcattgtaacaacaggaattgcaggaccagaaggtggtactttagaaaagcctgttggattggtttttataggtgtgtatgttcaaggaaaggtaacgatacaaaaatgtttgtttaagggagataggaacaaagtaaggcttcaggctacaattacaggattagatatgctaagaagaattcttattaaataaattatgcaaaataaaaatgccataatatatttcaaacgaagtaatatattatggctttacaaattgtatataaataaaaatgggggagaggcgattaaatattgaagttaaatacttcattattatttattgccaaattaaatttatttatacataatttagataaaaaatttataattcttttatagcgttgcttaatgtttttccgaaggaatcattaataaccaaattagccttggaatcagcagaggtagaacttttatttattaatacaagattctttcctttaaaataattgataagtccggcagcaggataaacaacaagtgaagtgccacctataataagagtatctgcattagaaattgcatttatagagtctctaattactttatcgtctagaccctcttcataaagaactacatcgggtttgacagccccaccacatttagtgcaaataggaacgcccttagattgtaggataaaattcacatcataagattcatgacatttaacacaataatttcgatgaatagatccgtgaagttcgaatacatttttgcttccagccatttgatggagtccgtctatattttgtgtcacgatagctttcaattttcccatttcttcaagtttggctaatgctaagtgtccagcatttggtttagcatcggggtatataagttttgctttataaaatttaaaaaattcttcaggatatttaatataaaaagtatgtgatactaactgttcaggagttaatgtagcatttaatttctcgctaaataggccatttgagcctctaaagtcaggtatattagattccgtagagaatagaacgtaaaccctcttttaaattagtttcataacgtcattaaatacttttcctatagaatcattaataactaggtcagctttgttatcagcagaagttgtacttttatttatgagaataagatttttacctttaaaatagtttataagcccggcagccggataaactacaagagaagttccacctattattaaggtatcagctttagatattgcatctactgcatctctaattacattatcatctaaaccttcctcataaagaactacatctggtttaacagttcccccacatttagtacaagtaggagctcctttagagtctattataaatttagcatcataaaattcgtgacatttagtacagtaatttctatggacagatccatgaagttcaaaaacatttttacttccagctgcttgatgaagcccgtctatgttttgagttactatagcctttagttttcccatttcttcaagtttagctaatgctaagtgagcatcatttggtttagcatctggatatataagctttgacttataaaatctaaaaaattcttctgggtatcttatataaaatgtatgtgaaactaattgttcaggagtaaatgtaatattcagtttttcattaaataatccatttgaacttctaaaatctggaatgccgctttcacaactacaaccagcaccaccgaagaatactatattgttactatcctttataatttgagctaaattttctattttattttccataaaataatcatctccaaaatacaatttaatacctttattattgcatagtttatgaaaaaattaaattacttaaacatattaaaatattatagtaggacctttacattcaatcaactattacgatgtaatcagtattttaattattaaagagtgcttgaatcatggcaatagttagaaagtatccttatgcgacaaaatagatattttaatcctgaacaattaatttaatataactatgttattgaaaaagttatataaatgttgtagtatatatcaatattagtgtatttaatatttgtatctcaagtgctatattaaatatagtaaatttaacattataaatacaagggggaaatatttatgaagtatgataattttgatttttctgattgggttgatttaattgctgaagcaacagtattacatcaaggaattttaagtgaggaagcagaaaaagcttacagtaagtatttagaagagaatgcatacaaaccagtagatgatgaagattatgaatcgcttggtatggatatagatgaagcagttgaagttactatactggatatagctgagaatcaaaaaaatcaccctgactggaaagaatataatgaatatgcagaaatactcatgaaagttaaaaataatccagaggaatatggattttgtgataattaatagtgttagccacaaatagatatataatacaattgaatataaaataaatattttatttaggaatagctataatggctattcttttttgttagcaaattgtttgcaatttaagtggctcctaaaactagtatttcatgttattataaaaatgcactcagttctgagtatataaacacatttcaaattaagctatcatagattatttaaataaattctaaaatttacataataaggttcaatatatgtatataaaccttaaaaaatggtaaatatattattacaaacatacgttctgatgtggtaaaatatattttataggaagaaattaatccattaagcatgatttttttattactataaactatgttataattaaagtttgtaaaaatttaccctggattttttaacaataatgtgctatattatctttagtaaaaaaggaggcgaaaatatgtacgcaattgatttattctgtggtgctggtggcatgagcgaaggtattctacaagcaggatttcatatattattttcaaatgatataaatgagtcagttgaattaacatatacaaataggcacgaacaattaggttataggcaaaattacaatactttttttagaagagctgatataagggaattaacaggcgaatatatactgcaaaaaattagagatttagagttttggaatgcagaagaaagaaacatccctgatgatattgatgcgatatttggaggtccaccttgccaaggattttcgctagctggaagaagaaatgctgacgatcctagaaatatgctttttagagaatatgtgagagtaatacatgaaatacaaccaaagtatgttgtcatggaaaatgtcactggatttatgaatactcggttaaatggctttattggaattaatggcgatgtgtatgacaacgaagttgcaccttatatattaactcaagaattaaacagaataggctataatgttttagaaccaagaatattagatgcttctaattacggggtaccacaagcaagaaggagagcaatttttattgcttatagaaatgatgtcatagaaccacaatacccaattagcaatcaaaatagtgtaacagctataacagacgcaataggtgatttaataagagatactcagatcagaatagatgttaatcctgaattaaccagataccaattagcctctataaatggaagaacacctaatataaatggtgaaacaattcatagtaataatataatacataataatgagttatctgctcattcaaatataataaaagaaaggttttctttatatagggaaggagaaagtacatctaatctcagagaaagaatacaagcacaaggtattgaattaaataactgcaatagtttagtaagttatctgtctaaaaacttaaacataacagaagataaggtaataactacttttcgaaatggaaatgtaggtgaagagatgttaaatgaattgttaaccaaaaaaaatatgagaagaagattagatagaaataatgtcgctgcaaccgttgtatctttgccagatgattttatatcaccatttgaaaatagaacattttcagttcgcgaactggcaagacttcaatcatttgatgacagttttgaatttttaggaccgagaacaactggtggagatagaagaaagaaagaggttcctcaatatactcaagtcggaaatgccgttccacctttattagcaagagcagtagcattggaaatagcgagagtactgcaacaataaatgcagtactctttttttaacttaaattgaagtaatcatacttattggctagtttaggtaattctttttttagagttagcaaatgactgtcaacatgtccagtttttaagtttcttcctaacatttcttttattgaactagcaatatttgattcactttgtcttccccaatagtttccaccacttatattacgtactctttgaacacatgtagaagtagatttgatcttttcaagttttattgttggaacagtaacaaaagaataagtaaacttagcaacttcatgcatagaataattattttttccaactttaatattgttcttaaaatcttctgctgaatagatcatgtcccacaacattggaatttgagcattatcattccaatttgttttacattgtatcacatgaatttctaacttctcaaaatctctatgacatagagcatttaacacatcaagcaaattatatgtgccttttctgcctttagttaacttaactttttcttcatctgaatctaaaatgtctattaaatttttgtcaatgctataatcactattatcaggaaatgtaattgctattaaatctgattcagtatttgaaacaaaattagaatagtttacagtaatagcatcactaactggtatcggtaaaagttgtttactatgtttcacaacaacggttcttctgcctattaggcataagtttaaataccaacatactaatgattcccaactagcacctccaccagaaacatctccttgctctctagttcctttattagtagtataaaaagtttttcttaagctatctcctaaatctaatatttgtttaggtgttcttttgggaactaattggtttatgtacggtttccatgtttgccagtttgtttcaaagcccttagccttgaatagctgttcaatacactttttcctataatattccacaatattttcatccataaatgtttcctcctttctaaatttattaatttgattatatcaccaaatcatttataatatagaataaatttataatccgttaaatagacttatatagttctaaccttttttttcgcatttcacaaagatcgtattgaggaatttcaatcatagatcgagcttcagcatagccaccccagtatgcaggagatttactcataagaatgcttatttcaaacaatttaagttcttcaatggtcctcttacagccattccaaacatcttttaaacactcaaaaccaaatgatatgccattagcacctttttctttaatagtattatataaacttctagcttgtggtattaaatctacaatagcatataatccatcttccctaacttctaacatcatattatcagctaaattaacatagttttcatgatccacataaagctctatattagcattagatcctatggcctttttaaaagcttctggctttatattttcaataaacttaccattcttaccttgtagcattcgactctctctaaaatcattgactaatatttcaagttgtaattttccattttcaagttctcttacttcaagtttattttggttatattgtttctccatattattcagatcctttcgtataaagataattaagttgctaagttattttacaaaaaagcatgtacagattaataaaatcacgataaaataacttttgtaagtcagttgttccaatgctttaagctatttggtaatgaaactggcttattttttacaaaaaaaaaaatgatttgggtcctttactatgaacagaactgcacctgttccggtcatagtgattatttccacacctcttctaataggggggatactaaacaaactatctcagaactcaccacagtctcttatacagcttaacaatataattattaatatttacacttatcaaatataaaaaagatgacacaacgagcatatgagccaatttaagctgcacctacttggtatcatctatatttatataattctactctttattattttcattaactgtatcattagaactatttatattagtattcttgatagtgttattgcctatgttcccatcagtattcaagatagcattcatattaggaatgaatacgtcccctgatcttttaaacattacactacctaaatttagtaataagaaatcatcttttgaatctacatatggatttatatcaagcatagctctaccctcatttaaagtgcaaagtccattctttaacaactcagatactatttgaactttttctaattcatttggtctagacagctcagatgtattgaaccttaggaaatatccttctttcttctccctttctagcaacaacgatttatttaaagcaccttctatatttacaaggataggtgagattactctttttaataactcgtcattattagtaatactatcaattccaaagagtttctttatatcagtatcaaaagcctttttattctcaactaattctaatccatcaaggctcattgaaatttctttgtactcaaggccttcttcaagaatcaccgttttaccagtattatctacaccgctataaaaattgttccaagattgttttaatctatctatagcatcttttgttaatcttcctgaagcttttaatataccactaggtcttactgcattagttaatgctttttgcaataccttattctgtgaaagtattatttctaaaatctcttttgatgataatattccttttccactaaaaccatcttcactattttttgttataataagaaactcataaatatcctttgcattagtaatattgttcaatgaatatgaaacactagcaccccgtagaacaccattactatcagctaatttcttgatagttacagtcttaggcgaaatcctatgaagcccctttacttgtaaagaatttctttcaatataagagtaatgatttccgtataacaataggtcttttatcatttgtgctttataatttgcagcatactctagatcgttattctcttcatttaggactttttctagcctatgtcctcttactcgttccacttgtccgtttatatcttccttgtacatatatattggaagctgcgagactgaaccacaaatcagatctagagcttctacaacagcaggaatagagtaaatagtatcttcgcttatatatattcttgaagctgaaaataactcagataatactacagcataatttctttcttcaataattgtttcttttttgaatagccccattttttcctccttagttttaaataaaataagtggtgctagagacaaccgtactcagttatttctaacaccacaattattaagttttattaaacaaccgcctttagtatacgtattgcttgagtgttaactaccgttgcatcacagtaagtttcagctataatacctatttgaccactagcagcatacttttctagtaatggagtaactgttatatcttgtaccatttttactgttacagcttcacctatgtttcctaacactactacttcatcagtaagtgcttcagtgatctcaatagaaattcccaatactctatacataggggattgtcctataacatcatgagttaagtacggtcttccagttccgtccattaattgagcgaccattgaaaaatttgcacgattcatgtacaatttagccttcggaagaaatacaggattaatatcagtgattagcttagataaatcagttattgcaatacctgtacccgccttagcaactactggagctaaagctaatatacctttagaaaaatgtccttcagtagcatctccattaaatatttcatgttctagtgttctagcaagtctagcagctaattgagcattcaaatattccataccaagacttggtgagttcattaatagagtcttcgacactaccaacattgtacccactcttctattctttaaaacacatttttcaaagcctgatagatcctcgccaattatttcttcggtctctcctaaaactttggctttcgttaattctttttcaattagtatagataattcaccaggtgcaactaccttttttgcttcattgaatactgatgatatttcttccattttcttcacaacatctgccgaaattactgatggcacagcatttgcctgggtaattgtatccatattcctaacttcacctacaacaagacctgctgcaaagttttcaagtaattctcttttttccattttatcttctcctttagtttcctttaagtttttttctgatgtatcatttatctgctcaatgacagcacgtagttcagtttctagagttaaatactgagagttttcttgttcagaaaaatctctagtttcagtttcaactttgtctaacattgattgcatttgttcttgcaattcgagccttttttccattagttcctttttattagccatctttagtcctccttggtaaatttgaacgtaaaaaaatccactaccgatttattggtaatggattaaatatcaaacatttttttggtgtctagttttagcgtttttattagcaatacaagatctttttcacgtggaagggaacatcttgcaaaactgtagactacgtaatctggaatacctgtttgttcgctgactttcaaacaagcgcttcggatacgtttatcgccagtatggttaattattgattgtcttatatattcacgatttatcattgattaaaacctcctgaatttatttgtttgaaatatagaaactatatattttaaaactacttatttagcaaaaaaaatagagccgatgggaggtaccattgactcataaaaactttaaataggaaaagaacaaggataatgaaattagaggaatcgaacaatatcttagaagacaagacgttttgctaagatatttgtacccctacaatatataatatacatttgaaatagtttagtttgcgcttacataaaaacttttcacaacgagcggctgagcgagttgaagagcaacgctagttgcgacatatttaatataaaatataatttttatttggtcggtctacttgtataatatagattttaaaatattaaaaagattattagctcttgcaaaagatgtagctgaatggattgaacataatcaagttgcaagaatgatggaaatggttgatgaagttgaaaagctagtagtaaaaatattactaccaggttatatacaggtaagagagcattcattcctaactgaagatgaactttatgaagtattgatgcaaagtaggaaactactttattccaattaattttaaattagttcatatttatatattgggtatggtcactgacgttgaccacacctatgtccattcacttcgttcatgtccataatgatagttttttaattttacgaaatatccatatatatgaatataaatttatatattactcgttataagaaatgtatcatatattataagtaaaaaaattgataaagttagatataccaatactttagatcaatttattcgcactcattttgtccattttttatagctttttgcacccattttgtcctctgattttatagttttaaataaaaataaaacaccgaattaacggtgtttgttatttataatcaaaaaagttcattatatattttaaatcttctatattgttacacttataaaataatcttggatttacaacaaaaaaatctctgtctcctcttactattctgactatagcaaattgattatttatttttaatgacattaattcttttataaatcttgatggcttttcataattacatattgtggctatttcagcacttttcataggttcactttcatcaaaatttatagcatttttattatgagctataacattaaaccttgtatttatatatggtagtaatcgaataaatgatgctagttttttatgttgatttggttttacactatcatatagttgctgtattccatcattaaatattcttgcaacctccatattctttacatctccttttaattgtccacgtttaataaacttgctacaaattttaatattatccctttctatttttataaggttattttgtattagatagcttttggttcttgaagtttcatttctgcttaaacttaagatcgtctgtagttctttttcagtaatctttttttggccttttgtttctcctacaactaaaatactttgataatttagatagctgcacagttttaaaaatcttactaacatttgtggttctaggtttaagcgtaaaatatctccatatagtaagtgaaaataatatcctaaattttcactcatgaaattattccattttttaatatccttatatgttggtttactatcttcaacaactgcatactctactatcatctgttcagctgagaatacctctccattaaccttatctataaactttactggtttaaattttttcaagttaatcaatctcctttttatttagccaatttaaaattgacctcttaggtaggagtgacctattgtttacctcacctcgcaattctttgtatttatattatataattgttttttcaaaagtaagttgtataatattggtgtcaataaacaatctaaattcaaaccatatcaaataaaataacctgtctaggtatatttacctaattgcttgtaaataagcgctacggcttgtttatgagccatatataatagaatactaaacatattatattaattatgagatagacacatgaattataaagataaaatgaaggagctattctgagatatggatctagattgttttgaatccacataacgaagaaaaccaatgaatctgataaaagcatttgttttaaagtaggattataatagaaaaaagttaaaaaatataatggttcacttgacttttttactataaaaaggtaatatactaatatcaaattaaattgaatggataaaacagagtataggggtgaagctgcaatggaaaatgaagtatctgctaaattaatttcaggagaagaggttaaattaataataaagtcaattgatgatgctaaaacacaatataaagactatgttaagcgtgagaagttagttactcaaaatggtaaatatcatgaaatgtggaattatatttttacaaatatagaaaaatcgtttaatgagtttccgtataagtgttataaaatctcaagacaaagattatgggaatttatagtaatacatgaccaaataaattatgtattatatgtcataatgaaagaaaacaattttgaaaaaataagaaatgctaaaggtaaagatcttcactatattaaaattttaaatttaataaatccttttaaaattgagaaaagtaagcagatatcattatttcctgatgatgaaagcaaagaagaatatataaaaaatgatttagataaaatgttaaaagatatagacggaaaagtaaacgtgtgtgtagacgtactatattctgagaaacaaaataaagtaactagtatatcgggaaaaatatctgattatgatttagatgaaattaaatcatattgttggaatgaatttattacagcagatattaacgaaatcattgatacaaatgatgaatatgaagttataactgaaccaattgaattacatgttagagaccatgtaaaacgagtgaaagaacatgaagaggatactaaagatattattgcaagcaaagaaacacaaaagaaaaatcttgagggaaagtaagcttgcatttaggaggttagcatgaaaaatgttaagtaatgaaaaaaatgcagttaaagattttggtagtgaaataataaaaaataaaaaatttaatggtagtagattgcaaacagctagaatatatagaggcaaaacaattatagatttatcaaaagagatagggatatcaaaacaggctatttcacaattcgaaaatgggttgatttctccacagtttgatactttgatgggtatagttgataaattgaattttcccatggaatatttttttgaaaaagatagcatagatatttcattaggcaatacctattttagagctcaaagcaagatgactaaaaaggatgaaaataaacaaagagaaaaagtaaagtttattggtaagctatataattttttaaatgagtatattgaatttcctaaattaaatattccaaaatttgaagagcatctatcaatagaagaaaaagctatgaagttgagagaatattggaatcttggagaagaaccaataaaagacataatatatgtcttggagaagaatggaatagtagttacagctataaagacagaaagtagccaaattgatgcttttacacaacaacaaataattaatgggaatcagtattatataatagtacttgggagcgataaaggttctgctacaagacgacaatttagtgcggctcatgaattagcacatataataatccatgatggatttatgaatctagatgaattaacaaatgaagaactcagaaatattgaaaatgaagctcatgaatttgcagcagcatttttgttgcctaaggcttcttttataaaagatataagtgcatatccaacgaatttggactattacaaacaacttaagaaaaaatggagaacttcaatttctgctatgttagtaagagctaatcatcttggggtattaaattataattcatatcaaaatatgatgaaaaaaatgagtagattaggatggcgaagtagtgagccattagatgatacattaatgattaatgatccaactcttttaaaaagatctgttaacattttgcttgataatgatattttcaatgaagatgaattaatgagagaattatcaaatagagagttaacacttccaagagaagagattgagaacttattggggttagatcaaggaatacttgtttcaaaagagaaatcattatcggttaaagtcatagaaatgccagttaaaaaaatactataaaattaaatattttatactatataatggatagagaagatagggggaaattcctatctttttatttatatagatatattttatatagttttataatttatatagttattaggtaacttttaccctacggtgttaagtcgtttttacccatggggtagggagtttatgtactaagggttaagtaattattaccttacatagaatgagttataaacctgttactaacatattattaatagatgcttgtttgcaaattatttgcaatctgatttattaatacttgcttactttcattaaaattcacgttaaaatttaatagagattaataatgaaagcgaggttagaatatgaatacaaaagaactaatggaatacgtaagacaagcaaatggagttgttgctcccaaagatttatttcttcaggtacctatagagtttataagaaacagtcaatatacgccaaatgaaaaaactttgtttctgctactctggacgtatggtataggatcaaagacggtttatccatcacaaagcagattggcaaaacaaatggggacaaccacaaaaaccataagaagtatattgcaaaagctcgaagaaaaggaaggggtatatattgtgcagcaatatatagaggggacaaatgagaaaacatcaaatttatactttctttcggaaattacaaaagatggtgagttcaagaaaggatattttgatatggtcaaaataagatttagtgaaaagaagcatataatacaaaaggccaccaagcagcctcgacaactaacttgatggcagatgtttaaatcctaattattattatagataattaaatatatttttacaagggactggattatatttctagtcccttttaagtttacttcaaaaatatcaattatataatatcaacataaaaaataataagaagatttttagctaaaaacttcaaaattgaatttttggaggaaactaatatgaagacaaaagaagagaaaaaaatagaagtagttgttgaatatagcaataaacgtatagataaaatctcattagctgggttgctttatgatataatggagcaaaatctaagagaaggagttaattatgatactaaagaagataattgtgcttaatcgtgtttctagtaatagacaagattttgagagccaaaataatgctataagagaatatattgataaaaataatattctagttgatcagtggattacagaagaaggcgtaagtggatatagcaacaaattaagtgatagacaagctataaaacaaatagaagaaatggcattgttaggtgaattagatacactgattatatttaatctcgatagaataggaagaactacagagggagcagaatttataaaacgtatgacatattctaatgtaaaagttatatcggttacagaaggattgttgaatagtggtaatgatactgatgaattaataaatggtatcaagttttggatggcccaacaagaaagtaaaaaaataagtttaagaagtaaaaatggtaaagaagctactaataaaaagggattatttgcgggtggaccagttaactttggatatggagtactagatcagaaaatgtttgtaataccagaggaagcagagatagttaagttgatttttgatttatatataaaatgtggaaaaaatgaaacggttaagtatctgcaagaaaaaaatataactaaaagaggaaaaagatttagtcagcatatggtacatgatttattaaaagatactgtttatataggattaaaaagatataatcaatggcaaaaggtatcaacagacccaacaaataaaaaacgtaaatataataatgaaacattaaaatttcaagaatatagagaagaactaagaatactagatgataatacttttaataaggtacaagaactcattgaaaagcgtacaagtagtaaagataaagttaagtataccaatagaactaatgctttatttgaaggattattatggcatagatgtggtgatgaagaaataagaaagctgcacttagataataagaaagataagtatggaaatgttatctattcttatagatgttcacattgtagaagaaatttttataaagatgttacaaagacttatggaagcaaaaagtataataagctattagaaaataatgtactgaaattaatgaataacatgtctattgaagaattagaaaaaaaggcaaaagaaaaacaaggtagtacaagtaatagtatactagtatctatagaaagccataaaaaggaactagataaaaaaagaaaagctattagtaatatggaaaaggaattgattaatatattttctggggaaagttcaatggataaggatatattgattaatatgattacaaaaacaaaagaagatatagtaacattatcagataatcttaaatcactagaagctgaatatattgagattagtaaaactatttctattgatagagcattaattgagcaatataaaagctttaattatgtttacggattagctgatgataaacaaaaaaaattattattgcaagaagttgttgaaaaaataacttttgacggtgataaacttatcattactctgttcttggagtaattttttttacactataaaaagtgggtttatattcgtatatcagtactgataccagctccgccgaaaaagactatattattactattctttaatatttctgataacttttcaatgctcatagaaaaacctccaaattaaaatttattttaagtattaaaaacacattatcatgtatatttaattattgcacaattgattagaaaaataaaatataaaccccgctgaattaagcattttaaaatatttataataaaaaaataaaaaatgtgttgacataatataaataactcgatataatactacttgtatctggtgatgacggcgtagaggtaacactccttcccattccgaacaggaaagttaaggtctacagcgctgatggtactgcatgggagactgtgtggaagagtaagacgttgccaggtaatatggctcgatagctcagtcggtagagcagaggactgaaaatcctcgtgtcactggttcgattccagttcgagccaccataaaagcactaacataagttagtgcttttttctatatctttagaaaattataattcagtaaagtttgtatacaatttttttgaatggtttaattaacttagtttactattttaaaggaataaaaaataaattatattcgttaaaaagataacatttaaattatatttctaaatgttatcttttttaatcttaactatttgtaaagaagttatatagaaattccttaaacagtacattgatctatatatattgagtagataccgcagttaggacatacagtcacactaactatatagctatcatcaatttttcctagaccaaaaagtttattaaaagatgtattcctatattcattacataaagtatctattacatattcattatcctttgtatatatgtaaaagtggtactctaagtaacgataagatttatttatttgctcttgagtattacatgcacatttatcgccataatattctgttgaaaaacttacttcttctccttcatttagagcattcaatattatatctaaggaaagacctgtaatctcattttcgccttcaaaaaatatcccatcgcaattattatctgttagtacgtattctttattatcataaacaaatttataatccacaaaacaacctcctcaaaattagtgtataatcaattatacaccagcatatgcacaatgtttagcaaaactatatttaaacatttaatttactttataatataaaggcttaatttgaatgtaagcattgggaaagtaaattaaataattatatattttcgatttgccagtcaattggttcttgatttgtagaaattagaaaattgtttgtttttgaaaaaggtttacttccgaagaagcctcttgatgcagataatggactaggatgaacggattttattataagatgcttaggattagtaataaagtcagtctttgaaatagcattattaccccaaagtatgaatactataggtgtttcctttttatttagcaccttaataacctcatttgtgaattcttcccatcccttatttttgtgggaattagcttctccagctctaactgtaagtaccgtatttagcaataagactccttgatcagcccactttcttaaatagccattgtttggaatatagcaacctaaatcagtatgtagttccttatagatattaattaaagatggtggagtttttacacctggattaacagaaaaactcaatccatgcgcttggccaggtccatgataaggatcttgacctaatataacaactttaactttattataaggtgtaaaatgtaaggcgttaaagagatcatacatattaggataaatggtcttagagttatattcatttattaaaaattttcttagattaatataataatctttttggaattcagactgcaaataatttttccaatcattttttaatatatcggacattaaatcacccctaaattagtataacattttatggtggttttatgtatactatgtatttttgattaaaaatctaaaatttatttagttatattattgttagaagtagtagatactgttaaaatgaagtgtatataacaaactgttaaaaataatataaaatgattataaaggagaattcacatggaaaataaagtgttagctgttgcagcaggatatgaaataacagaaaaagatttaaatgcaataattagtagatatccacaagagcaaagaggagctttacaaagcgaagaaaagaagaaacaattggtagaacaattgatttcatttgaattaatgaataagtttggaaaagaaatacaattagataagactcaagaatacaaagacgccatggaaaatatatcaaaggaagttataacttcaatggcaataaataaagtattgagtgatgtaacaataacagatgaagaagtaaagaaatactatgaagataataaagaagcttttggtcagcctgcaacagtttcagctagacatattctagtagaaactgaagaggaagcaaataaggcaagagaagaaatcttaagcggcaagatttcattcggagatgctgcaatgaaatattcaacatgcccatctaatcaacaaggtggaaatttaggtgaattctcaaaaggtatgatggttccagaatttgaagaagctgcttttacatcagaaataggaaaggttactgaaccggttaaaactcaatttgggtatcatttagtgttagtagatgcaaaaaatgaagcctcaatcaaaagttttgaagaagttaaagacagtgtattagataatttaattaaagaaaatcaacataaaaaatatgatcaaatattgaaggaattagaagctaaatacggagttgaaagaaaataaaaatttctatttaatagcaatatagtttcaaaaataaaggtaatgatggatacattacctttatttttttattttaaagttcatatgttattattttggaatataatacaatattcaaatatgattttatgttataaaaatgtattcagatatccctacgttacagatttatatactaacagcatgagaaaaagcttgtcttaaatttgcattgtagaatgttgaattatttttagtaatctaattattcgtatgtaggcgataaaacaaatatttataataactaatatctataaaagctcagtaaaggaaaaaatatatttatcacaatacttaagaatttcggatataggttctaaacataaatcatcttttattccgatcaccctcatatttgctttttttgcacttttcatagcagggagtatatcctcaaatactaaacagtattcaggtttaatatttaacttttttgctgctaataaatatatgtcaggacaatcttttccttttgcgacttcatcagtaatagtgattgaatcaaaatagtcataaaccccattgttttttaaacaagcctcaagcagtgggatagaattgctagtcgctaatgcaatttttattttattatcttttaaatattttaaaaaagtttttacacctgatttgagttttacattattagcgtaatgatgaaatgctgcatgatgccaatcactaagtatttcatctactgaatcttcaattttaaatctatttttaaaatatactgctgtctgataaaaacttaagtgttcaatatcgttttttaagtcattaggtacagcatgtcctttctttttaagataatctatgtcgatctgagaccatacccacatggaatctacaatagttccatctaaatcgaaaattacaccttttatattacttagcattttacacctccaaataattgttatttatataaacgaatagatattgatatagtttagtgccaaacttaatcttttattggtgcgccttagtgtcaataaatattataattgaagcattagacacgaataagaattagaagaattagtaatacgatatatgttatagattaataaattaatgaattactaaataaaaaaacttaaggatcaatccttaagttatactagtctaataatatatttggtcggggtgacagggattgaacctgcgacctcatggtcccaaaccacgcgcgctcccatctgcgccacaccccgttatacattaattatatattcaagtaaatcttatgtcaaggactttagaagatgtaattaatacagaaaaaagttaattatagtcattagaataaataattttgtgatgagggaggctggaattgttaagttaagtttattgatgaaaatttttatatataagctataataagaatcacaaagaataagctagaaaaagtggggaatacggacgatatttagataatagtaggataaactaaattctcgctatatatatgaattgttcattcttatccaaggtgttataattatgtagtaatatagattaatggaggagggaaggtttaaaaccgatatttaatgaggagtagaattctagctattatgttagcaaccgtaatcgttgtaggtagctcgataccagcgtttgcgacgccagataatcaacagttgagtgattcaagacagaaatatgcagaaattgaaagcaagataacagatattcagaataaaattgatgatttaaatatgcagatagagccgctacaattaacagtagataagaataaaaaagaaataacaactatcaataaagttattgatagtagtacaaaagacattgaacaatataagaaagagattaatacattagatttagctttaggacaaagagttaaagctatgtacatgtcaggtgatttagaatttggttacttgaattttatacttgaatcagaatcaacaagtgatttcttttctagagcagaggcagttagtaaaattataggaaaagacaaatctgccatagaagatgttacaagtaaaaaggaagaattaaataacaaaataaaatccctagaagataagaaagatgaaatagataaacttaataaagaaatacaagttagcttaagtgaactcgatggaaagaaaaaagaagcagaaactttatcaagtcaagctaaggatgaaaaaagtaaatttgactcacaatacttatcacaattagaaagagaacttgtaaaatctcaatttgatgttataggtaactctaatagttcagctactgatcttcaaggagcaattaatcaattaagaaatattagagataatcaaattaagagtgagatcgttacttcagagataaatgataaaattgaaaaggctaaaacaatggtagcagataaaaaagcagctgaagtaaaagtggcaacgccaagtagaggcggaggcggaagagtagctgcaccatcagcaggaaatgctcaatctattctaaatgaggcatatgcacagttaggaaagccttatgtatggggtgcaactggagatgcaagctttgactgttcaggatttactcaatatgtttatgagcatgctgcaggagtagatataacaagaacaacttattctcaaattggagttggacaaccagttagccaagatcagcttcaacctggagatttggtatttactcatccaggtcacgttgggatatatgttggtaatggccaaatgattaacgcacctcaaacaggtgatgtggttaaagttgcgccagtttatagtttttatgctgcaagaagagttcttaagtagttaacataagaaattagttgttaatatctgatttcaaattattgtccttctgtaaaagatcagaaggactttttttattttacttgtatgatataatgtggaatatatactttagagattaggtatatacaaatattgatattagatattttaaagtagaatattgtaaagttaagtaaaggaagaataatatgaataataaattgcaatatgtgagagatgatgagacagtagatgatttgcaacttaagggattaaatttaattcaaaagaaggagggatttaaatttggtatagatgctgttttattatctgattttgcttatataaaaaataaacataaggtgatggatttatgtacaggaactgggataattccatttttgatatatggcaaatataagcctgagtgtgtatatggattagaaattcaagaagatatggtagatatggctaaaaggagcgtaaaattaaatgagcttgaaggaaatgtatgttttataaatgaagatttaaaaaatatagattatctaaagacacttgataagtttgatgcagtgacagtaaatccaccttataaactaaacaattcaggaattataaatccaaatgataagcttgctatagctaggcatgaaatattatgtaatttagaagatgtgatttcagcagcaagaattttattaaaggataatggaagactctttatgatacatagacctgaaagattagcggatatttttattttaatgagaaaatataaaatagaacctaaaagagtaaaaatgattcatcctaaggtaggaaaagctcctaatattgtattgattgaagggcaaagagatgggggagcctatttgaagtgggaagcaccattgtatgtctatgatgaagatggaaaatatactaaagaaatagattcaatatattggaggtcatgatatggaaaatggaaagttgtatttagtaccaactcctattggaaacttaaaagatataacattgagggctctagaagctttaagagatgttgatattatagcggctgaagatacaagacaaacgttgaaattattaaatcattttgagataaaaaaaccattaataagttatcacaaatttaatgagcaaataaaaagtgataaaattatagatttactaatggaaggtaataatgttgctttagtttcagatgctggaacacccggaatatcagatccaggaagtgttattgttggacgttgcatagaaaaaaagataaatttcgaagtacttccaggagcgacagctataactacggcattagtttattctggattagacacaactaaatttttattcaggggtttcttaccaagagaaaataaagaacgtaagatagtcacaaatgacttattgcaaagtcaggaaactattatcttttacgaagcaccgcatagactgatagatacgcttgaattcttattagatacatttggagatagaaaaattgcagcatgcagagaattaactaagatttatcaacaaatacacaggggaactttaaaagaagtaattcagtattttcaggagaataaaccaagaggagaatttgttcttgttctagaaggaaaaagacttgaagagataaaggaagagcaaagggaagagtggattcatttatctattgaagagcatatagttaaatatattaatggtggtgcgagtaagaaagaggcaataaagcttgtagccaaggaaagagaattacctaaaagtgaagtatataaattctcaactaatatataattaagttaagaaaatagactatctcaaattaactcttgagatagtctattatttattgattatataattaattatataataggaaattagaatatatcaaatactatctgtttgttttaatttcgtctaaacatttagtacagatattcttgcctttatagttaattacgtctcttgcatctccacagaagatacaagctggttcgtatttctttaagattatttgctctccgtctacataaatttctaatgcatctttttcagcaatatctaatgttcttctaagttctataggaataactattcttcctaattcatctactcttctaactacacctgttgatttcataaaaaattcctcctaattccatgattcgacattctactatgatatattaccaagtatgtaatataaagtcaatgtatatttttaaatatttataagaaattacaaatttcaactttaataaacatcttatataaaatatactaccatattttagaaaagtcaagagggtttatttgtaaaattatcatattaatccaaattaataaatttgaggaatctagatgtaccaatggttagagaaatgtatatgaattatattcatgattatataatagtgaatttacaaataaagtaatataaggcatatgtccgctttttttgtagaaatgcaaatactataaataataatgtcgattgattacataaattagatattttttatcaatactatatttaaaaaaaattagatatgtcgtataatactattattatactaagagtataaactagtagaaaaatttttatattacaatgtttataataacttgtaacaagttcatgattactatataatatataatatagattgagaaagaataggtgcatgataatggcaggaaaatttgattcagattatataaaagaattggctaaagaaatgtctaaaagtacttccgtttcatatgaagatattcctaaatatgatttgtttttatcccaagtaatcgattatttaaacgataagtttgttgatgagaagtttactaacaatatagttcaaaattatactaaaagcgaagttataactaagccggaagatggcaaaaaaagaggatatacaaaaatgcatttagtacaattagtactgcttagccatatgaggcccttattaacgacggaagaaataaagaaagtttttcggattgcatttaatgaaatcaatgacagaagcgatgatatactgtcatgggaagagacatataaaactttcacacaaatacaaaaggaaagtttagataactatttagatacgtttatatcaaatgatgataaattagaagagataataaagaattttgaattgaaagataatgataaggaaagaattaaaattttcctattagttctttctttaatagcagaagcaagtgttattaaaaagttagttcaaaaaatagttaaagagtatgaagaagaataaattatatgagataaaatatttacaatagcaataaactaaaaaacacttacttaattagaacttgaattttgttaggctaattaagtaagtgttttatgactatgtttatgatttaatatggaaaatgtgattttaactatagtgaggaattaatttatggataaaattcttatacgagagtctgtgagaaatttagtagaattttgcttgaaaaaaggtgatatagataataggttttctggaagtgctagggcagtagagggagtaagagcacatcaaaagcttcaggaagataacggaaggatttatgagaactatgaaaaggaagtatatttaactcatgagtttgagacgaataaaagcttgatctatattgaaggaagagcagatggaattataacggaaagagataaagttataattgaagaaataaaatcaacttataagaattttgcatacattgatgatttgaatgaggtacattgggctcaggcaaaggtgtatgcttttatttatggaaatcaaaataatcttgaagaaatttatgtgcgattatcctacatgcagttagaaacgaatgaggttaagagttttgaaaaaagatttactataggagaattagaagaatttatatctgatttattaagagaatatgagagatttagtgttttaatatttaaatggaaaaacattagagatgaaactataaaagtactaaattttccttttgaaaaatacagagaaggtcaaaggaaacttattaatgtttcatatcaaactataaaagagggggaaatattatttgttcaggcaccgacaggcataggaaaaactatatcaaccatattcccagctgtaaaggctataagcgaaggaattggagaaaaaattatatatttgacggcaaagacgataaatagggaagttgcagaagaaacttttgaaagattgcgtcaagaaggattgaaatttaggactatcacaattacggcaaaagagaaaacatgtattaatgatgattttgattgcaatccagagaagtgcatatatgccaaagactattatggtaaagtaaaaaaagtaattacaaatgttatcgaaagggaagaaagaatttccacggaaatattgaaggaatatgccgaaaaatatcaagtatgcccatttgagctatctttagatataagtacttattgtgatggaattataggtgattataattacatctttgatccaagagtatctttgagtagagttctagaaagcaaaggaaatatagttttggtggatgaagcacataatttaattgataggtcaagaaatatgtattccgcatccttatataaaagtcaaattctaaattgcaaaaagataactaagggtaaactaaataaactacattccttattgggaaagattaatgattatttcattgatttaagaaatgaatgcgaccatagagaagtgaaatcattttatgaagaggaacatcctaaggaattgagtaagtatttgcagttatacttaaaagaaagtgaagaagtgctagtaagaggaaatagatttgatggttatgaagatatattgaaattatattttgatataaatgcttttacttctacgacacagctctatgatgaaaattataggacttgtatagaaaaggattctcaagaaatcaagttgactttatattgtgtaaatccagctaagaatttaagagaatacttaggaaaatgctactcggtaatatttttttctgcaactatatcaccaataaaatactatgtaaatatgctgggcggagatgataatacatataggttaaagcttccatctcctttcaataaagaaaacttaaaagttcatattagtcctattaatattagatattcatatagaaaaaggaccttatcatcagtgaaagataaaatttgtggctttataaagcagcaaattggaaactacatgattttttcaccatcatatgcatatatggaagagttatatagccatatggaggagccgaagctagaagaatttaatcttatgaaacagaaacctaatatgacggaggaagaaaaaagtgaatttttaagaagatttaagaatagcaataatttattaatgttttgtgtgcttggagggatgttttcagaaggaatagatttgcctggtgatcagttaattggaagcataataattggagtaggatatcctatggtagatatgacaaatgaagttataaaggatttttataaagaagatggttatgactatgcgtatgtatttccaggaataaataaaattcagcaggctgtaggaagagttataagaactgagacggacaaaggaagagttctgcttattgatgatagatatataaataataaatatagtgttcttttaccaaatgagtggtatcctataaataaatattaaattacctatagttttatgaaataagctactagattgtattgtgcattgtgaattaaaaataagtatgttaaaatattcatggtagttttatgaaatagtatatctacatataattttagtatttacactacaatttaaaaaatatttagttattgatatcgtcagtcagaagtttgaatcggagatatattggtgatgattaataacatattaaagtagaattaaggagcgaggataatgaatattccattaattgatttaaaagctcaatataagtctattgctgaagatttagatagagtaactaaagaagtgctttcttctgcgaattatattatgggcaagaatgtaattgaatttgagagagaatttgcagaatatataggagttaaacatgcgatatcagtggcgaatggaactgatgcattggttattgcattaaaatctttaggaatagggaatggagatgaagtaataacttcgacatttacttattttgcttcagctgaagctatttcagcagtaggtgcaacgcctgtttttgttgatgttgaaaaagaaacatttaatatagatccaactaaaatagaagaaaaaattacaaataaaacaaaggctattataccagttcatatatttggacaatgtgctaagatggatgaaataaatgaaatagctaagaagcacaatttaaagatcgtagaggatgctgcccaagcatcaggttctaaatataaaggaaagatggcgggaactttaggtgatgcagcatgtttctcattcttcccaactaagaatctttcgtgtgctggcgatggcggcatgatagtgacaaatgatgataatatagcaacaatagcaaaagctttaagaacacatggaagtggagaaactggacaaaaagcttataatttgctaaataatataaatgatgagatagagacgtctaaagatggtgacgatactgtatataatgctttaaaatactataattatttaatcgggttcaactctaggttagatgctattcaagcagcaattctaagagtaaaattaccacatttagatgattggaatagtagaagaagagaagtagcaaaaatatataatgaaaaattaaaagattctaatgtagttgtacctactgttgatgaagaaaatgaaactatatatcatcaatatgtgttacaatgcgaaaatagagaagatatgataaataaacttaaagaaaatggcatagcaactggagtttattatccagtcccactacatttacaaaaagtatataaagatctaggatataaagaaggggatatgccggttgcagaatatttatcacatagaacatttgcaataccagtttatccagaattaacagaaaatgaaataaattatatagttgaaaatataaaggcataatattaatattgtaatatgcaaattcctatatattttgaacttgaggtttacttaaggaaaatattgataagtgcgagggttaattatggataagaattattttgtacatgaatcaagttacattgataacgacgtagtgataggtgacggaacgaagatttggcacttctctcatataatgagtaattctgtaattggagaaaagtgtaatataggtcaaaacgttgtaatatcgcctggtgtaaaaattggagatggagtaaagatacaaaataatgtgtctgtatatacaggagttatttgcgaagattatgtattcttaggaccgtcttgtgtgtttactaatgtagtaaatccaagaagctttattgaaagaaaaagcgagtataaagaaactataattggaaaaggggcttctataggtgctaatgtaacaattgtgtgcggtcataatatagggaaatatgcattagtaggtgctggagcagtagttactaaacacatacctgattatgccttagtagtaggcaatccggcaagtataataggatatgtatgtgaatgtggagaaaagttgaactttaaagatgagcatgcaacttgtaaagcttgtgggaaaaagtatagtaaagataaagaaaaagtagaatgtatagattagaaaaacggatttttatttattaacatttcattatataatttgttaataaaactttttagtaaattatgttctgtggataaaattttaggccgtaaattacaggaggtataagatgtcattattaaaacaacaattattagataaaataaataataaaactgcaaaagttggtgtggttggtcttggatatgttggattaccattagctgtggaaaaggctaatgctggttatcaaactattggatttgatgttcaagatcaaaaggtaaatatggttaatgaaggaaggaactatattggggatgtagtggatgaaaatttaaagaagatagtagaagaaaatactttaagagctactactgactttagttttgttaaagatgtagacactatttgtatttgcgttcctacaccattagatttatataagcaaccagatttatcatatgttgtagattcaacaaaaagtgttgcacaatatctacataaaggtatgcttgttattcttgaaagtactacatatccaggaacaactgaagaggttcttaagccaatactagaagaaagtggacttaaatgcggagaagactttttcttagccttttcaccagaaagagttgatccaggtaataaggactttaatactaaaaatactcctaaagttgttggtggttgtacacctgattgcacagaagttgcagcagcattatatagaaacatattagagggagatatccatactgtatcatctccagccgtagctgaaatggaaaaaatattggaaaatacatttagaaatataaatattggattagctaatgaaatggctattttatgtaatagaatgggaatagatgtatgggaagttatagatgcagctaagaccaagccatacggatttatgccgttttatccaggtccaggcttaggtggacattgtattcctcttgatccattttacttagagtggaaagcaaaagaatatgattatcatacaagattaatagaaacttcaggagaaataaatgattctatgcctgaatttgtattagataatgtaatgaagattttgaataagaataaaaaggcattaaatggtgcgaaagttcttttattaggagttgcatataagaatgatatcgatgattatagagaatctccagcattcaaggtaatagagctattagaaaagaatggtgctgacttaatggtaaatgatccgtattgtccaatttctaaatataagggtaaggtttataattctgttgattggaaagaggttataaacgagtctgatatagtaattataactacaaatcatagttgttacgattacgaatcaattgtgtctagagctaaagttgtttatgatactagaaatgcaaccaaaaatgttgttaataatagagagaagatttataaattataagtttttcacggtgtatataagctgattctatgtaagaatggtatattgattctaatgagttactattagttagaatatactgtttataaaaagagcgcctccataattttatggaggtgctcttttatttacatttattaatggtacatataatttgtgaaaagcgaataaaataagtactgcataaaataaatagatttttaattaatataaatagaaattggtgattaaatgaaatatataaaattaagtagcaaagttaatttaattatacatcttatagtaaaaattaagagggacgatgtgtttgcactagcatctcagttagcatattatttaatattatcatttttcccatttatgttatttttgatgactttggctggatttagcagcataagctctaaacaaatactgggacaattaaatgttatgcttcctaggagtgtattggaattaactcagtcaactgttatagagatatttgacaatcaatatactggattgttaggaatatctatattgttaacgctatggacagcgtcatctgcatttaaggccataataaaaagcataaataaggcgtacaactttaaagaagaaaggtcatttattaaactttcaattatttctatgttaggaatattagcattagctgtaactataattctagctttaacagcgttagtatttggaaatgtaataggcgattatattaaaagtatcaatccattttatgaaataatattgattatttggaatatattcagatatacttttatattagcgataatgatatctatatttatttgcgtttataaatttgctcctgctaaaaagttggtatggaaagaggtaatcgcagggtctatatttagcacagtgggctgggtgttagtgtcctttgttttttcattttatatcgataattttaataattattctaggttttatggaagtcttggtgcagtatttatacttatgacatggttatttttaatatcaataatattcatcttaggagtagagataaattttgttacatctgagttaagaggtagaaatcgaatgattagaaacaggtagacaatgatattaaattttattataaagtttaattttttattgaatagaaattaccgaagtgggtataactttagaagaaaaatattcaggaggtaaaagatgaataagataatattattaggaagattagttaaagaccctgaacttaggcacactgaaaatggagaaaaaatttataccaagtttacaattgctgtgcaacgaaattttagattacctgatggaattagagaagcagattttatacctataaaagtttggggaaaaaaagctgaagttatagtaaaatatatgaaaaagggaagccttattactttaagcggtagattaagaactggtagttatgaggataaggagggaaatagaaagtatatagcagaggttatagcagaagattttaaatttcttgagaataagaaaagtcaaactgaggcgttgtaaaaatattagcctagttgattttaataatataagctatatggatagataagtatataactataaatatacttatttatagaagaggttatctaattgttagatattatcaatgcgtttagataacctttgtgataacataaaaagtatatttttacttacaaataaaagtatacttaaaataaatattcttttaataaaatgcttgattataaaaaacgctgatgatattagtttaatttaatagaactaaaaatgaatactaaagtcattaaagtaagataagtagtatttatatagaaatgaaaaaaatgttttttatattgtaacaataaatgaaaaatatttgtagaaaaagtgttgtatttatgtgaatatgtgttataataatattgtaaacgatatctattatatatttttcaattatggtgaaacaaaaaaagagattatgaggtaaaaaaagagctattggctctttttttatttctttatgataattaataagattttaattgtaaataaaaaccatattgagtttttaaaaaatatatacagtgcattattcgcctaatttcgataaaagactttttttatatgaaaatttaaagaatgtatatgttgtaaaaaataaaggaagaagttttattgtcaataaaaaaaatataaatcttgaaaaagaggacatgctttgacaatttattgatacattatgtgatactataggtttgtaaacaaggaattactatcttgagggagttgaaagggttatgaatttggttgaggaatatacatcaattaatagtgatgctgatgtagagtatagatatgcatataggcttataaaaaaggattataaggggataactgcatatggaattgaagttgaaagaaaagattatattggtttaaaaaatgtaaatttagagagagaaaagatagatataatatcaattcatagatacaaagtaaaacaattacttatgaaattgtttaataatcaggtatcaccacttcacttaattgatattatagggacgtatgtggatgagcatgcttatgagtttgatattggtatgggagagaaagttataaattaatattaaggtatagaaataattaaatatttacgctagtatatggtaagagattactaagaaaggcgataaatcatgattattggaattggaacagatataatagagataagtagaatagagcgtgcgatacaaagaacaaatacttttattgaaagatcatttacttgtaatgagattgcatatttcaaattaaaaggatttaaggggaatgtagtagcaggaaattttgctgctaaggaagcgattagtaaagcaataggaactggatttagaggatttggattaaaagatattgaaatattgagaaatgagttgggaaagccaatagtgaatttaagtgataaaatatataacctattggagataaaagaatttaatatgcatgttagtatttcacatagtaatgaaaatgctatagcttatgcagttatggaggcaatataatgttagaaattttttcggctaaacaatgtagagaaattgatagagaatgcattgattatattggaattcctagtatcgtattgatggaaaatgctgcgataagtttatttggggagatttcagataaaggtgaatcgtttttaatattatgtggaaaaggtaataatgggggggacgcccttgcattagctagacatttgatattagatgggaaaaaggtaagggtttatattctaagtaaagacgaaaattacagtcaagattttaaaattaactttgggatattagaaaaaataattgaaaagagtgacatattatttataaagtcagagaacgatatagatgaaaacgtaatacgtgatattaaagactatgacctattaatagatgggatttttggtgtcggccttaacaaagatttagtgggaatgtttaaaagtattatagaatgtataaatttatatgcaaaatttgtggtggcgattgatacgccatcgggtttagactgtgacttaggtattgagagaggaatcgcggttcatgctaatataacttatacatttgagttcatcaaacagggctttttagattataaagctattgattgtgtcggaaaaattaaaatattaaaaataggtattccagagtatataaaaaagaaaaactctaataatttttatatgctagaaaaaaaggaatataataagatgcttttaaaaaggcaggtttatggtcataagggagattacggtagagcagtagttgtagctggaagaatcggatttactggagccgcctttataactacggaatgtacggttagagcgggtgcgggattgactacactagcatgcagcagtgaggtgcaaaagatactatcaagcagattaacagaagctatgacattagactatgaagataatgataactttatagaacttataaaaagagcaagttctattgcctttggtcctggaattggggttggagaaagagaaaaaagcttgttggaaaagataataagtaacagtaaatgtcctattgtgattgatgcggacgggatatctattataggggaaaataagtacttgctaaataatttaaagggtagggcaattattactccacatccaggtgaaatggcacggtttctaggaatgagtattgaagatgtggaggctaatagagtcagcatagcaaaatcagttgctatgcagtatggaataattgttttattaaaagggtataataccgtgatttcgaacggaaaagaagtttatataaatcctactggcaacagtaagatggcatcaggaggcatgggagatgcattgaccggaatagtaaatgcatttctgtcacaaggagctagcataaatcaggctgctcttttaagtgcatatattcatgggaatatagctgataaattaagcaaacaagtttacatagtaaatgcaagagatattataaccgaattacctaaagaaattaacagtattattgattaattaagaataaagtcactaagattttcataaatagtaatatgtagtaataaatcttaggaggccttatggattttagaaaagtattgttcaataaaaaaataattataggtattttggtgcttattccaatacttatgattttgttagttattttatgtagagacgtaattaccccttcaaatgaagatataattagtgaactgaaagacacaaagtattatagtagtaaagttgattatctgtttaagaattctaagtctgaattcgaggaaaatacaatgcaatactatagttttgataaggggtcaagaatagaattcggaaatgactataacagagttaaggtttataacggttcagagataaaagttgagggtgacgaagataaagcgggatatacacttgataaggatatagacgtaatttatcctttggcattcatagaaaatatactatctaataagcaagctgatgaaataaaagaggttaaagcagattggggaccaggagtatatttacaaatagatatagaatttaacagcaagaataagcatttaaataaagctgaattctatgtagataaggataagaaggttccagtattattaaagattttagatgatgataataaagagagagtaatagtaaagtatagtgattttaaaaaagaaaaaacattaagtgatgatttattttgatttgaataaatttattaattagaaatcaagccaacattaatattaaaaaacgatatactaaatctaaatataaattaaagtacatattagaaattttgtagagaaaacatttaataagaattatctagagaatggtaaagaagtaatacaaatcctttgacaaattgacataatttgcaatataatcatagttataagaactttttactgctatggaggcgaaaagatgtcaataattaatctaaataacatgaaaaataaaaaaatagttaactcagggaataataaaattaaaaaaaatagtggaattatggagaaatcgttaatacaatatattaacgagggattttcagctgattttgaaaaactaatgaaaaatggttatcaagaaatggctgaaataaacttggaatattctaaattaggttttgaatatatgttagatgatgttaatgagtatgaggcatggatttgcggagtgtgattatttagaatggcaaacattgtggtaaaaagaggggaaattttctatgcggatttaagtccagttataggatccgaacagggcgggataagacctgttattataatacaaaatgatattggaaatagatatagtcctactgttattgtagctgcaataacatctcaaataaataaggctaagcttcctattcatgttgaaatttcatcagaagagtatggattaaatagagattctgttgtcttattggagcagataagaacattagataagagaagacttaaagaaaaaattggacatatgactgaagcagacatgaaaaaggttgataaagcattagcggttagcttgaatttaagctaaagagaaaacaaaagggttttatatctattaatattaggagtggtatagatgatttttttatttgtactactctttttgtgcgtgagaatactctatattatatgaatatgcttaaaagtatatcacattaatgaatgaggtatacaaaatatattttgtatgctagaataaatatgttaaaataaaacataatataaatgagtaaattaataatagggggttgtataatgaataatgaatacaaacttgaagaaatctcaaagttaatgagaaaagatatagtttctatgcttacagaatcatcatcaggtcatccaggaggttctttgtcaatagctgatattatgtctgtattattctttaaagaaatgaacatagatgtatctaacgcaaaagatccaaatagagacagatttattttatcaaaaggccatgcggcaccagcgttatatagtgctttagctagaaagggatattttgaagtagaagagttaaagagcctaagaaaaacaggttcaagattacaaggacatcctaatatgaatgatttaccaggaattgatatgtctacgggctcgctaggacaaggaatttctgcggcagttggaatggcattagcaggaaagcttgataagaaggattatagagtatacgcaattttaggagacggagagcttgaagaaggccaagtttgggaagcatcaatgtctgcagctcattacaaattagataatttaactgcatttatagataataatggactacaaatagatggaaacatagaagatgttatgaatcctggtcctatagataaaaaatttgaagcttttggatggaacgttttgactataaatggtcatgattatgatgaaatcataaatgctatcgcaaaagcaaaggaagttaaaggaaaaccaactgcaattatatgcaacacagtaaaaggtaagggtgtttcatttatggaaaatcaagcaggatggcatggaactgctccaaataaagaacaatgtgagcaagcattaaaggaaattggaggggaaaactaatgggaaataaagtagcaactagagaagcttatggtaaagcgttagtaaaactttcaaatttaaataaagatgttgtagtactagatgctgatttatcaaaatcaactaaaacagctgattttaaagctgtttcaccagaaagatttataaatatgggaatagcagaatcaaacatgatgggagttgcagcagggctttcaacttgtgggaaaattccgtttgctagtactttcgcaatgtttgcagcgggaagagcttttgaacagataagaaattctatatgttatccaaagttgaatgttaaaatttgtgcaacccatgcaggattaacagttggagaagatggagcgactcatcaatctatcgaagatatatctctaatgagaagtattcccaatatgactgtaattaatccggcagatgatatagaaactgaagcagcaatattagccatagcagaatacaatggaccttgctatgttagattaggaaggttagctgttagtactgtaaataacatagataattataagtttgaaattggaaaaggtgtgacattagcacaaggtaacgatgttactatagttgcaacaggactaatggttgaattagcgttagaagctaaaaaagagttggctaaagatggaattgatgctagaataataaatatacatacaataaaaccaattgataaagaactattagctactgcagcgagagaaacaggagcaatagttacagcagaagaacatagtataattggtggtttaggttcagcagtcgctgaagttttaacagaagaatgtccagtaccagtattaaaagttgggataaaagatacttttggtgaaagtggtaagccaaacgaactattaaaagcgtatggattaacagtagaagccatagtagagcatagtaagaaagctatttcattaaagaaataatcaactcagaataatagaatataacataccgaaaatgcaagatacaaagcttatgaaatagctgaggatcttgcattttctatttttgaataatcaaaaataaacaaggaaaactatgagagaaattctaatataaataaaaattaaaaggggaagatgacaatgaaaaaatcaaaatttagagaatatttaataataacatttgggataattctggttgcgctttctattgagtacttttacgctccaaacaatattgcagcaggtggagtaacaggaatagcaataattattaatgcggtcataccatctttttcaataggtgtagtgagctttattttaaatggattgttatttatagttgcacttatattcattgatggaaaatttggtgtgaagacgatttatgctagtttaggattatcagttataatatgggcaattgagaggttcttaaagccagtggcaatcacaaatgacttaatgatggcaactatttttggaacattaatttcagcattcggaatggctatcatatttaatgaaaatgcatcaacaggaggaacagatatattagcaaaaatgttaaatatattttttcatttagatataggaaaatctttattggtagtagattttgtaataaccttagcaagtgcgtttgtatttggagtggatgttgcgttgtattctatgctaagtataatactacttggtttaatagttgatagagttatagaaggatttaatgcttgtaaaagtatatttattattagtaaaagtaattatgagataagtagatatataatagatacattagatagaggctgtacatttataaatggagtaggggcatttacagagaaggaaactaatatactttatgccgttttaagtaggaatcaattcataaaattgaagaagtttataaaagatgtagatcctgatgcatttataacagtgggggaagttcatgaagtattaggtgaaggatttaatgatataaaacaacattaattaccaacaaatggctccaaatttaataaaattgtataacattagaaagtattcttatgttataattaattttgtaggttttgcaattaatttgcggaatatacaataaagaaggagtgtttgagtatgatcgagtttagaggagtatctaaaatttacaataataatgtaaaagccttgtcagatattaatgttgagatagaagcaggagaatttgtatttttagtaggcccaagtggatctgggaaatctacttttataaaaatgcttttgaaggaaattgaaccaaccaacggaaaaatattaataggagataaagatttatcatctattactaggcagcaaataccttattacagaagaaagataggaatggtattccaagattttagattgataccaactcttaacgtatatgaaaatgttgcatttgctatgagagtagtagaagcatctcaaaaagatataagaagaagagttccaatggtattatcgttagttggattatctcataaatataaaatgtttcctaatgaattatcgggaggagaacagcagagagtttctttagcacgggcactagttaataatccatctgttttgattgctgatgaacctactggtaacttagatccagatacagctagagaaataatgtcattacttgaggatataaacaagtctggaactacagttcttatggctacacacgcaaaggaaattgttgactatatgaaaaaaagagttatagctattgaaaaaggagaaatcgttagagacgagaaaagaggtaagtacgaagatgaaaattaatactattgcacattttattaaggatgcatttacaagcttaaaaagaaataagactattagtattgcttcagtaattactgttcttataactttctttgttttgggaatattcgtattagttgctaataatataaacaaaggaataaatactgttcagaataaagtagaactaaagatatttcttaaggatgatataaaacttattgaccaaagggagatagaaataaaattacgagaaattgaaggcgttaaagatgtaatttaccaatcaaaagaagaagagtataagaattttcaaagtactacgaatgaaaatgaaggattactaaaaggatatacattgcaaaataatcctttttcagcatcatttacagtaaaattagaatctccagaatatgcgtcagccgtaagtgaaggaataaaagacttcgaaggtgttgagactataggtgatcaacaagaattagtagacaagattgtagggatagtaaatggtgtaaaagtagttggttttgggttatttataatattagtaggtgtttcaatattcttaataatgaatactacaaaactaactgtatattcaagaagaagagaagttggaattatgaaatttgtaggggctactgattggttcattagatggccatttgtaatagagggaatggtaatagggtttattggagcaacattagcatgtggagctttatttgcagcatataatggactagttaggtggattgcttcgcaattggtatttgtaagccttgtaccagcaacgtttatattctcaactctattatggcaatttatgcttggtggtattatagttggtggaattgctagtataatttcattaaggaaatttttagtggtataatttttgcaaataagtgtaaatataataaaaataggaataaagaaaaatagtattttatactatgaaatcttgagaaaaactttacaatataatccactttaatctataaagatatatattgggattatatgtatgatgcatatgaaagggagtctttataggtgaaggaatcaagaaaatacatatttgcaaatagaaggcaaaatagaaaaataattttaataccaacagtaatctttatagtatttcttatatgtgtatcctttttaggaggaaattatattgctactaaagggatatttctagtaagaacatcgccagaagtcaagagtacagcttctcagataaatgataagagtaaatattcagcactttttacagttagagataaattaattgaaaagtttgatggtgaaattgatgacaatgctcttttagaaggagcgatcaagggaatgactaattccttaaatgatcaatatactgtatttatgaatcaaagcgaatttgatgatttaatgaaacaaagtagtggaagtatgacaggaataggtgttactgtaacgttaaaagataaacaggtaacaattttagatactgttaaaggagcacctgctgatagggctggactacaggaaaatgatataatagagaagataaatgatatcgatgtgtctggtgacgatttaaaaaaagcaacgtctatgattgcagaggcaaataattcagagttaaaactgactattaagagagcagatactaatgaatttgatgttaatgtaacacctgaaaaagtaaagattgaatcagtaaaagggaatatgctagattcttcaatagggtatattcgtataaaaactttcatgaatgaaaatacggcagaagatttcaaaaacacaattgatgaattgaaatctcaagggatgaaaggcttgatagtagatctgagagaaaatcctggtgggctattaacagaagcagtaggcgttgcatcacagtttattccgaaaggaaagataataacttacacaattgataaatatgaaaacagaaatgattcattatcaattggtggagatgctgaaggcatgccattggttttactagttaatgaaaatagcgctagtgcatcagaagttgttacaggtgctttaagagattatggcgcagcaacaattgttggaaaaactacttttgggaaaggtatagttcagcaaacagttaaatttgatgataatattggtggacttaaagtaactatttctaaatattatactccaaatggagagaatattcataaaaaagggatagccccagattttgatgttacaacacctgttggtattgatgaaaagagctatgataaaaatgctgatgagcagctaaagacagcggttgaaaaaataggagaaaagattaaatagggagggattaaatgggtttatttatatatacgctacggagcgtatcaggtgctatagtaacccctccattagtattcttattaatactcttaataatggtactacattcaaagaacaaaaaagtagtaactatgcaaaaaataattttaggaggtagtgtaaattcatctattgaacttacactatctcaacttgttttaggaattataggtggaattataggaagcataatacttacaagtttaggtgtagtttttagtgaaaattctggaatatcgtatttgtttgttatatcaatattattaatgcttataagaccaaggttaatatgcttttcttattcgggagcaattctaggtggtatagtaattataattaaattgattaatatattcattccttatagtttaggagtttttgatctaaatatattttatttagcaattcttataggagtattccatgttattgaagggatattagtaattgtcgatggagatagaggagctgtacctgtatttacaaatagagataataaaattttaggtggatatgcattaaaaagatattgggcattgccaatagcaataattattgctatgaatgggaataattcgatgttgagttatatgacagaatctatatctaatccagattggtggccattaattaaactaccatatggactcgcattaatagctggaagtattatttctatagttcctttttatatggtattaggttattcatcaattacatttacaaaaagtaaaagagaaaaagctatatcttcaggagtacacatactagcttatggaattcttctgacaatttcggctcagattgctaggtttggaattattggtgaagtatttgttgtgatttttatgccagcagctcatgagttaatgcttaagcttcaggcagatcgagagaaaaagcaagtggctaaatttgttagcgatgaagaaggtctggtagttttagaaatgtcagcagattctaggatgcgggaatttggagttgatattcaaagtaaaattttatcagtgaatggtaaaaagattaattccgaagcggaagtgtattctattttaaagaaaaacttatataatgcagttttaaagataaaggattctcatggaatggtaaaagatattcaatttaggcataataaaaatactaggcttggaattttagtagtacctagaaatgtaagcaaggaagatattgtgccagtcgatggaggaaattttaaaaatgttttgaattcattaaaggggtctgaaaataaagttgaatataaaatagaaaaagagaatgatggaaaacatgataaggatgttaagaataaagataataaaatgtaattagaaggtggcttggccacttttttctttagctaataataatatttttatttgagcgatatttaagatgaattttatcttttttaataaataattttaattacaactgatttaaataaagtaaacatctaataattataatattttagatatatggagagtattaaaggcatgagtaagcatttaaaataaataggataatttattgacttaatacttaaggaaaagtaaaatagacatataatacgaatgtctgttcggattggaggtaatataatgggagaatttaaaatacaatcgagatttaaacctacaggggatcaaccacaagcaattgataaattagtcaattccataaaaagcaataatagagctcaaactttgcttggagtaacaggctcaggaaaaacatttactatggcaaatgttatagaaaaattacaaagacctactataatattagctcataataaaactttagcagcgcaattatgttcggaatttaaggagttctttcctgataatatagtagaatactttgtatcttattatgactattatcaaccagaagcatatgtgcctcaaacagatacatttatagaaaaagatgcatcaattaatgatgaaatagataaattaaggcattcagctacttcagctctttttgaaaggagagatgtaataattgtcgcatctgtttcctgcatatacgggctaggtaatccagatgaatataaaaagttgactataagtcttagaactggaatggaaaaagagagagatgaggttataaagaaactcatagaaattcaatatgaaagaaatgatatagatttttcaagaggaacttttagagttagaggagattctttggatataattcccgcttcgtattcaaataaagggattagaattgaattttttggagatgaaattgatagaataagagaatttgatgtattaacaggaagtatcctaggagaaagaaatcatgtagccataactccagcatcccactttgcaacatctagagagactgttgataaagcaattggcataattgaaggagaattagaggagaggcttagagaacttaatgctcaggataaacttttagaagctcaaagattaaggcaaagaactaactttgatattgagatgataaaggaaatgggatattgtagtgggattgagaattattctagaatattagatggtagagcttcaggaacaccgcctaaaacattaatagattattttccagaagattttcttatgtttatagatgagagccacgtaacattacctcaggtcagagcaatgtatgcaggagatagatcgagaaaaaatacattggtagactatgggtttagattaccttgtgcatatgataatagaccgctaaaatttgaggaatttgaaaagaaaattaatcaagtagtgtttgtaagtgctactccatcggcttatgaaatagataattctgaagaaatcgctgaacaaatcataagacctacaggattgttagatccagaaatcattataaggcctattaaaggacaaattgatgatttatatggagagattaataaaacgatagagtgtggatttagaatattaataactacattaaccaagcgtatggcagaagatttaactaaatatttaatagagcttggtgttaaaacaacttatatgcattcagatattgatacgatagaaagaatgaaaataataagagatttgaggcttggtgagtacgatgtacttgtaggaataaatcttttaagagaaggattagatataccagaggtagctttagttgcaattttagacgctgataaagaaggatttttaagatcagaaacatcattaatacaaacaataggaagagcggctagaaattcagaaagcaaggttataatgtatgctgacaatataacaaagtctatggataaagcaatgaaggaaacggaaagaagaagagctatacaaaaagattataatgaaagacatggaatggtaccaacaacaataattaaagatgtaagagatattatagaagcaacaaaggtttcagaagaagtcgaagaatataaagctgcggataagaaaaaacttactaagaaagaaaaagataagttaattaaagatcttacagaagaaatgcttttagcggcaaaaaatcttcaattcgaaagagcagctgagcttagagatattattaatgaaattaaagatggaaagtaatgggtaataatcaatatatgatatattgcataaaactatgaattatgtattgtccattaagtaggaggttagtttaatgaacgataagatagtaataaaaggtgcgaaagttaataatttaaagaatgtaagtttagaaataccgagagataaattagttgtacttacaggattatcaggctcaggtaagtcatcattggcctttgatacattatatgctgaagggcaaagaagatatgtggaatctttgtcttcttatgcacggcaatttttaggacaaatggataaaccgaatgtagaatatatagaaggattatcaccggcaatatcaatagatcaaaagactacaagtaaaaatccaagatcaacagttggaacaataactgaaatatatgattatttgagattattatatgcaagagtaggaattcctcactgtccaaagtgcggtaaagaaattactaaacaatctgttgatcagattgttgataaaattatgggttatggagatagatctaaacttcaagtattatcacctgtagttaaagggagaaaaggaactcatgaaaagatattagaacatataaagaagagcggttttgttagagcaaggattgatggggaaatctatgacttaactgaagaggaagtaaagttagataaaaataaaaagcataatattgaagctgttattgatagaattgtcataaaggaagggattgaaggtagacttacagaatctgtagaagcgtctttaaagatgggcgaaggattagttataattagcgttattggaggagaagaaactttatttagcgaaaattttgcttgcccagattgtggaataagtattgatgagctatcgcctagattattttcatttaatgctccatatggaaagtgcgatcattgtgatgggcttggaagtcttatggagatagacgaaaagcttgttatacctaatagagagctaagtgttatggaaggagctatagcaagctggggaagtggaagactaaaagaagattcttggacatatgcaatacttcaagctctaactaaagagtatggattagatttaagcaagcctataaaagatttggataaagaacatgttgatttattgttgtatggaacaggtggaaaaaaacttaaaattgaatatgtgaaagatggagttaaagctatttatagttatgcatttgaaggggaaattaatgcattaagcagaaggtatagagagagtaattcagatcttataaagggtgaaatagagcaatacatgagcaatgattcatgcccaaaatgtaaaggcgctagattaaaaaaagaagtgctagcagttactgttggtggaaaaaatatatatgaatttacaagtatgtcaataaaagaagaacttgagtttataaatggagtggaattttcagaaaaaaataaacttataagtgagcagattataaaagagattaaaaatagattgcagtttttattagatgttggtttagattacttaagtttatcaagaaattctggaaccttatcaggtggggaatcacaaagaataaggcttgcaacacaaatcggttcagcacttatgggagttctatatatattagatgaaccaagtattggattgcatcaaagggataatgataggctaatacatactttgaaaaatctaagagatgttggaaatacagtagtagttgtagaacacgatgaagatactatgaaggaagcagattatattgttgatattggaccgggtgcaggagagcacgggggagaagtagttgttgctggaacacttgatgaagttaaagcatgtaaaaaatcaataacaggtcaatatttaactggaagaaaatcaattcaaattccggtagcgagaaggaaaggtaatggacaaaaaataaaaattgtaggcgctaaggaaaataatttaaaaaatataaatgtttcaattcctcttggtactttaactatggtcacaggagtttctgggtccggaaaaagtactctggtaaatgaaatactttataaagggttaaatagattagtaaataagagcaaaaatccagtaggaaaccataaagaaatagttggttatgagaatattgataaaataatagatataaatcaaagtccgattggaagaacacctcgttctaatccggcaacttatacaggcacatttgatataattagagagttattttcacaaactacggaagctaaaatgaggggttataagcaaggcagatttagttttaatgttaaaggtggaagatgtgaagcttgttctggagatgggataataaaaatagaaatgcaatttctatcggatgtttatgttccatgtgaggtgtgtaaaggaaagaggtataatagagaaactttagaagtaaagtataaagggaaaaatatagatgatgtattaaaaatgacagttgaagaagcgttgaagttctttgaaaatatacctagaattgagaataagttgaggacattaaatgatgtaggacttggatatattagattaggccagccttcaactcaattatcaggaggagaagctcaaagaattaagttagcatatgaattatcaaagagaagcacaggaaaaactctatatatattggatgagccaacaacaggattacacgtagatgatgttagtagattaatagaaatacttcaaagtttagttgaaacaggaaatactgtagtagtaattgagcataatttagatatgataaaatgtgcagattatttgattgatttaggtccagaaggcggagataagggtggaaccattataaaatgtggaacgccagaagaattgtgtaaggttcaagaatcttatacaggtaaatatttgaaagatgtgcttaaataaaacttatgaatattaatgaataggtactcatatttagaactatataatattaaaacctataattggtagttataatgctcaattggcaatatatatatatatatatatatataatataaaattaaaaataataaagtttttatgaagaaattatattgaaaattgacaattggggcattataggacagaatatgataagtagatattaaaataatatagatgatataataatatatattaattaagtggcacttttgcatgccatacttacttttttattgtataatcattaatgaggtaaatgtaagttataacttataaatttctgaaagttattttacatatataatggatacaggaatgaatattgaggtgaaaatatgagtttttcgagaataattgctggtttttttggaattgtttttattattatactgtatgtaataatatactatgcgctaaagataatgtatagggatgttaaaaacggagggaagaaaagaaggcctactgcagcaaaaggaagttatggcttagaaatcatagattctggaagtagcaaagatttaaaagatggatctattattcctatcagatcggatttaacaataggaagaaaagatgataattctattgtattatgtgatcaacatgtttctggaagtcatgcgagaattatcataaggaatagtagcttatttatagaagatttaaatagcacaaatggtacctacttaaacaagaataagataagtggcaaagcaaaactgtctaataaagatgagataagaattggtacggcaatttttaagattttaatttaaaatattcgaataaagaggatattaaaagaattttttattgaaaaaattaggctcagcggggaagtattgtaaagctatattttccgctgggctttacaaaagtattttagaaatctaaatatcaaaggaatagcacggtggggtgatatggagtgaagataaaaagagatgaaataaagctattactgttaacttatttgttatgtatagcgctttttacaaatttagcaatattgaaagatgacatggataaaggcgctatatacatggggttgatagtatgtggcttaataactgctacccaaatattaatacggaagttttatccccatggggataaatttttgattacatttgcatgtatattgtcagtaataggtatagctgtactatatagattggatactgatattgctattaaacagttaatgtattttgcagctggaatagttgtatttattgctctagtagtgataattccagatataagagattttgttaagtacaagaaggtatatctgatagcaactctgcttataatgcctctagcattgttcgcgcatcaagaagtttatggtgcaactaactggattagaattggtggatttagtattcaaccatcagaatttggtaagataacatttgccatatacttagcggcagctttacatgattatgaagacaaaaataatataatagaagatttcaaacaactttggcaacctgcactggttgttgtatattcattaggatgtttggttgggcaaaaggatttaggatctgcgttaatattttttggtatttcattaacaatgttgtatgttgcaactggaaagaaaaagtatgtggtaataacatttatattatttgtgttgggatctatttttgcatataaactgtttccgcacgtacagcaaagagtattaatatggagggatccatggaagtataaagatactacgggatatcagatagttcaaggattatattcgatttcttctggtggaatgtttggaagtggacttggccaaggatacccaggatttatgccagtaaatacatcagacttaatttttgcagtaatttgtgaggaattgggaatggtatttggactcggaattatgataatatatttcttgtttttctatagaggaatgagggcttcatttagaatcaaagatagattttcacaacttaatgccataggcctcagtgctatgatagcatgtcaggttctagttataataggaggagtgtttgcagtaatacctctgacagggattacattgcctcttattagtgctggaggttcctcaataataactatgttttttgcactagcaatacttcaaaagatatcggaggagggctaaaaattgaaaaatgtttctaatagtataaaacaggtaatggtagtttttttattttgctttgtagctcttatctcatatattgcatattttcaagttttttcggctcctactatagctgaaagtgaaggtaatcaaaggctttgggcaagaagaaatgaagttttgaggggaaccatatatgatagaaataaaaatccgcttacaacaagtgcaagggtagatgcgctaacacaaaaaagaacttatgttaacggagatttatatgttcacgcactaggatatgtagatccaagatatggattgacaggattagaggcaaattatgatagtgagttaaccacatacaacaagcttactaacaatattttaaatctaactaaagattttagcatagataagttaaaatcaatgtttaagaatagaaaagaagatgaggtcaaagttgggaatggtgttataactacattagatccaacacttcaaaaaatagcatatgatgcacttggaagtaataagggtgcagtggtagccttaaatccaaaaacaggagaagtattagctatggtttctaagccaacgtacaatccaaatgatttggaaggctcaatgaaagcttctaatgaagatagtccgtttataaatagagcagtatcaggaaaatacccgccaggatcaacatttaaaacagtaactcttagcagcgcattagaaaatatgcctggggttacaaatagaacttttaatgatacaggtaaaatagtatttaacgataaacagtcattgagcaatgataatggagaagttaatggtgaaatagatttaaaggatgcctatagattatcaagtaattttgtatttggtacattggcaatggagctaggaaatgataagttaaaagctactgcggagaagtttggttttaataatacagtagaatctgatggatttaaaatagatcagagtcaatttccaaagttatctaaagcggaaattggtagcatagctcaatctggaattggccaaagtagtattttagctacgcctatggagatggctttggttgcaagtacagtggctgatgatggtaagatgatggagccaagactcgttagccaagtggtggataaggacggtaatgtagttaagacagtggaaccaaaggtgaataaacaagttataagttcagctaatgctgcaattataaaagactatatgaaaaatttagttgattcaagaatcgactctacttggagttattttcaaggaactgatgcagcaggtaagactggtacagctgattataatcttgctaatggagaaagcgctaaacctcattcatggtttattgggcttgcaccagcgagcaatcctaagattgcagttgctgtaatagttgaaaatggaggatacggagcgagtgcggcagcaccgatagcaggaaaattaattaggcaagcggttattggaaattaaaattaaatatggtagataaaaagtgaatagttattggagaaccgttgaaatttcttaaaagtactgaattggaaataataaaaggattttccttataaactcttcacttttttgtatttgaatttaaaggaaggagtgttggaatgtttgattttaaagcccaattaaaaattctaccaaatgaaccaggggtttatttaatgaaaaactcacttggagagattatctatgtgggaaaagcaaaaatattgaaaaatagagtgcgccaatactttcaaaattctaaaaatcattcggaaaaagtaaaggcaatggttaaaaatattgctgagtttgaatacatagtgacagattctgaaatggaagctctaatattagaatgcaatctaataaaaaagtatagccctaaatataatatttcactaaaggatgataaattttatccattcataaaagtgactactaatgaggattttcctagagtttttataacaagaaattatgccaaggatggaaataagtattttgggccttatccaaatgcaggagatgtacatgaaacaataaatttgattagaaaaatttttccattaagaacttgtaaaaaatctattatagaaggcgaaaagccgacaagagcatgtttaaattatcatataaaaaaatgtaatgcaccctgtgaagggcgtatttctaaaactgaatacaaaaaaatgatagatgaaataatggaagttttaagtgggaaggataggagccttctaaataagttaaaagaagaaatgcaaagtgcatcaggaaatttagaatttgagaaagctgcatcattaagagataaaatgattgctatagaaaatatagcagaaaaacaaaaggtgtttaaatctcaagagaatgatgaagattttattaatatctataaagatgagaaagattgctgtattcaagtattctttttaagggatggaaaaataactggaagagaacattttatgattgaaaatagttcccatgaggaagatacaacaataatttcacaatttataatttcattttatggaggaacaccaaaagttccaaagaatatatacattccggaaagtgatgaaattgaagctttggaagaatttttaagtataaagcgtggctcaagggtcttcgttaaggtgccaataaaaggcgagaaaaaagaaatgttggagctagttaaaaataatgcgaaagtcactttagatcaatttaaggataagattttgagagataaagagattaatatgatttcgctaaaggaaattcaagaattattagaacttgatagtataccacttagaattgaagcttacgatatatccaacatacaaggggtagattccgttgggtcaatgattgtatttgagaatggtaaagctaagaatagcgattatagaagatttcgtataaaaactgtaaaaagtgctaatgattatgatagtatgagagaaattttagaccgaagattcactcatggattaaaagagatcgaagagattcaaaataaagaaattaaattttctagtggaaagttttcgaattttccagatttaattatgatggatggtggaaaaggtcaggttaatatagctcttgaagtattagagaaattaggaatagatatacctgtatgtggattggttaaagatgattatcatgcaactagagggattatttataataataatgaattaataataaatagaaattctaatttgatgcaaatgataagaagaattcaggatgaagttcatagattcgcaataacttaccacagaagtttaagagataagagaacgcttcattcaatattagatgatatacctaatattgggcagaagagaagaatgtctcttttaatgaaatttggaagtatcgataatattaaaaaagctacattagacgaacttcttgagacagaatcaattgatacgaaagcagctaatagtgtattagagtattttagaaatacaaaataaaagaaatcaggttggggtatctcaacctaatttttagccttagattattgtaccaatgatgtataattaaaatacattatgttattttttgaatatatattaaaaacatgaacaaaataaataaattatgctataatagtacggaataaaaatttacttgtcttagattaatatttaaattattctatatcatgtaaacaaaaagcagattaatataaatgtttgaggagttttggcatgaagcactatggagaatataagaatttgttcagcaaattatacgaagagtcacaaattcaattagatgcgaaaatgagtgaacatatatactttaaagttggaggaccagtagacatacttttaactccaaacagtatacaacaggtaaaagaaactattactatttgtaaagaaaataatataccattttatgtaataggaaatgggtctaatatcttagttaaagatggtggtattagaggtgttgttataaagttatgcgagctcaataaaatagaatgtataggtaacaagattattgcagaatgtggagcattacttaaagacgtttcgaaggcagctacagaaggatcactagcaggatttcaatttgcttgtggtattccgggtagcgtaggtggagctgtattcatgaatgcaggagcttatgacggagaaatttcatttgttattgaaagtgcagaagtacttgatgacaatcaagaaattagaataattcctaaatcagagttgaatttaggatataggcagtctgtagttatgcaaaagggatatatagtattacgcgcaacttttaatttagttaatggcgataaagaaaagattcaagctagagttgatgaattaactaaaagaagagaagaaagacagccgttagagtatccttcagcaggtagtacatttaaaagaccagaaggctatttcgcaggaaaattaattgaggatgcaggattaaagggatttgctatcggcggagcgtgtgtttcggagaagcatgctggatttgttattaattgtaagaacggaacagctaaggatgtattagatgtaatatatcatgttagggatgaagtgaaaaaacaatttggagtagatttatatcctgaagttagaatttggggtgaagattaagcattttagtgactatattagttttgaaaatataaataaaaatagaagttgaagatgttaaatatatctgtaaataaacactaaattatataaaactcaagagtttagagacttttgggttttttatgatttaattataatagtgtgatataattttgatgttaaggtaaattagaagtaatagttgtgcctagaagacgtctttggcaaaagggagtgtgtagtatgagatttgttattgttacaggattatcaggagcaggaaagacacaagcaacaagaacattggaggatttaggatatttttgtgttgataaccttccaccaaagttaatctctaagtttgcagaagtatgcacgcaaagtggcggaaatattgaaaaagtagcattagttatagatattagaggcggaattttctttgaagatttttttgaagccctaaattacttaaagaaaaatgaatttaaatacgagatattatttctagaagcaactgatgaagtgcttattaagagatttaaggagacaaggagaagccatccattatctccagatggaagagttttgactgggattactcaggagagagagaaattaagagaagttaaaaatatagctgatattatcattgatacatctaaatacgaaataaggcatttaagagaaaaaataaacaagaattatggagatcatacttatcctgaaaagcaattatcaattactgtattaagctttgggtttaaatatggaataccagtggattcagatttggtttttgatgttagatttataccaaatccattttatatacctgaattaaagcagtattctggtaatgatgaaccagttaaagattatgtcttaaaacaagaggagactgtgaattttatagaaaagttagtagatatgttaaaatatttaatacctaattatataaaagaaggaaagagtcaattaattatatctataggatgtacaggtggaagacatcgctcagtcgcaatagcaaatgaagtttatgaaagattaaataaagaaaactataattctaaaatagagcatagagatgtagctgaagatcttcataaaggagaaaagaagctatgaggataaaagattggcttaaggctggaattaaagtgaaacgatggctagcgtttggtattttcggaatattattaatatcatttggatttacagaactagttaaccatagggtttacaatttatattaccaggttttttatgtgtttttaaatattacaggaatatttgttttatatatatcaattactgaaacgatgaaatcaataattgctttagtaaatagaggctatatcaaagtttctctagatagcagaaaaattgaaagtctaatatatgaaaaaagattattagtaaagggtcctaagatagttgtaattggtggaggaactggtttatctacaatgcttcgagggttgaagtactatacatcaaatataactgcaatagttacggttggagatgatgggggcggatctggagatttaagagaagatttaggaatgttgcctcctggagacataagaaactgtattttggcattagctgatacggagccaataatggaggatttacttcagtatagatttgctgatggaagattaaagaatcaaagctttggaaatttattcttggcagctatggctggaatatctgacaattttgaggaagcagttcagaaaatgagttctgtattagctgtaacaggtaaagttatacctgttactttggataatatgcaattagttgcaaaactacaaaatggtaatatagtaaaaggtgaatcgcaaattccagaagaagctattgaacaaaaatctagaatagaagaattaaaaatagttcctgagaatgcaaaagctcttccagaggcattagaggctataaaggaagcagatgctatagtaatgggaccaggtagcttatatacaagtataacttctaatttgcttgttaaagatattgcaaaagaagttaggaagagtagtgctatcaaaatatacatttcaaatataatgactcaacctggagagactacaggttttaaagtgtcagaccacttaaaggttttattcaaatatggtgggaaagatattgttgattatgtaattgctaatacaggagaaataacagaggaattaaaagaaaaataccaaaaagatgatgcggagcttgttaaattagatagagaagacattaatagtctaggtgtaaaaatagttggggacgatttagtgaaagtaaaaaatggattgataaagcacgattcagataagttggcagaaatattagtagatacaataatggaaaagaaacttttatatgataagaaaaagataattgaatatatgtatttatcgcaacgtattaaggaaagagtcagagaagaaaaaggaaaagtaattgattaattataaactataagaaaatttatagataaggaaggaaacagaatgtcattttcatctaaagttaaaggagagatatgcagatatatagatatttcgaaagaagaggcgttagcagaaatatcggctattatgaaggttagtggtacattagcttttagtggaagtggacttagttttaaaatgaccacagaaaacccagctagtgctagattgatttttacacttttaaaggatcactttaatatacattcaaagttaatggtgaaaaagagtaactccttaaagaagaataatatctatatggtagtaatttctgaagaaatgggtgttaggggactattaagcgatacaggaatactcaaagaaattgatggaataatgagcttagattatagaatagaggagtatatttttaaagacgaagatataaaaagagcatatataagaggcgcatttatcggcggaggaagcataagtaatccagaaaaaacttatcatctagaatttgtaactcatagtgaagaatatgcaaaagatttatcgaatttaatcaatactttcagtttaaattccaaggttatacagagaaaaaatagtttcatagtatatatcaaagaaggagaacaaatagtagatttgcttaatgtaataggagctcattcatcgcttttagagattgaaaatataagaataatgaaggaaatgagaaataatgtaaatagacttgtgaattgtgagacagcgaatctttctaaaactgtaaatgcagctgtaaggcaggttgaaagcataaaacttatccaatcacagattgggctgcaaagattgccagataatttaagagaaattgcagagcttagattgaattatccagatgaatctctgaaggaattaggagaaatgctagatcctccagtaggaaaatcgggaataaatcatagattaagaaagatagaaaagatagcagaggaattacgaacaagcaaataataaaattaaagggagaggatattatgtttacacacattgtattatttaaattgaaagagccaacaacagaaaatttgaaatttgtagaaaagactttattatctatgaatggaatgatcaaggaattaaagcagctagaagtaggggtagatgtaataaaaagtgatagaagttatgatgttggaattataacaagatttgataacaaggaagattatttatcttatgacgtgaacgaatttcatgttgaaaaagttaaaaaggttatagggccatatatggaaggcagtaaaactttagatttctaaataacatatggtttaagatttatagtttagttagaaaaattctaaagaaactgtaaattttaaactataaattaactgttaatttaaagaggaggtgaggataatggaagaaaaacaattttgtcatttacatttgcatacagaatatagtttacttgatggatcaggaaaaataggaaagctcatgaagaaggcaaaagaattaggcatgaagagtattgctattactgatcatggagttttatatgggcttgtagatttctataaggcagcaaaagaaaatgatataaaacctattttaggatgtgaagtttatgtcgtaccaaagtctagacatataaagcagccagacaaagagaattcaacttatcatttggttttattagtaaagaatcaaattggatatgaaaatctaatgaaaatagtatcagttgcatctattgaaggattttattataagcccagaatagattatgaatatttaagaaaacatagtgaaggattaattgctttgagtgcatgtttaggtggtgaagtacaatcttaccatcttaaaggcaattatgaaaaagcaaaagagacagccttaacatacaaagaaatttttaatggtgacttttatattgagttacaaaatcatggaatggaagaacaaaagagagtaaatgaagaaaatataaagttatctaatgaaactggtataccactagttgctactaatgatgttcactacataagcaaggaagattctagatcacatgacgtactaatgtgtatacaaacagctaaaaccattgatgatcctcatagaagaagatatccttcagatcagttttatttaaaatcagcagatgaaatgtgggatatgttttcctatattcctgaggctttggagaataccattaagatagccaatgagtgtagctatgaatataagtttcacgaatctaagcttccaaaatttccgctagaagaaggtcaagatccttatgaatatcttagagatacttgctataaaggtctgatagatagatatagtgtatttgaaaatcttagaaatcagagtttggactatagtaaaattgaagaagtagtagcaaattatgaagaagctaaagaatatgttgatagattagaatatgagcttcaagtaataaagcaaatgggatatattgactactttttaattgtatgggattttgttagattttcctatgaaagtggaatacctacagggccaggtagaggatccgcagcaggttcaatagttgcatatacgttaggaattacaaaaatagatccgattaagtatagtttaatctttgaacgtttcttaaatccagagagagtatccatgccagatatagatagtgatttttgttatgaaagaagacaagaagtcattgattatgtagttgagaagtacggagcaagtaatgtttcgcagataataacgtttggtacaatggcagctagactatgtatacgagatgttggaagagctatgaattatagttatgcagaggttgatagaatagctaagatgataccaacaatgcttggaataactatagagaaggcgttagacttaaatccagagcttaaattagcctatgatacagatgaaagagtaaaggcgttaatagatgtttcaaaggatttagagggacttccaaggcattcttctactcatgctgctggtgttgttatagcatcaaagccattagttgaatatgttccattacagaagaatgaagaaatgatagtaacccaatttggaatgacaacattagaagagcttgggctacttaagatggatttcttaggacttagaacgttaacggttatgaatgatgctattaatatgattagagaaaatagaaagatagatattgatttagataaaatagattttgaagacaaagaagtatataaaatgataggggaaggtaagactgctggagtgttccagcttgaatcgccaggaatgacttcattcatgaaggaattaaaacctgattcattggaagatattattgcgggaatatcgctctataggccagggcctatggctgaaattcctagatacatagaaggaaagaaaaattcagaaaaagttacgtatttaactaaagaattagagcctatattaggtgttacgtatggatgtttagtatatcaggaacaagtaatgcaggctgttagagatttagctggatactccatgggacgtagtgatatggttagaagagctatgtcaaagaaaaaacataaagtcatggaggaagaaagaaaaaatttcattcatggtattgttgaaaatgatgaagtaatagtaccaggatgcgtgagaaatggaatttcagaggaaatagctaataaaattttcgattctatgatggactttgcttcgtatgcatttaataaatcccatgcagcggcatatgcagttgttggatatcaaacagcatatcttatgaagtactatccagtagagatgattgcagcaatgcttaattcaatcatgggaatcagtgaaaaggtagcatactatatcggcatagcagaagaacttggaatacaagttttaccacctaatataaacgaaagtttttcaaaattcactgttaaagagaacaagattagatttggattagcggctataaagaatgttggaactaatgttgtagcaagcatagtgaaagcaagagaagaaaagggtaaatttgaatcgttagttgattttataaataaaatggatccatcatcaataaataagcgtgcagttgaatgtttaataaaggctggggctctagatgattttgatgtttttagatctaagatgttagctgttcatgaaaaattaattgataatatatctagtgataagagaagaaatattgatgggcaaataagcttatttgcaagtgaagaattaaagaatccagaagtaaactatcctaatattaaggaatttactaagcgtaatttattagctatggaaaaggagatgacgggactttatattactgggcatcccctagatgactatgctcaaagtctgaaaatgcagacaacaaatgagatttctaaaatatttttagtacaggaaaccttagatgattctctagagagcgatatgggtgaaattaatatgtttaacaggcaggatgccttacaagataatgatagagtaatccttggaggaatacttgctagtgttaatcagaaggtaacaagaaataattctataatggcattcctaaaacttgaagacttaactggaacgattgaagtaatagtgttccctaaaactttggagaaagtaaaagaattatgcgtaacagatagtttggtaatagttaaaggaagattaagtttgaaagaagatgaaccaccaaaacttatttgtgaaagtatagaacctttagagaaggtcaatacttcaaaagtatatttaagagtcgatgataaggtggcagctactgtcttaagtaaaaaattaaaagaattattgataaaggaatatattggagatacgcctatttatatatttgagagcaaaggaaaacaaaagtttagggtgccaagagatagatggatttccctagatagtgatgttatgaatttattgagacaaactttaggagatgagaatgttaaagtattagattcataattagaaacgagatgtgattaaaaatttagtaaatatacaaatgaaaaatattacaaaaattaatatcacaaaaattatattattttatataaatttatcgattattggttataatagagaagacaaattacgttcattgttttataacactaaaactattataaaaatgcagttactatccttgttataaatgaagatagcttatatgaaaaaatatgatatttagcggtgtatagtcataaattcagtaaaataattttcaaattatttgtattgtgaaatttttcataaaatttagacatttattttagaataatatcagaaaatggttaaatatcattgataattggttcaaatttatgtacaataattcttgattaataaattatggttatattatgtacacaagggtcatttaaggtccctttgcggtattttaaggaggaaatatatattatgaaaaagatagctgtgttaacaagtggtggagatgcaccaggcatgaatgctgcaattagagcagtagtaagaactgcgcttcataacggaattgaagttatgggagtacaaagaggttatagtggacttattaatggagaattattcagcatggatagaaattcagtatctgatataatccaaagaggtggaacaattttaagaactgctagatgtcctgaattcaagaatgaagaagtaagaaaaaaggctgcaaaaatattacaagcttatggtgttgaagctctagtagttataggtggagacggttcatttatgggtgcaaaattattatcaaagcttggaattaaaacaataggtttaccaggaacaattgataatgatttagcttacacagacttcactttagggtttgatacagccttaaataccgttgtagatgctataaataaaattagagatacttcaacttcacatgaaagagtttcaattgtagaagttatgggtagagactgcggagatttatctttatatgcaggtatctgcggaggcgcagaagcaattataattcctgaaatggaatttgataaagatgcactttgtagaactatcttagaaggtaaaaataaaggaaaaatgcataatctaataatgcttgcagaaggaattggaggagcatttgaacttgcaaagtacgttgaagaagtaactggaattgaaacaagagcaacaatcttaggtcatattcaaagaggaggaagtcctactgctacagatagagttttagcttcaagaatgggagcaaaggctatagaagtattattaaaaggtggaacttcaagagtaataggaattagagataataaaataatagaccaagatatagatgaagctcttgatatggaaagcaaatttgataaagaactttatgatattgctcaagtattatcataataatttagcttatagtttatttatataaattttataaataaggtacaatcaaaaaataatgaatcaacatgcttgcttattttgcatatttgtaacattattttattttatgtgcctaatcgaagaaagaggagtgttagtttaatgagaaaaactaaaatgatttgtactattggccctgcaagtgaagatatggaaatattagagaaggttgttctttcaggaatgaatgcttcaagacataacttttcacatggagaccatgaagaacacggtggaagaattaagaaagttaaagaactatcaaagaagttaaatagagaaattgcaataattcttgatacaaaaggaccagaaataagaactggtaaatttgaaccaaagaaagttgaattagctaagggttctgaatttacagtatatgctggagatatggatgtagttggtgatactactaaatgttcagttacatatgcaggactagcaaatgatgttaaaccaggaaatacaattttaatagatgatggtttagtaggattaactgttaaatctgttgaaggtaacgctattaagtgtgaagttcaaaacactggattcgttggaactcataaaggagttaacgtaccaggagtatcaatccaattaccagctcttactgaaaaagataaatcagatttaatcttcggttgtgaagttggagttactatgatagctgcttcattcataagaaaagcatctgatgtaaagactatcagagaaatacttgatgcaaatggtggagaaagaatccttatctgttcaaagatagaaaaccaagaaggtgttgataacttagatgaaatcttagaagcttcagaccttataatggtagctagaggagatcttggtgttgaaattccaatagaacaagttccagcagttcaaaagatgatcatcaaaaaatgtaaagcagctggtaaaccagttgtaactgcaactcaaatgttagattctatgatgagaaatccaagaccaacaagagcagaagtttcagacgttgctaatgctatcttagatggtactgatgcaatcatgttatcaggagaaagtgctaatggagattatccagtagaagctgtagctacaatggctaagattgctgaagaaactgaaaaatctttagaatataaagtagcagtttctcaagctaaaacacatattccagctatagcaggagttatttcaagagcagctagtaatgcagctaatgaattagaagcagcagcagtaattacttcaactcaaactggtgcaactgctaagagaatttctcaatgtagaccagaatgcccaattatagctgttactccagatccaatagttgctagacaattagcattctcatggggagtatatccagtagttgctgataaaatggaatctactgatgaaatgttagaaagatcagttgaaatagctaaaaataatgaatttgttaaatcaggagatatagttgtattagcagctggagttcctgtagaccaagttggtgcaacaaatcttttaaagattagcgaagtaaaataatatttgaaacataattttttaatatatataaagggactttggtaggaatcttaccaaagtccttttttattctttaggaatttatattcaagtaaaatctgtggataatataaaaaaggttgattaaatagttttggtattttaaaaagaataaaaaaagaaatcttattcgcctgcataaaatgttcttatatgcagcagagctgctatttctgatgtgcagatttttctcacatgcgttcgaaaaggcagatgcgtgaaaaaaatctacacatatgaaaagagtgcgaagcacaatgcggaacttaaccacagtcgcctgcgattttttaaaatggaaggttttaaataatcgttaaacataaaatactatatacgtgcactcaagataataagtatgtaatcaaattttaaagaatatataaagttaacaaaaaattaacatttaaaaatatgatatttaatatataatgtatattattgctctaaaagagaaataataatttaatgattatggaattaaatggcaactgattctgtattagcaccgcaaggtgctctttttttattttaggaaaattatatgatttaatggcactaagaggttgattaaatcgagatatcataattatcattaattatttattacctgacaaaacaaattctagcatgagcaaattatttgatttttatggggaattattcaaatgttaaatctaaatataatattcattataaatgagaatttaatagtttagggtttgttcttaattgtatataagaatttataaatatcttaaataaatgaataagatatgataaaatgtagaaagtatttttaaatattgatttgaaaattatagttaagaaatgatactaacaatgaaggatgtgtacatgtgttagagagaaataaagagtatattgtaaaaatagattcattaggatatgaaggtgagggtgttgcaaagatagatggatatccaatatttataccaggagctttaataggggaaactgtaaagacagaaataatcaagaataaaaagaattattcttatggaaagcttatagatatagtagagaaatgtgacgaaagaattgtgcctcaatgtaggtattatgaaaaatgcggcggttgtactctaatgcattctaattacgattcacaattaaaatttaaatacaatagagttaaggattgcatagaaagaattggtggattatcgggggatatagttaaaagtactatagggatgaaatttccttacagatatagaaataaaggaatatattcaattgcattgacagacaatgaactttcaatgggcttttttagtgaaaaaacacatgaagtagttgatatggataagtgtctaattcaagatgaagaaactgataaaatcataaaaataataagaaattggatgaaaaagtattctatattgcctgctaggaaagataatttgttttttagtgaaggactaattagaaatgtaatggtgagaaagggttttaaaactaatgagattatggtaattttgattactaccgataaggaaattcctaagaaagaagaactgataaaggatattaggttagaggttaaaaatttaaagggaataattcagaatataaatactaaaaataatagtttagttctcggtgacaagtgtataactttgtgggggcaggattatatatctgattatataggtaaatataaatttaatatttcgccattatctttctttcaaataaatcctattcaaacagaagtactttataataaagctttggaatatgcagatttaagcggaaacgagattgtttttgatgcatattgcggtgctggtacaataacattattcttatctcagaatgcaagaaaagtctatggagttgaaatagtaaaacaggcgatagataatgcagtagataatgcagaaataaatggaatagacaactcgaaattttatgtgggaaaatctgaagaagtgattccagagttaataaaaaatggaatcaaacctgacataatagttgtggatcccccaagaaagggatgtgatatcaatttgctaaatgcgataggagaagctaagcctaaaagagtagtgtatgtatcatgtgatcctagcactttagcaagagatttaaaacatttagaagggttgggatttaaaacaatagaagtacagcctgtagacatgtttccaaatacaaagcatgtggaagcagtagctaaattaattagaaaatagcttggattatgtgcaggcaattctatcaatttgccaccgctaatgattaatctaataagcattgctagataagaaaaaaataaaatagaagataatagaaaaaaagagactttattttaataaaataaagtttttctttttatggtttttaaataatggattaggataaagaacaaggaaaaattatgtttgaattggtgacggaaaaaggctggggtgaggagggaggaaagattttttttgaaactaacaagtctattaataattataatatagataatgaatattttgttttaaatctaaagtggtaaattaatgtatcataacattcaaagaatatagtcaaaacaatatttgagaataactaagcaattaatggcgagtaaatagacgaatttaagtatagaattatttatgaaagacaatgatacgtatcattcataagagtaataaattatgataatttactatgaaaggaagtgaaaaactgacttcaaactttaaggtttaataagctatgaaagtcgggaattgttatggagaatacatgcaatgaaaagaaactaaaggttgctattataggatgtggaggtattgcaaacggaaagcatttaccagcaataaaaaagaatcaaaatatagaaatagaagcattttgtgatttgatagaggaaaaggctatagaagcaaaagctaaatatggcaaagaagaaagtaggatttatactgactacaaacttcttttagcaaaagaaaaagatattaaggccgtttacgtcttaactccaaataaatcacacagttatatatctattgaagcaatgaaagctgataagcatgttatgtgtgaaaaaccaatggctaaaacatacgctgaagctaaagctatgctcgaagtagcgcaagaaactggcaaaatcctaactataggttatcaaaatagatacagagcagattcaaaatatttaaaagctgcatgcgaaaatggtgatttaggtgagatctattatgcaaaaggacatgcaataagacgtagagctgttccaacttggggagtatttttaaatgaagatgaacaaggtggaggtccattaatcgatataggtactcacgctcttgatttaacactttggatgatggataattatgaaccagagtgtgtactaggatctgtatactacaagttaggggatcaaacatgtacaggaaatgcttggggcgattgggataaagagatgtttacagtagaggattcagctttcggatttattaagatgaaaaatggcgctacaataaatctagaatcaagctgggcactaaatagtcttgatgttgatgaagctaaaacttctttatgtggtacaaaagctggtgctgatatgaaagatggtttgaggataaattctgttaagtataataaacaatgtatagaaaagccggcactagatgctactggggttgctttttatgatggagaagaagataatgctcctgatatagaacaaagtacgttctataatgcaatcattaatggtgatgaattagtggttaggcctgaacaagctttaatagttactcaaatattagaagcaatatatgagtctgctaaaactggtaaggctgtatattttaaataattaataatattatattttatggagatgaatttatatgaaattaggtgtgtttaatccagttttacaagatagatcttttgaagatgcttgttcttttttggcaagtaaaggtgtacaaacaattgaaatcggttgcggaggttatccagggaaacaccattgtgacccagcaattttattaaaagatgaagaaaagtttaccgaatttaaatctattttagaaagaagctgtttagaaatcagtggatttagttgtcatggcaatccaattcatccaaataaggaaatagcaaaaaaattcgatgatgatttgactaatgcaattttaatgtgcgaaaaaatgggagtaagaatattaaactgtttctctggctgtcctggtgacagtgaaacttcccaaaaacccaattgggttacttgcccatggccagaggattttattgaaatattagattatcaatggaataaagttttaattccttactggaaggaaaaagtgaaatttgcaaaggctcatggtgtagataaaatagccattgaaatgcatcctggtttttgtgtatataatcctaaaagtttattaagattgcgtgaagctgtagggccagaaattggtgctaattttgatccaagtcacttaatttggcaaggagttagtccagtggcagcaattagggagctcggaaagcataatgctattttccactttcatgcaaaggatacaaagatagatgaaataaattgtccaataaacggcgtgctagatgtaggccattacggtaaggaaattgaacgttcttggatttttcgttctgtcggctatggacatgatattggctattggaaggacattgtttctgcattgagaatggttggatatgatcatgcgttgagtatagaacatgaggatagtttgatgacaacagaagaagggttgataaaagcaataaattgtttaaaagatgcaattatttttgaaactaaaggtgatatgttttgggcataattataaaaatttgatagggagaaataaaacaatgtgtaatgagatgttcaatttagcaatagttggattgggaggcatgggaaattggcatcgtgagctaattgaaggaattgataatttgactgtttgcggtacttatgatattaaagaagatagacaagcatttgctagagagcatggaataaatccgtataattcttttaaagagcttttagaagatgagaaagtagatattgttttatgtgcaacaccaaatgatgtacacaaagagatagtaatcagttcattaaaagctggcaaaaatgtaatttgtgaaaagccagcagcaatgtcatctttagaatttaagaagatggtagatatagcagaagaaatggataaagttttggttgttcatcaaaatagacgttgggatgaggattttttaactgtaaaaaagatatatgatgaagctatcttaggaaatgtctttagaatagagtctagagtacatggatctcgtggcataccaggtgattggagacaagaagaagaacatggtggtggaatgcttttagattggggtgttcacattattgaccaggcatgcatgatgattaatgaaaggataaaatcaatatatgctagatttactcatgttaccaatgaacttgtggatgatggatttactgctgagttagaatttgaaagcggattaatttacgttgtagaagttggaacaagtaattttataaatttaccgcgctggtatgtgttaggtcaaaatggcacagctgtaatagatgattggaatttaagaggcaaagtcgttcgtattactgatagcagtaaaaatgatgcaattcctattagaacagctgccggattaacaaaaactatggcgcctaggacagaggaaacaattaaagaagaagcacttaaaattgttaattctgatgttaaggacttttatagaaatgttatgggagctataagaggagaagaagaaattcttgtaaagaatacagaggtaatgagggttattaagcttatggagagtattcgtgaatcagttatcaagaagaaagtgatagagttatagaaattaatcaagaagcttaattgtaattattttggaggagatatttatgcatgggagttttgaaaaaacagtattagaatctgaatttccttttagattgttttttaatgatggatattctaatacaccacatcactggcatgaagatatagaaattatttatcttgtggaaggtacactaaaggcatgtattaatagagatacttataatttaaaacaaggggacatacttataattggtggtggagaaatacattgtttttttaaagaaaagaatttcagtaatagagctgtaatacaatttagaacttccatatatgataattttctttcaggaacaaaagatgctaaaataataaaacctatgtggaatcaatcaatacatttaaccatggggaatgaaattcatgcactaatggagaggcacataaatgagattatcaatgaatatagtaaggctgaggaaggatataagttaataataaaagctagattatatgatctggcaggtatactacttagatatatacctaagcaagcatattcatctgaagacctaagccgtgaaaaggaaagattaaagaaaatggatagtgtatttcaatatgtggatagtaattatcaagagcatattgatttagatgatatttcaaaatctataggttttagtaaatattactttacaaagtttttcaaagaaaatactggggtaacatttttagattatctaaataattatagaattaaaaaagcagagtggcgtataattgaggaagatgaaactattgcagagatagcctataactgtggatttaatagcattaaaacttttaataggctatttaaaaatatagtaggttgcacgcctatgaaatatagaagagataataaaaattaaatattaaagttgagagggaaagggtatgggtgatagaaaaattgtaattaaaaaagatatagtaaatgcgctgcaacaacttggtataaaaagtggacaaaatattatagttcatacttcaatgaaaagctttggatttgtttgtggaggcccacaaatcataattgaagcattaatagagctagttggaaaagatggaactataattatacctacacagacatggaaaaacatggatccggcatatggtgtacattgggaggaaccaatagaatggtgggatattataagagataattggccggcttatgataaggatattactccaacaaattcaatgggagcagtagcagaaatgtttagaaagtggccaggtgttttaagaagtgatcatcctgtaaggtcttttgctgcatggggaaaaaatgcacaatatttaataaacaaccatgatttaagcgatatttttggtgaaagttctccaattgggaaattatatgatttagatggatatgtattactattgggaactggatatgataaaaatacatctattcatttagcagatgaaagagctgattatccatcaaagcatatggaagaaaacagttgtgcaatgatgaaagatggcgagcgtaaatgggttacgtattcaacgttatatgttgatggtgaagattttatggatataggaattgattttgagaaaaagtatagagttgaaaatacaaaaatagggaatgcggatgtaagattcatgagacaacgagaaattgtagattttgcagttgaatggattgaaaagaatagaaaataatcatatagaataatattataatgagcaaattaaaaaatcacgacaattaataataaaatgtcgtgattttctatatttacaataatagcagctaaagtttcttatatatttagttaaatattatttcgcgttcaataattatttaatatctaaaacaatttctcccgctttaacattaccagttttcttaatgggtattactttttcattttacaagaaatagtgcaagactaacttcggctaagatgaatttaccctttccgacaagaaattaacctttcattttaccagatttttttactatatgtattgacttagagttaactctaaaatctataattaaattagtacattagcttataaataattgggagggacttaaaatggaaaaatcgaaagtatattttactaatatgcaagcaacagctaaggaaaatttgctacagaagttaaaacgtttaattaagagtgcaggaattgatcaaattgattttgagaagaaatatgcagcaattaagattcacttcggcgagccaggaaatgtagcgtttttgcgccctaattttgctaaagttgtggtagatactattaaggaattaggaggaaatccatttttaacagactgcaatactctatatgtaggaggcagaaagaatgcgttagatcatttaaattcagcatatgaaaatggatatagtccgttttcaacaggttgccatatattaattggagatggtttaaaaggaactgatgaagctttggttccagttactggtgggaaatatgtaaaagaagctaaaataggtcatgcgattatggatgcagatatattcatatcattaaatcattttaaaggtcatgagttaacaggatttggaggcgctttaaaaaatataggtatgggatgcggttcgcgcgcaggaaaaatggaaatgcatagtagtggaaaacctagcgtttatgaagataaatgtgttggctgtggtatgtgtgctaaaaactgtgcacatagtgcaataagtttaacagacaaaaaagcactcatcaatcatagcaaatgcgttggatgtggtcgttgcataggaatttgtccaatggatgcggttatgccagcatcagatgaatcaaatgatattttaaataagaaaatagctgaatattcatgggcagtattaaatggaagaccaaattttcatatcagcttggtaattgatgtatcaccatattgtgattgtcatgcagaaaatgatgtaccgatagttccagatgtaggtatgtttgcatcctttgatccagtagcattagatgtagcctgtgcagacgcagtaaataagcagccagttatgaaaggtagccttcttgaaaagagcggttgtaagcacaatgatcactttactaatgttagtccagaaacagattggaaagttgctattgactatgctgtggaattaggcttaggcagtaaggaatatgagttgataacaatttagagataaacatatttctgaagttttaaaaattatatgttttaattttagtaagctacaaataaaaaaatataaatttatacctgcagagatgcaggtatttttgtttaataaattaaaaaatataaattaaatcaaatagaaaagcgttatatattttgtaatttagtttttgtagtgtaattttattaaaagagctaacgttctagaatactaaatgtaaatttataacagttatgtatttagagttttgaataataagcattggattattgaatactaactttgtaaataattttaactgagatgaatggaggcaagtacaatgtttaaacacgaaaaaccattacttagagatgtaaaagtagagagaccaaatccacaatatgctgtgttaatgcaagaacagctaggtggtgcaaatggtgagttaaaggcagcacttcagtacctttcacaaagttttagggtaaaagatcctgaaattcatgatttatttttagatattgcagctgaagaattaagtcatatggaaatggtagcacaaactataaatttactaaatggacatgaagttgattatactaaaactcctggaggagaaatagaaactcacgtattgacaggtcttgcgccaggacttattaatgcatcaggacatccttggactgcagattatgttaatgttacaggagacattgcagcagacttattatctgatatagcagctgagcaaagagcaaaggttgtatatgaatatctatatcgtcaaattaatgataaatacgtaaaagagacaatagattttctattaaatagagaagaagctcataatgcactatttagagaagcattaaataaggtgcaagatagagcatcaaataaagattttggtgtaacaaaggattctagattatactttgacttatcaactcctggaaggtattttgacaatcctgagccaacacctcctagctttaaaaatccacgtgaagatagtaggaaaactactaggtcttagcaaatatgatcctatgccgaaattatgtattattaattttgcataggattattttattatattgaagtaaatggattatattaaaaaatccataagttgtattttgaaaaattaatatatattgcgattaagcttataaattatattaataacgcagcttgtagcttaccagagacttaaatgtaaatttactatcacaacatatataggatagtagagttttataaaagagtattaaataatattattgttaaataaatgacattacattttaaaataaaagttataaattatatggacaagtgcaataagtttgtggtagtctagagttgtaagtagtcgttaataataaggatagtattttgttgaaagaattttaataaagatataatagaaagtttgttggtaggaggataaaggaatgtattttaaagaaaagcatgggtttccagatgattttttatggggaagtgcatctgctgcataccaagtagaaggggctgcagaagaggatggaaaaggaagaagtaattgggatgagtttgtaagaattccaggaaaaacattcaaaggaacaaatggtgatgtagctgttgatcattatcatcgatataaagaagatattgcattaatggcggaaatgggattaaaaacatatagattctctatatcttggccaagaatttatccaaaaggaaaaggtgaagttaatgagaagggattagaattttatgacaatgtaattgatgaatgtctaaaatatggaatagagccaatggttacaatatatcattgggatttacctatagctttacaggaagaatataatggttgggaaagtagaaacataattgatgattatgagaattatgctattactttgtttaaacgctataaagataaagtaaagtattggataacattaaacgaacaaaacatatttacaagtcttggatgggtaatggcagtgcatccaccaggaaagaagaatgatttaaagatgttctatcaagtaaatcatcatgcaaatttagctcatgcaaaagcagtgcttgcttttagaaaaatagtgccagatggtaagataggggcaagctttgcgttttcacctagctatgcaatagactgcaatccagtaaataatatagcaaaagcagattatgatgatttacaatcattttggtggatggatgtttatgcatacggaagatatccaaaagctgcattaaaatatctacaaggccaaggggtagcacctgtatttgaagatggggatgcggaacttatgaaggcagcagctcaagtagattttatgggagttaattactaccaaacagcggttgttgagtataacccaattgatggcgttggaatggctgaaatgaatacaacaggaaaaaaaggatcagcacaagttagtggaactcctggattatttaaaaatcctccaaacccatatttaaaaactacagactgggattggacaatagatcctatggggataagaatgtgctgtagaactattacaagtagatatgatttaccaatagttatttctgaaaatggattaggtgcatttgacaaaaagactgaggataataaaattcatgatgactatcgtatagcgtacttgaaggcgcatatagaagaattaaaagaagctattaatgagggatcagaagtgattgcatattgtacatggtctataacagatttattaagctggttgaatggctatcaaaaaagatatggtttcatttacgtagatcgtgaagaagaagaaggcgcttcaatgaatcgttataagaaggatagctattattggtatgaaaatgtcataaggacaaatggagaagaattataaaataggtaagtttatagataagcttaaaggagttgttgattttatcaataactcctttaaacttatctattttggtttataaattaatgttaaaaagaattagctgattaataactttatataagattataaataccaaattttttaaatggaatacaaaaatagaaaggaattagcaagattgtgtagaatttaataactatattttatttcaataataatattattgaaaaataaaagagatttgaaaataaaaaataagaaatttgttgttaaagggaggggatttattgaagaatttaaagattagaacaaagttaatgttgatggtaataataccattaattgcggttatattcttgtctatagaaggaatactaaaaatcacaaatacttatggtacattaacagatatgtattatgaaaaattatataaggtaaatagcctcatactaaatgcagatagagatatgtatcaggctcttgttgctcagaataatttaagtgatacgaacataagtgaacctgataagaataagaatatgaaagatttaaaagataacataggtcaggcaaaagatagaacaagcaatgctataaatgtgttaattccaattaaggcatctttgcaagatattaaacataatgaaagcaacaaaaatgtgtttgaactttatgatgaatttcaaagcaattatcaaggctggttagatagttttgatgtagatacaggagaggtaaaaaataaggaacagtttaataaaaagtttgctgaatctagggaggatataaatcagataacagatgtaatggaaaaagcagcaagtgaaactcagggcaacatgaaggaatctatagattttactaaaattcaatttattgtgttgggaattttctctgttttaataactttgtttgttggaatagcaatatcaagagattcatcaaaagtgttatttaaaataaagaatttagcaactagactttcgaattacgatttttcagaggatttagttttaaagagatatgatgaatatggacaaacagcagatactttgaatagggcacagcaaaatgtacgtgaacttataagtgcaataactgaaaatatacataatgtaaattcgtccagtgaaaatttgactatatctgtaaatgaaataagtagtaatttaattgcagtaaatgaagaaacaaagaaaataaatacgagtgttcaagaaaatagtgcaattgcagaggagatatctgcatctgtaaaagaagtaaacttgaccgttaatatattatctgaaaaggcaatggatggaacaagtaatgtcacaaatataaaagcacgggcaaataccgtagagaatagtagtaataaggcaattcaatctataagtaaagtatatcgtgagaaggaagaaaagattattaaagctattgaagaaggaaaggtagtgcatgagattgggattatggccaatgctatttctgcaatagctgagcaaataaacttgttatcattaaatgctgcaatagaagctgcgagggcaggagaacaaggaagaggatttgctatagtggcagaagaagttagaaaacttgcagatcaatcttcagaagcagttgaaaatgttaaaaaagttattggaaaagtagaaaaatctttcaatgacctatctttaagtagtaatgaacttttacagttcatggatgtggatgtaaataaacagtttgaggaattttcgcatataggaaagcagtattataaggatgcagacttcgtaaattccatgtcctccgaattagcaaggatgtctgaggaaattaatgaagtaataagtcaagtatcagatgcggttcaacatatggcccaaatgtctcaaagatcttctgagagcactaacagcatagaaaatagttcgagtaattcaatctcttctatgaagaatatttcagttaatgcaaaagaacagcttactctagcaaagaaattagaagagaccatagagaaatttaaaatataatttctaagaattttagttattaaatatgaagaaatagatgtacaattcatataaaagattttaattgctttaagtgattattagccgtagatgaattgtacattaatttataatggggtagtaattagtgtttgatgaattagtaaagtgctccaatacctacttttttgtttagtaaggtttgtaattgttttatattgaataaaattagtatagatttttaaataatccatgtattaaagcagcatttttgtattcatataacagaaagcgaactctatttcgacaataaagataatgctgataaatagattttaacttaaatttagcatgtttaacaaattaaatgaataatggaaaataaagatgtgataaggtcagaatatatagaatttatgttatataatatgtcaaaatatagttttcgattgttcaagattatggtattatagttataggttgtagattccaaacgattaagaaaaacgacaaaaaatgtaattatatgttatattgctaataaaaagataacatttaatcatatgacgtgcgaagaacaataaagggggacaaacatggatatatttttagtaattggtcttattggaggtttaataattgtagttgcagccatgctagaaaagggagcaagtcttcaagtacttatgagtgctgaagcgatgctggtaatcattggtggtactgtaatagccttgctaaattcttttccaaaaggagagtttactaagcttcctaagatttttggtgttctttttagtgctaaggggcaagaagatccagctgaaattatagcacagcttgtagagatgtctcagacaactagaagagatggattactatctcttgaaagtactatacaaggcttagaaaataagtttatgaaaaagggattagaaatggtggttgacggtttagaaccagatcttataaaagaagttctagaaatagagattgagagtatggaagatagacaccgtcttggtgctacagcgtttacaacagcaggtggtacagcgccaacacttggagttttaggagctgttataggattaataggtgctcttggaaatcttaatgatattgaaaagcttggagaaagtataaaatcagcctttgttgcaactgtttatggtatctttactggatatttaatatggcatccatttgcaaataggttaaaaagaaaatcccaagaagaaataaaaaatatgaatattatgcttgaaggaattttagctattcaggcaggaaataatccaaagagtattgaaagaaagctagtaggaatgcttgagccaaaacaaagaataagatttgaagaaaataataatgataactagttaaaaggagaaaagtgatgagtaagaaaaagcaacatcatgaagagcatgtagatgaagcatggcttcttccatattcagacatgttaacacttctactagcactatttatcgttatgtttgccatgggacaaacagataaggcaaaacttcagtcaatggctaaagaatttaatataatatttgctggtggatctggtgttatgcatcaagatggtaactctgcaattcctatggaggagtctggtatcagtgataataaggctgaagaagataaaatgactgaaattaaaaagatgatagaagcggaaattaaagaagagggctattctgataaagttaaagttgatcttaataatgagggattggcaatttctatacaagatgttgtactttttaattcaggtgaagcagatgtactaaaagatgtatcaccactgcttttaaaaatttcacatatgctttatggtttggataatgaaatcaaagttgcaggatatactgataatgtgccgattaataacgggaagtttcgttcaaattgggatttaagtgctatgcgtgctataaatgtgttaaattatatggttagtacaggtggtattaatcaggagaagatatcaatacaggcttatggagagcatatgcccaaagcatctaatgcaacagaggatggaagagctaaaaatagacgagtggaaatttttgtggtacgtaaatacccagtacctacagaggagaaatcaaattaactagataagagctaagagattaataagaaattttacatatagctaactcagagcattcaatctatatagattgaatgctctttttatataaaattcaagatattttgtgcaatttgcatttatgtgtagtatagtagtgcattttgcatcaaaatcaatgacttaagtgacttaaaagattgtaataaaaaatttaatatagaatatagagagattaacgttttatataagaaatatgcaaaaaaggagggaattaagatgtcggaaagctttataaatgaatctatgttagatatgtatatttttgaaacaactcagcttatagaacaattagaacaattagttattgatggagaaaaagaaaatggattctcaaattcgatagatgaaatatttagaattatgcatacagtcaaaggatcatcagctatgatgctttttaataacatttctggactctctcattctgttgaagatttgttttattatcttagagaaaataatccggatgaagttgataacaatatattaagcgatattgtattagattcaattgattttatcaaaggcgaaatttctaaaattcagcaaggaaatacaccagatggagattgcgcaaataaaattactagcataaaggagtttttaaatgaactcaaaggaatagaaacaattgatagtgatacagctcctaatgagaataaatttgagcagcaaaaattttttataaccagcgcaaaaagtaaaagggacgcatctaatcaaaaatacaaagctaaaattcaattttcagaagattgcggaatggaaaacataaggtgctttggcattcttcacaaactatcagaagtagctgaaataatatgcagttcaccagaaaatataatagatgatgatgaaaaagcctgtgaagaagtcaggaagaatgggtttaaaatattcttttcttcagatttaaatctagaagatgtaaaaacgattttgaatgaaactgtttttttaagtgcacttgatattagattaatgggagaagatgatgatgaatttttagacaataaagaagttatagaagaaatagctatagaaaaagagtgtagcaagaaggaagaagaaaagaaaaatatagctgaggaaaataaaggtgaaaaaatatcttctcatcaaggatttataagtctaagtgtagttaaagcggatagacttatggatcttattggggagttagtaatttcggaatcaatggttacacaaaatccggatttaattgggcttgaaattgataattttcaaaaatcggcaaggcaacttcgtaagattatagcagagatgcaggatacagtaatgtcaataagaatggttccactttctgcaacatttcaaaagatgaatagaatcgttagagatatgagcaagaaaatggataaggaagtcaaattaacgatcataggggaagaaacagaggtagataaaaatataattgaacatatatcagaccctttaatgcatttagttcgtaattccattgatcatggaatagagacggtagaagaaagaattgataaaggaaaacagcaagtaggaaatctggtgttagaagctaaaaatgcaggtagcgatgtcttaattatggtaaaagatgatggcaaaggcttgaatgaagaaaagatactagaaaaagcaagaaaaaatggattacttactaaagatgaaagtgaaatgagtaaaaaagaaatatttaatttgatatttttaccgggattctccactaaagaagctgtatcagaatttagtggcagaggagtagggatggatgttgtagtaaaaaatatcgaaaaaataggggggacggttagtgtagatagtgtgttggaatttggtacaagcattactattaagataccattaactcttgcaattatagacggaatgaatgtaagggttgggaattcaagatacacacttccaactagctctataaaagagttttttagaccgaaagaaagcgatattataaaagatccagataataatgagattattatggttagaggtcaatgctatcctatacttagattaaacgagcatttttctataagaactgatacaaataaattgtcagatggaattctaataatgatagagcaggatgaaaagtgggtatgcattttggtagatgagttattaggacaacaacaagtagttgttaaagctctcccagattatataaagaatattagaaatattaaggatttagctggatgtactcttttgggagatggaaatataagtctaataattgacatggatggattaatgacaacagtatagatattaaaaacttaagtttaattaaaataagtggttaatggagggaaagaatatgaggtggttaaacaatataaaggttggagcaaaattaataattgggttcatagtagtggctttattagctggaatagttggtgttataggaattacaaaaataaaaaaagtggatcagaactatactagcttatatttagattatggagtatcaattgctgatattgctaatgtatccatatcatttcaaagacttaagataaatttgaataatattacaatgtatagagatggaagagacatgagtaattatgttaatagaataaaaaattacgatgcaaagattcaggagagtttgaaaaaatttgaagagtcaattcaaggtgaggaagcaaaaactgaattttataatcttaatgcgatgttagataaatatgatggaataaaagataaaattatagatttatctctttcaggtaaaaatgatgaagcgcttgctttaatggggcaggattcaacacaaaaactatctgaccaaataaataattctgtagataatctgttccaattaaaggaatcagcaggctttagtaaatcaaatgagtattctgcagaggttaataatgctgttgtgactatgatagttgtaataatagtagctataattatagccatatcacttggcattattatttcaaaagctataagtaactctatagcgaagcttatgactgtaacaagtgaaattagtaaagggaacttagatgtagagattattaatgattcaaaagatgaaattggaatattatcagaatcaatgaaaagaatgaaatatagattaaatgaagtaattggtcagataggatttgcggcagagcaagttacagttggatctagacaaatagcagactcaactatagctttatcgcaaggggctacagagcaagcaagtgctgttgaagaattgacagcttctatcgaagaaatatcttctcaaatatcagtaaatgctgaaaatgctaaaaaggctaatattataacagatagtactaaaacaaatgcggggaaaagaaataatgaaatgaaattaatgcttaaggcaatggatgaaattaatgtctcttctaataatatatcaagaattatcaaggtgattgatgaaattgcatttcaaaccaatatacttgctttaaatgctgcggtagaagctgctagagcaggtcaatatgggaaaggctttactgtggtagctgaagaagttaggaacttagcagcaagatctgcaaaggcagctaaagaaactacagaaataatagaggaatcaattgttaaaattcaagatggaaccaatatagcaaatcaaactgcagatgcgctcgaaagtattgtcagtgatatagaagaggttgcaaaaataattaatggtatatcagatgcatctgaagaacaagctacaggaatttcacaaatatcacaaggaataatacagatatcacaagttgtacaaagcaattcagcgacttcagaagaaagcgcagctgcaagtgaggaactagcaggacaggcagaagttttaaaggaacaagttcaaatgtttaaattagcaagtgctagaagttcaatgactagcttggacaatagctatatgaaccatagtattcatgatgatattagtaaaaacacaagagatttaagtgaaacaagagataaacacttagagagaaaaatatcaaattctaaaaaaataatacttaacgataatgaatttggaaaatattagagataaggtgattatatgatttcaattacggaaaaagaatttgctcaattatccaactatataaaagagaactatgggattaatctcagggaagaaaaaaaaatgttggtaattggaaggctccataatgtgttagcagagcataatatagaagatttttctcaatattatcaatatgtagtttctgataagagtggaaaggcagttagtacactgctcaataaaattacaacaaatcatacatattttatgcgtgagaaaacacattttgactacttgaaggagaaagtacttccttatttgattaattcagtaagggacaaagatttaagaatatggtcagctgggtgttcttctggagaagaggcatacaccattgctatgatattaagcgaattctttaaacaagaaaagttatggtgggataaaaaaatactagccacagatatatccgaaaaggtattgagcattgctaaaaatggaatatatcataaagaacaaatcgcacccttaccagagatgtggaagaagatttatttaaaaaaatacgatgaggaaaatttcgtattttcagagaatattaaaaatgaaattatatatagaaaatttaatttaatggaggatgtatttccatttaagaaaaagttccatgttattttctgtagaaatgtaatgatttattttgataatagaacaaagaatgagctaatccgtaaattttataacagcatggagtacggtggatatctttttatagggcattcggaatcactaagtggtgatacagctggatttaagtatataatgccatctgtatatagaaaggaatagacttatcttaagataatttaaagggctaagaaggtgaagttaatgagatcaattagagttttaatagttgatgacagtatagtatttagggaagcaatatcaagaggaatatcaacggcacctaatatagaggttgttggaaaagcggtagatccctatgatgctagagataaactattagaattaaatcccgatgttatgatttgtgatgtacaaatgccaaaattaaatggtgtagaattcattaaaaggcttcttcctcaatataaaattccaataatagttgtaagttctataagcgatgtagtcttcgatgctatggatgcaggagcagtagactttttaagtaagcctgatgctagaactcctaatggatttgaaatttttattaatgagttaataatcaaaattagaggagcagtaaatgtaaatctatctgctaatttagggcaaattccaaagagtggtagtaataggggaatggaaaagagcataaatgttagaaataaagtgattgctataggagcatcgactggaggaacagaagctatctataacctattaaaaaatcttcccaaagatattccggggataattatagtacaacatataccaccagtattttctaagatgtttgcagatagattgaatttgcaaacgcattttactgttaaagaagctcagacgggagataccattgagccaggtaaagttttgatagcaccaggagataaacatatgaaacttaagaaggctgcggataagtacattgtagaaactattcaaggtaataaagttaatggacattgtccatctgtagatgtgcttttcgaatctgtggctaaggtggcgtcaaaaaatgctataggagttattctaacaggaatggggcatgatggagcagtagggcttatgtcaatgcgaagagcaggggcaagaactatagggcaggatcagaaatcctctgttgtatatggtatgccaaaagttgcttttgaaattggagccgttgaaaagcaagtggctatttcaaatatacctagtgttatttgcgatatgttaaaataaaaatggactatttatactagtccattttttacagcataaactgcaagttgagtacgatctcttaaactaagctttgaaattatttctgtaataatatttttaacagtaccttcagcaataaataaagatgatgcaatttctttattatcttttccatcaacaatcatagatactatttttagttctctttcagttaatgagatatttataccattaatatcaataatttttttcttagcttttttattttctttacgcagatttaatatcataggacttaagatatctttagtaattatgccaagccctagtgaggtgctttttatagatagtataagttcctcagtacttatatcttttaagatatatccgtcagcaccattacttatagcatctgtgacatcagatttatcattagatgcagttaaaactagtaccttaactgatggaagttctgcttttattagttttgtagcttccgtaccattacatataggcatagacagatccattaaaacaacatcaggcatatattctttacatagattataagcttcatttccattagtagcgcaagctacaacttttatatcactgttattttcaattatgtttttaaaactttctcgtaaaagtttctggtcttctgcaataattactcttgtcatattcgaaccctctctttacccaaataagcaatatattaaattttcgtgaaaaatagacaaataatatttattaaatctaatgaaaacacagattaaccgcttgtagattctaatataaattataacattttacaaatacatgaacaatgtataaagctaatcttaattaaactaataaaattttgtgtgtaaactttattagtttaatttttaaattgcaattgtaaagattaggggactattcatggtgaaaatccttataaatgtcatctatatgaagtagattttaaataaaaatgcaatcggcatatttatacaaattaattgtgcaatttgcatgatactacatgacttgtggtactacaaaccaattttaaaaacatttaaaataaaattaaaggaaaagtggtatttttatagcatttcatgggggtgaaattatatgaaaagagttttagtagtagatgatgcggaatttatgagactcgctttaaaatctattttacaaaattgcggatttgagatcataggtgaagctgatactggtataaaggccgtaaaactatataatttattaaaaccagatattgtgacaatggatttgaccatgccagaacttgggggagtagaggcaataaagatcattaagtcaatagatgaaaatgcaaagattatagtaatttcgtcattatcgcatgaaatccaagttaaggaggctatgctagcaggagctatatcttttatagtaaaacctttcagggaggacattgtatctaaacaactattaaatattgaaagaaatattagaaaataaaactttaatataagcatgtaattgaaagcattaggaaattaacttgaaatttaagataacatcataagagtaaattttattagatgggatggattaagatgtttgaggtaagtaatctgaaaataaaaaataaaattgggttaatatttacaggtattatagctatggaaattgctttgtttgccgcatttaatatcggagtgggaaacgtggcagatataaaagaaatgcgaattaatatgataataatattactgttttctataataatcacagtaatcatgggattattactaataaatttcatctacaaacatataagaaaaattaataatattgcaaggaaaattgctaacggagaatttgacgaagatatacaggtggattttattgatgaattcggggatttagctaattcacttaaacagatacaaaaaaatataaataatctgatcgatgattctaatttaattgaagattgcattaaaaaaggtaattttgatatagctttagatttatcaaaatactcaggggcatggggaaatgtacataggaagagtttagcaacaatgaatgtgtttataaagaatattagagcaacttcacattacatagaaaagataagtaaaggagaattcaatgagaaatacactagggaggaaataggatcatttaatgttataaaaataagcattaataaacttatagataatctcaataatgtaatggaaaatattcattggttcaaagaaagctttagattagggaatacaagagataaaatagatgctacaaaatttcaaggctcttataaagaaatgttggaatgtattaatgatactacatggatatcgatagaagtatttattaagttatttgcagtgcttaaatcatattcaaaaggagattttacagctgagcttgaaaaattcccaggaaggtatggattagtaaatgagcatatagaagacttaagaaataatttattaaatatatctaaggaacagattaatatagccaatgaaattaaatcaggaaatttagcaaaaaggatagattcatccaagtttaatggatcatgggctaaaatgattgatggaattaatgatgtaattgatgcgtttgttgaacctattaatatcacagctgattacgtgaaaaggataagtaatggggatgtaccagaaaagattaaaaatgaataccaaggtgaatttaataagataaagaacaatctgaatacattaattgatactttaaatttatttgttaaagaagttaattggatgaatgatacatttaaattaggtaatacaagagatagaatagatgtttcaaaattcgatggggtatataggcaaatggctcaaagtgttaatgatggaatgtggatatctatagatgtattaataaaaatatttgcagtattaaaatcttattcagaaggagatttctcagttgagcttgaaaaattgtctggaagatacggaattgcaaatgaaagtctgcatggattaaaatctaatattcttaaagttgtcgatgaacaaataatggttctttcagcagcggctgaaggaaatttagatattagaggtgaaagtgaaaaatatacaggaagctttaaagaactcataagtataataaataaagctgttgatgcttttgctaagccaataggagaaataaaaagtgttttagaagagatgtcaaaaggtaatctcaatgttcgcattgagaattcttataaaggtgattatggaaatataatgaacgctttaaatttatctgtacaagaaattaatcaagtacttactgatataaatatatcagcaaatgaggtggcttcggcatcgatacaagtctcaaatgcaagccaaaacctatcgcaagcatctgcggaacaagcaagtgctgtggaggaagtaactgcttcgctttcagagataggagaacaaacaaaattaaatgctataagtgctaatgaagctaatgagctggctacaaaagcaacaacgaatgctattaatggaaatacagaaatgagtactatgctaaaggctatgaatgagattaatgaagcatctgaaaatatttctaaaataataaaagtgatagatgaaatagctttccaaactaatatattggctcttaacgcagcggtagaagccgcaagggcaggacagcatggaaaggggtttgcggtagttgctgaagaggttagaaatcttgcaggtagaagtgcaaatgcggctaaagaaacaacagctttgatagaagggtcaataagaaaagtgaattctggaactcaaatagctaacaatacagcagaatcactaaattcaatagttaaagatatcagtagtacttctgagatagtaagaaaaatagcagcatcttgtaacgaacaggcaactgcagtatcacaaataaatgaagcgattgaacaaatatcgagagttactcagataaattctgcgacatccgaagaaactgcctcttcgagtgaagaaatgtctagccaggcagaaactttgaaacaaagggttgctcaattcaatctaaaaaagagaagttcaaataaaatatttttagacagcatagaagaaaaggaagcatcaaggctagaaaatgccatagaggagagagaatttggacaaacatctaatataagaaaaaaaattagtattaatttagatgacacagagtttggaaagtattagtatcgatttctagtagaagagaggaagtgttagcatgaatacaaacataattaatgataatgcagatatggaagaagatactcagaagggaaaatacctcacatttatacttgatgatgaatcttatggtataggaataaataatgttacagagattattggaatacaacctataactttggttccagaacttccagattatataagaggaattattaatttaagaggaaaaataattccggtgatggatgtgagattaagatttaagaaggattttagggagtataatgataggacttgtataatcgtaatagatattaatgacttatcaataggtcttattgttgatagtgtttctgaggttctaataataccagatcaagacattgtacctccacctaatctaagcaaagttagcaataagtacataaaggggataggaaaaatagataatcaagttaagttgattttagattgtaataagttaataaacgatgaggatgctgaaaccctaaataacattgaacaatagagggaggacattattatgaaatggttcaaaaatatgaaaataggtttaaaaatacttctgggattcttatttgcagctttcattgcaggtattacggggatatattgcatttctaatataaataaaattagtgatcttgatactaaattatatgataaaatgactcagccattgggagatgttattgaggtttcaaatgactttaataatataagagctaatactagagacattttgctttcagataatacaggggaaattcaagattatattagtggaattaaggacaatagcgataagtttgattatagcttaaataaattgtcagaaacaacattaactattgaaggaaaaaaggctattgaggagataaaggtttctaaatcagaatatatgaatcttataagtaaaataactcaactaaagaatcaaaataaaaatcaagaagcaattaatattttatattcagagggaaaaccagttttagaaaagttacagtcaaatttaaaaacatatacagatttaaaactaaagatagctaaagaaacttcggatggtaatagcaaaacagcagataacacaacattattaacagcaataatattaattataggagtaattttatcaatactaacaggagtatttatctctttatctataagtagaccagttaataagataataagaatagcagataaaattgcagatggagacttcaatataagtgttaatatagagagcaaagatgagatcggattattggctctttcttttaaaagaatggctgaaaaattaaataatactatctgcaatataaattcagcaacagaacaagtttcagcaggggcaaaacaagtttctgattcaagtgtagcactttcagaaggggctatggaacaggctagctccattgaagaattaacagcatctattgaagagatatctgcccaaacaaaaatgaatgcagagaactccacaaatgctaatgaaattgctgttagcgcaaaaataaatgctcaagaaggatatgagcaaatgaaagcaatgaaaatagcggtagaagatataaacaatgcttcaacaagtatatataagattataaaagttattgatgaaattgcatttcaaactaatattttagctttaaatgcggcggttgaagcggcaagggctggacagcatggaaaaggttttgcagtggttgcagaggaagttagaaatctggcagcaagatctgcaaaagctgcaaaggaaactgcagagatgattgagggcgctattagaaaggcagaaatgggaactaagatagcaaaacagacatctgaagcactaaataaaattgtagaagatactgtgaaggttgctgaattcataaatcaaatagcagtagcttcaaatgaacaggcagaaggaatatctcaaattaatcaaggagttattcagatatcagcagtagtgcaaactaattcagcgacagcagaagaaagtgcatctgcaagcgaagagttggcatctcaagcagagatgttgaaagatcaagtttcaaaatttaaattaaggcaaactaaaagctgtttagtaaataattcaattaaaaacatagattttgatatgatgtaaaaatatgaatgatttaaaattagtttcatggagtgaagcctatgataaatgatattagagttttgataatagaagattcaaaagcctctttgaattttgaggtagcacaacttaaaagaagtggtttcaatgtagactatgagcaaatagaaaatgcagaagatttaagaaaggcgttaaattgtaaggagtgggacataattctatctgatcatgtaatgccaaattttaattctattgaagcattgaaaatattaaatgaaacaaagttagatataccatttattatagtatcaggtgaaattggggaggagacagctgttgaagccatgcgtgctggatgcaaggattatatcatgaaggataaaatggcacgtcttggaatggttgtaaaaagagaacttaaggatttgcatgaaagagttgagagaaaaagagtagaggaagagatgagaaatcttcttataaggtcaaaggaagaagcagaagcagcaaataaagcaaaaagcaattttcttgcaaatatgagtcatgagataaggacgccacttaatggtgttatagggatgattgagcttacattaatgaatagtgagttaaaagatgaattgagagaaaatcttctaattgcgaaagatagtgcttattcattgattaatattgtgaatgcgatactgaatttttcaaaatcagaagcaggaaaaatggaattgagggaatcgaattttaatcttaaaaatttgatatataacacacttaaaatctattcatacgatgtaagaaaaaaaggaattaccctagaatacaaagattcagatgaaattccggatttattgtatggagattctgaaaagttacaacaaatacttaataatttgataagcaatgcaataaaattcacagatgaaggaataatttcattaataataaaaaaagagcagataataggggaaaaggttattttaaggtttttagttaaagatacaggaataggaattagtgaagaagataagaatttattatttaaaagttttagtcaattaaataattcttattcccgtgaatataatggaactggattaggacttgcattttcaaaacaattggttgaaatattggggggagggatttgcgttgaaagtcatatgggactaggaagcacatttagttttacagcggctttcagactagtaaagagaggaaaagtgaatattaattcacatgaattacaagagaaaagaaatttcgaaaattcgaatgaaataaatagaagcacagagttaaacacagaattaagaagattagttgaaaaaatggatgaggcaaataatgatctaatcaaaattgagaagatagcagagattataaataactctatagttatttctaaatttgatgaactagtgatgatgggatttaagttaaaagcaaatgcacgaaggggaaatgaggaaaaagtaaaagtgacttttgagcaattgagagaacacattattagtctaatgcatatataaaatttgggttgaaaagaggttggtatatgagaattcttattgcggaagatgattatgtaaatagacggtttttatttaagtttttttcacaatatggcgattgcgatatggtagttaacggagaggaagctgtccaggcatttatgttttcagtggaggagaaagatccatatgatgttgtatgtcttgacataatgatgccaaagttagatgggttaaaagcactgaagatgattaattcaattgagaaagaaaaacaaataacctatgaaaatttgtctaaaaagtttgtgattacggccttagataatgcaaaagatgttcaaaatgcttttgaactagggtgtgaagtgtatgtaactaagccaataaatactgataaattaattgaagttatgaagaaattaaatttagatatagatgatgaaaaataatttaaattatataggtatctggtataggcaagggtgttttaaagtgtattcgtatagaagatatttttatataaaggaagtaacttattaaaagtaatttatgagagggtgttttattatgaatttaaattgggacaataatttagcaacggggattgtaaatatcgataatcaacacaaagaactatttgatcgtattaataaactattgattgctatgaaagaaggaaagggtaaggatgaggttataggaactttaaatttccttgaagattatgttataaagcattttactgaggaagaagaaatccaaaagaaaaataattatcctaaatatagcattcaacataagcaacacgaagaatttaaagatgagcttaaagaattgagaagaacctttgaaaataatggaacatatgcattatttgtgataaaggtacaaaatagaatgtcaacttggtggaagagtcatatacgggatttagataaggatttaggaaaatttttaatagaaaattctaaataatattaagatattttggataagggggatacatatatgagaagttgggttgtaaatttaaatttgaagtttgtaaataaatataatgttccattcaatagtttcgttattaaggcagaagaaaaggaagaatttctagtaaaaatggataaggtattaataaaggttatggagttagtcaaatttgaaattgatgatatatcaccatttgattataaagaattaccagaagaaattgttaatgaatatatttgtgtagattaattatgctaaacatttaaattcttagggtaaggattatatatagataatgatatttgggtatagaagtataaattatgagagggtgtatgaaatatgtatgaagtattgaaaagggatgaaagaggattaataaataataaaatagcgtcatcaatggtaaagattactcatgaagataatgattcggttattatggatattagcagaatcaatattagtggtgaggtacttatgcattttatgaattcaaattgggatgctgtgttatccactggagttgacaatattgatagacagcatcaagaaatatttagattaattaataatttggtaagtgccatgaatgaagaaaaaagcaagatagagattattaaggtgttggattctcttgaagaacatgcaattcgccatattaatgaagaagaagcaatccaaaaggaaaataactatccaggattagagattcagcagatgcagcatgaagaatttaaagagtgcttaagggatataagaagctttttagaaactagagaaatatcaacattatttattatacatatgcaacaaaaaatatttaaatggtgtagaaaacatatgctaaccgcagataaagatttaggagaattcctaataaatagtcgtagaaattagctgataatttaaaaggatagtactaagaacgaaaatagaacctatgaaatatatactctgaaaagagctatttcataggttctatttaaataataattctttagtacagtctttttttattatatatttatattagtatagacctctgataaaagaagcttctgattttttttaaggctatggagatgacagtaagtagattacttaaatgcgattcgatattattataattgctgtttttcaataaattattaattttagtagtttcctcatagagatcagctattctataatttccggaaagacctttcaaattatgaattattttttgaatattttctaaatcacttccaatcatggcggtctttaactctgatagtgctagattaaattcattaatcaattcggcataaagttctgacacttgttgaagattaagtcctaaatcatttgaaaaaccaattatgtcataatttttgtcgtaattcataaattatatagctcctcttttttaaaatatagtatgtcctattaattgatatcttctttattaattttagctaacatagtgcacaccttttcgataaagtttggaatatcaattggtttagtaatataatcagaaaatcctaatgataatcctttttctatatctctaggcattgcatgggcactaacagcgatgattggaatatctttagtctctttatgcattttgagtcttttgaagacttcataaccgtctatcccaggtaaatttatatctagtaatataatatctggcttatgggcaacagctaaatctagacacagctcaccagaatttgctgaaagcatttttaaattactaatttgggatagagcacgttcaacaagtcgtaaattagcaggattatcttcagcatataatattgtacgaaatttatcgttagggaaataagttctattttcagatgtcatcatattttcagaagtttgcaaaatagatgattctatgcaaggaagttcaatccaaaagtgactgccagcacctttttcgctagttacaaatatttcaccattcattaattcagttagttgtttagcgactgcaagcccaataccagtaccctcaattgaattattaattctgtttagacgataaaatggtttaaaaatcaattctaaatcagaattagataaaccaatgccagtgtcaataacatgaaatctatacttatcattaaccttatcatgataaaagattacttggccatcttttttgttgtacttaattgcgttagatagcaaattgagcaaaatttgttttaatcgtgtatggtcagccgaaacaaattcatctgaattatctataggataattaataatttttattttatgcttatctgcaaatggttttattatggaaatagtctcttccattacatgtttaatcggaacagattcaattgaaatgctcatttttcctgattcgatttttgctaaatctaatatttcgttaattaactctagcaagtggctgccagctttggatatttccttaacactttgactctgagaaggagttaatggagattcagggtctaattctaaaatttgagaaaatcctaatatagcatttaacggtgttctaagctcatgactcatgctagataaaaattcggattttgctttactagctttttcagcctcttcttttgccgtaataatagaacgagccattttcttttgttctgtaatatcacgagttagaactactactctatcgttatagtttagatgtggagagatacatgcctcaaaccattttaatccatccttaaattgaatattaaagtccatagtagtagagtttcttgatttaatgacataatgtatcttctctttagcaattttagctgtactttcatctaaaatatcatagatagaattaagatgaccgtgcatatgtagtttatacaaataagtatggacgctggaccataacttagtgatataaccgtttatatctatctctgagattatgtcattaattgaatcaacaagtgacctgaaatcaacttctttttttctgagttcagattgggtaactaataaatttttatttgtttcaccgatatgatgtcccatttctatcaaatttaatgctatatcttctaattctgagatctttaatagtggatcagctatatcatatttaccactactaatctcctgaacaatattattaatatttagcagagagccagaaacaatatggctcatattttttactttcttataagtaattaagaaaaataaaagatacgataaaattaatcctaatattgtaatgattccaattttcaataaattatttcttagcatatcagcattagagtatatattttttgttggaacaactattaataattttaaatccgtattaggtatagcagaccaacatgcaattctaggttcttcttttagtgtgaaatttgaaaatccagtttcgctagtttgaatttcatccattaatgaggataaatcattattgttatacaagttatactgataatacccgtttccatattttaaaacgagttgatctaaattcaaatcactttttccaacatcagaaagtgaaagaatattaccatcttttccaatcaataagttataaccattccaaggaatatcaatttctaaaaccttattgacaattgaatccatatttatatcaatgcctacaacaccttccaaaaaatttccgttataaacaggatatatagcagaacttataaaattgttgttacttgaattaaaatcatgaacaacccattttactttttgatctggattatggttagcatcagcttcataataaaatttgctagaaggtgattgtagagaataattatagctattaaaaacatcaacgtatgggtaagttatatttaaggaatcaaaggtgttaaaatatatagaattaactaatggacaagaattcttaatatctgccattaatttttgttgtgttaataccttggctattttcttttctttatcatctcttgtagcaggcagaaaattattataaaaaattgctgcctcatcagctgaattattctctttagtatagtaaatattatcatttgaatatgataacctgctatattctgtaggagttaaagaagctggagttaataaagcatgtcccatttgtaaactgaaaaacattgtagaatttgaaatagatgataagtgctgatcaattaagttaacttcttgtttaataattttattaagttcactttttgattgatctttgtaaaaggcaaccgaacttttatgagaccagtaatttgagatgaaatatatacaaataaaaattatttcaataattattaatggaattaatgcattacgaatataggactgccaaatccatttataaagagaaatgtttttattagtatttgttttattcataatatcacctcatccactatgcatggtaatcataaacagtccaaggtactcgtaatttttgaaattatatcattataattaaatggtttagtaatgaaatcagcagcacctttagccaacgctttatcatagtattctttatcgttttcagcagagatcataattatagatagttcactatcatcctttataagatttagttcatctataatttgaagtccatcaacaaatggcatcctaaagtctaatagtatcaaattaggtttatatgtagaatataatcttaaaatttctctagagtctgttaatttttttatattattataaccagatatgttaagcattctttcaagtagtaaaacattagcaatattatcatcaactatcaaaatttttgacattgatttatcgacattcataatttaatcccctctcaaaaaaacttaaaagtcaacacctaaatacttacaaaattaatacctactatcaataatataacatattttagaaaaaagtttaaccaaattttagttttttcttataattatttcagtatctaatattaaaataattatgagattaacaaatgaagttcaacaactaaaaaataagagaagcgatgaatatatacaaaaggaataaattacatatttaaaatatatacatactatatttagaaggtaagaggttagaatagttatagtattcctaagttaatatagtattcttataaaacttaagagaggagaatcaaacatagtggtaaggtctagtacaagatgtgatataattaaaactaaataatcaatttttaaggtggtatttatcggagtaataaaactgaatgtgatattaaaaattatgatataaattaagtatgtacttgcaaataataatcaaatatatagaattatggtataatttagtatatttatatatgtatatgtagaaaggagataacaagagatgccatttataggatcaaaagttagtgtaaaaatttcaaaagaaaaagaggaaattataaagaaaaaattaggggaagcaatacaattgattccaggaaaaagtgaaacctttttgatggtaggcttcgaagacaattactcattatatttcggaggagaaaaattagaaaagggtgcattcatagaagtaaaaatatttggaaaatcaagtaaggatgcatatgatgctttaacagcagaaatttgtaacatatatgaaaaggaattagacatacctcaagataagatatacgtcaagtatgaggaagttgcaaattggggatggaatggaaagaatttttaaccacggctggtaattagatataggcgacctaaagtaaagggtactctgatgtaacaatgcacatagtatcctttatttataatattgaaggaggtacaacttgattataggaattgcacagatagatatagtctgggagaatattaataaaaacatgaagaaagttgaagaattcattgaaagagcttcgaaaaataaggtcgatttaatcctatttcccgagatggctttaacgggttttaccatgaatataaacaagcttgtattatctgaagatgaaataataaaatggattggaaaaaatgctaaggataataatataaatataggaattggtgttgcggtaaaaagtgataaaatgggtagcaataaatatattattatgtcaagagaagggaaatgcttaactaaatatacgaaaatacatccattttcctacagtggtgaggatgataaatatcataaaggagataagatactcacatgtgagattgatggatttaaaatagctccatttatctgctatgatttaaggtttccagaaatatttcaaatagcatctaaagaagcgcaaataataactatagcggctaattggcctaaagaaagagagaagcattggataaccttattgaaagctagggctatagaaaaccaatgctatataatagggataaatagagtaggaattggaaatgatcttcattataatggaaaatcagtttttataagtccagatggtaatatattgaacgaggtaattgagaaagaaacactaattataaaagagttaaaaatagatatgataagagcgattaaagaacagtttgatataaagaaggatagaagagaagatttatatgaagctataagtaattgcaattctattttacattaaagtaatgaatggtaggtaaagctatgataaatgattttcaagaagaaattgaatatagaaagctcgcattaaaaaaggatataaaaaaaagcggcggaaactgtgcaaggatacttcttgcgctagtattgtcaacatatggattagtgtttataatgacattttctataaaatttataggaccaatgataggattcaatgcagtaactaatctaaaggaaaatataattttaggactttcaagtgacgcatataatttttttgctggatattttacatgtatagttggggatcttatagcaattctcatagcaataaaaactataaaggtgaaatttaggcaagaaatattttcaaagaataagtcaaataagatgtttgtattattaggagcaacttcttgtataggggtaggaatgatttcaagcatggtatatatgatatactcaacaatttttaagattttaggattaaacattccacagccagattttagtttccctaaacaaaacacttttttaatattatttttaatatatgtatgtttagtgggaccaattttagaagaaattatatttaggggatttatactcagaagcatgcagaagtatgggaatctaacagcaatgattgtttcttcaattcttttttccatgtttcatctaaacctagttcaattcataaatccaatacttatgggaattgttttagcatttattgcaattaaatcaaaatctattataccgtcgatgatagctcatatatttaataatacgataacttttgctacaacaggaatatctttattaaagatgcctatattggagtatacatttggaactttgtactttttagttggtgtagctgcattattgctatttattagtaagtataaaagcgaatttttagaaatagtaaaagaggatacaagaatattaaagactcaccagaaagtaagatattcttttagtggagcgtggtcgagggcttatatagtattctatataatatttatcgttgtaactatggcagcaactaatttagcaaagtaatctactataaaggacaaaaggttattttatgaatttaaaggaggattaatatgacaaataaaatattgttatctataatagagaatttaaatgatgagcttatagaagtatatcgcaaactacatgagaatcctgaattgtctaatgaggaatataaaactacacaacggataaaagatttgctaaaaagagcagatatagatattcttgatttacctttggatacaggccttgtagcacaggtaaaaggaaatcctaatggtcctgtcgtcgctatcagatgtgatatagatgcattaccaatcaaagaagagacaagtctctgttataagtctaaagttgatggtatgatgcatgcttgtggtcatgattttcatatggcggtgattttaggtgcagcatatttagttaaaaagcatcaagggtcattaataggaacagtaaaatttatatttcagccgggtgaagaaagtgcggatggagctaaaaaaattttagagacaggtgttttagatgatgtggatgcaatttttggaatacacaatgtttcagattcagaagttggaataatgggaataaaaactggagcaatgacagctgcagtcgataggtttgaaataaatattacaggaattggtagccatgctgctaagccggaaaaaggaatagatccaattataattgccagtaacatagttacatcacttcaaacaattatcagtcgtaatataggtccaacagaaaaagcgctattaagtgtgactcatatagaaggaggaaatacgtggaatgtaattccagaatcagcatatcttgaaggcacagtaagaacattagatgagaatatacgtcaattaatagctaagagaatgaatgaaatggtatcaggaatagcacaatcttttggtggaagtgcagagcttatttggcattcaggttctccggcaacaaataatactgaagaatgggtagagtttagtactaaaattggaaaacgagctggatatgatgttagaagaatatctatgggtctagagggtgaagattttgcgtattatcaaagaaaaataccaggtgcatttataattgtaggaacaggaaaatcttatgcgcaccatcacccggaatataaagttgatgagaaggcaattttaaatagttcgaaatattttgcacaactagcagaaggtgctttaaaagagataatagataagaaatataaacataagattaagtagataaaggtacttaatttaaatatttattttgtaatatagtaaagaattaaaagttttaaagctacattactagtgattaagtttaataaagaaattgaatttcaatttttaaaataagtccctaacaaatgattgcaatgattgaaagaaattacaaagtgtgataagttggttgtaattagtaaaatttgaggaaatagttgcataaatattccaaatagtttattagagattattatgatgaatcatttctgagaattattacggcagattggaattcaaaggagggaaaatgaggagatggagtacaagctatttaaatcattagcagataatcttccacagcctatatggataaaagaccttgaattgagatttatatatgtaaataaagaatacaaagctatatataaagatataaataaagaatttattggaaaaaatgatgcagagatatttgatggtgttgtaagagaggaatgtattaaatattgcaatcaagttataaactccttaaagccattaactgaagaagggtaccttgatggaaagcgcagaaaaattactatagttccgctaattgatgagggaaaagtatttgctgtagctggcatatatgcaaatttagatattataaaagaaaaagataagattatagagaaacaagaaaacatattaaaagttgtaatggatacacttccaggaagagtattttttaaagataaagaaggcagatatgtatatgtaaataagcaatttgatgaattctataataaggatggtataggagaagtagtaggaaagacaaatattgatatacatccaacggaagaattggctgcaaaatattcaagagaagataatgaagtaataaaaaacaaaagaagtataaaagctgaaacaatactttactcaggagatggagaggaaatatatacagaagcagtaaaagtacctgtaatcgataagagtggtgatgtttcaggtgttgtaggattagtattagatataactgagaaaaaagaagcagagaaaaaattaaggcaattaagttttactgatattttaacaggtttatacaatagaacatattttgaagaaaaagtgaaagagttccaaggtgaagagtatcttccggtaggagtaataatgggggatgccaatggactaaaattagtaaatgatacgctaggtcatgatcaaggcgatgaacttttaagattaatagcccaagcacttaaagatgtatgtggtgaaaaacagttgattttcagaactggtggagatgaattcgtaattttaagtaaaaatacaactgaacaggaatgtgaaatcattattaaaaatatatttgatcgttgcaaaatgtataagcacgatttaatcaatgtgagcatatctttaggtgcatcagtagcggatagcttgaataagagtatatatcaagcattaaaagaagcagatgataaggtatataggcaaaagttgctacaaaaaaccagtcttaatagttctataatgtattctctgcaaatgggtttagaagctaagagtttggaaactgaagaacatacagatagagtattagaaaattctattgcgataggagaaaagttatcgcttccaatgtcggtaatggatgagctaacaatagttgctaagcttcatgatatagggaaaataggaataaatgaagaaatattacttaagaagggtgagttaacagaagatgagtttgaagtagtgaaaactcatacagaaaagggatataggatagtaaaagcctcaaatcaactagataatgtagcaaaaggtgttttagctcatcatgagagatgggatggaaatggctatccgcttaaattagagggagagaaaataccactggtatctagaattgttagtgtcgcagattcgtatgatgctatgacgaacaatggcatttataagaaatgtttgaataaagaagaagcaattgaagaattaaaaagatgttcagggaagcaatttgatccaattatagttaaggcatttatagaatacttagaagaaattgaggaataataaaatctattgggaatttataataagagagaagatattcatgatgtgagatataagtaacttaatgaaagctgcaatttttgattacaatccctacgttaagggatttttttatgtattcattaagtaataaagatataagtatgatatcatatgaagtaattacattatattggaggtgtgatatgaaatttgatatttataaaatagctgataattacaagctctcagaaacagagagacaggttttgcaatacatattaactaatattgattctgttttaactaaaggtgtaagagatgttgcaacaattaattatacatcggcggcaacaataataaagctatcaaagaagctaggttatacaggctatgtcgatatgatatatcgactaaacttcatagtaaaaaatcatcaaaacaatcaagaacatacctctgatattactagcttcatatcagaaattgaaaataagaaaatagaagatttcatttctatgataattaaacatagagaagatataattttcataacagccactggattctctgattcgattgcagatttcttttggagaaagatgttagtgcttgggtttaaatgcattaaaacaaattcttatggagtatatgacagcaatcaaataggaggcgccttagttattggaatatctaaaagtggagaaacggaaagtataacaaaagtgattgattatgcatcaaaaaatcaattggatattataacttttactggtaagccagagaatcacatggctaaaaaggcaaccttaaattttatgatattggatgataaagaattagatgatagaaatcttaccgcgaactatttttatgctagggtaatgattgtaatggaatatttgctagataaggtaatgagtaatttataaaatatagatatccaaactagtcatactcatgtggaaacttaccgaaattatatatataaagctatctcaaggttaactaatgagatagcttttttgtgtgtaaaggtaaacatgtttacttttgagtcaacatgttgctgaaacgtttaaaactattaacaatatctattaataatgatatcctattctcacaggtaattacccaaagaaaattataaaatagtgaaggggaatatttaaatgaaagataagattttaaatagtatgcagaaatttgccaaagctatgattggaccggtcttattcttacccattgtaggtatgttgattgcattaacagcagttttcaccaatacaacatttgtaaaagaaggcggagcaatttgggtaacaggaaaattctttaatggaatgttatcaccgattatggggaacttaagcattttgttttgtgtcggaatagcgatggggatgtcaaagaagaaaaaagcggaagcagcattcatttccattatgtcatatattttgttcctaggcgcgaatagtaagtggctagagctatctggaaaaataattaaaggtgatacagcatcagctttatatggaactgggcagacaatccaactaggattccatgtgacagatatgggagtgtttctaggaatgattctaggagtactagttgctatagttcataacaaatatatagataaagaatttagtggcgctatggctccatacggtaatagtaagtttgtattcgttatcatgattcctgtagtagctatattaagtattggtaccacatatgtatggcctacaatagctgctggaatcacagctcttactggatttatgagttctgcaggggcggctggagtgtttgtttatggatttttaaatagattcttagttccaacaggattacatcatttaatttggtctccattcctatattcagcagttggtgatcagatgataataaatggccaaaatgtaattggagcgaaaccagttttcttagcattgcttaatgattcaacaatctctattatgcctgactcagcaagatttttaacatatggattagttaaaacttttggtgtaattggagttgccttagcattttacttcactgctaaaaaagcaaagcgtagtaatttaaaggcacaattaataccatcaactttaacagcagtaatcgcaggtatcacagaaccattagaatttacatttatttttgctgcaccattactatggtttgtttattcagtaattgatggattattccaaatgtttgtatacctattaaatgtaagagtatgtgcaaccaatggaatattagattttttagtaataaacttgccagcaggtataggtaaaactcattggcctgtgtatatactagtaggattagttgaaatagttgtgattttcttagtattcaaatttatgattgagaagatgaatttaagaacacctggaagagaagagaatgatacagatgctgtaattgatttaaatgagaatgcagcaaaagttaagcaagatatgaaatcagaaaataaaaataatagtaaagctaataacgatgatgaaaaagcattaacaataattagagcattaggtggaaaagcaaatatagtaacagtagaaaattgtttttcaagacttagagtggatgttatagatagcaccttaattgatgaagaagctttaaaaggaacaggcgcagcaggtgttgtgaaaaagggaaataatatacaagttgtatatggcctttcaattaataaaattagaacaatagtagatgaagcattagacagagcagaataaaatgaaggaggaattattaaaatgaaaaaatttaaattagtaatagtaggcggaggaagcacatatacaccagggattgtaaagagtttactttcaaagaaagaggattttaaaatatcagaattaagattatatgatataaatgcggaacgtcaaaataaagtaggagtgatagtaaagaaagtagtagaaatgtttgatccagaggtaaaacttgttcttacaactgatccagaagaaggatttaaagatgcagattttgtttttgctcaaatgcgtgttggattatataagatgagagaacaagacgaaaaaattccactaaaatatgatgtggttggtcaagaaacatgtggtcctggaggattagcatatggattaagaacaatatatcctatggttgaaatgatagatttttgtgaaaaatatgcaaataaaaattattggattgttaattattctaatccagcagctattgtagcaaaagctatgtataagttaagaccaaatgcaaggattttaaatatatgtgatatgccagttgcaattatgagaaatatggctaatatcttagattgtgatagacatgatatagaagcagattattttggattaaatcactttggttggtttacaaaaattagagttagtggtgaagataaaactgaggagttaaaagcatatgtaaaggaacatggttatattccaccggattcaagaagtgaagtaagacataatgatgcatcatggcttcatacatttgataatgctaaacatataatgcaaatgttccctaaatatcttccaaatacgtatatgcaatattatcttttaggagatagcattgtaaaagaagcagataaaaatcatactagagctaatgaagtaatggaaggaagagagaagaagatatttgatgctgtagaccaatataatgctacaggagaaattgatcttacacaattctttactggagtgcatggagaatttattgttgaagttgctatgagcttagcttttgatttaagaaagagacacctagttatggtagaaaataatggggcaataaaaaatttacctgacgatgctatggtagaagtacctgcatatataactaaagatggaccagaaccagtacgtgtaggagaaataccaactttctataaaggaataattgaacaacaagaagcatcagaaaaacttgtagttgaggctgctattgaaggctcatatgaaaaagcacttatggcatttactatgaacaaaacaattccatctgcatttgtagcaaaacagattctagatgatatgattgaagctaataaagaatattggccagaattgaagtaggatagagaatgtttaaaaatatattaaaaaggaataaaaataaattattatatgcttttacagatggagtcagcgtagatataagtgaagttaaagatgaagtgttttctcagaaaatgatgggcgaaggtattgctattaaaccaagtattaataaaatattttcaccatgtgatgggactattgttacaataatgaaggaaagcaagcatgcaataggaataagaacagaggatggagtagaaattctaattcacgtgggacttgacactgtaaatttgaaaggtgaaggctttaatttgtattgtgaagaagaaaaatacgtgaaaaaaggtgagttacttttagaattcgataaagaactcctaaaagaaaaagaaatagaagatataacaatgcttattattccaaatttaaatggccatgaaattctaaattttcatatcggagaaattatgaaagttaaagaaagccctataattgaatataaatagatatttatagaaataagcttcattgttatatggagcttatttttttagcaaattctacgttaaagccagcattttatcttatcacggcattatgggaacgtggagttaagtgcctagaataaaaaaatgagtattcaaggtgagtataagaatagatagaagagcaagataatcgtaagaatatattagaaatgatattgacaaaataatttattaatatataatgaaattaataagacccccctacacagggggaggggaggaagaaatgagtgaggaaagaaaaaaagcattacaatctttaaaaacagcgaagggtcaaatagaaggaataataaaaatgattgaagatgatagatattgcatagatgttgcaaatcaattgatggcagttcaatctttaataaaaaaagcagatttaatgattttgcaaggccatttacgtcattgtgtaaaagaggcttgctataacaacaatccagatgagaaaatagaagaatttaataaagttttagaaaagttactttcaaaatagaaccgattattaagagatgacaatatgaaataaaatataaaagcattattgcattaattaaatatagagaaaagttgtaaattgcttagtgaagttaaaattagcttaatgtaaatttttaaagtatatgctaaataagtaaagaggtgaagtatgaataaaaaagcatttaaaattgaaggaatgacatgctcagcatgtgcaaatagagttgaaagatttgttaaaaagttagaaggcgtaaatagcgcaaatgttaactttgcaacagaaacgctgaacgtagagtttgatgaaaacaaacttaataatgaaaatatagaagcaaccgtagttaaagccggttacggtgttaagaagaatatgaagacttatacttttaaagttgaaggaatgacatgctcggcgtgtgcaagtagagtcgagagagttactaaaaagcttaagggggttcaagattctgttgttaatttagcaacagagaagttgactataaatatagatgaagatgaaattggatatagtgaaattaaagctgctgtagataaagcagggtataagctaattaaggaagaagagcaagttgaagaaaagaaaaaactagaggcaagtcaattgttattaaggagatttattatatctctaatatttgcaattccgcttttagtaataactatgggacatatgttaggtatgcctcttccatatattattgattctatgatgaatccattgaattttgctgtgattcaattagtattaacaatacctgtaatgatagctggatataagttctatctaattggaataaagaatttatttaaactaagtcctaatatggattcgttgatagctataagtactttagcagcagttttatatggaatatttggaatttataaaatacaaacaggcgaaactgaatatgctatgcacttatattttgagtcagcagcagtcattttaactttaataacacttggaaaatatctggaggcagtttcaaaaggaagaacatcacaagctattaaagcactaatggggttagcacctaaaactgcaacaataataagaaataatgctgaaattacaatacctatagaagaagtaattgttggtgatatagtcttagttaaaccaggtgaaaaggtacctgtagatggagaaattattgatggcagtacatccattgatgagtcaatgcttacaggggaaagtattcctgtagaaaagattgtaggaagtagtgtaattggagcaagtatcaataaaactggctttataaagtataaagcaactaaggttggaaaagatactgcacttgcacaaatagttaggttagttgaagaagcacaaggatctaaagctccaatagctaaacttgcagatgttatatcagcatattttgtgccaatagttataatgctagcaataatagcttcaataggatggttaatttcaggagaaacaacaatattctctctaacaatatttattgcagtactagttatagcttgcccatgcgcattaggccttgcaactccaactgcaataatggttggaacaggtaaaggcgcagagaatggtgtgttaattaaaggcggtgaagcgttagaaactactcatagtataaaaactatagtatttgataaaactgggactataacagaaggaaaaccagtggttacagatataataacaaatggaatttcggaggatgagatattaattttagctgcaagtagcgaaaaaggttcagagcatccgttaggagaagcaatagttaaagaagcgaatgataaaaacttggaacttaaagaaattcaacaattcaatgcaattccaggacatggaatagaagttaagatagaagaaaaaaatattttacttggaaataaaaaattaatgatagaaaaaaatattgatattgctatgttcgcggatgaaagtgatagattagcagctgaaggtaagactcctatgtatgtagcagttgataatactttaagtggaatagtagctgttgcagatactgttaagccaagtagcaaaaaagctatagaagctcttcataacatgggaataaaggtagctatgattactggagataacaaaaaaactgcagatgcaatagcaaaacaagttggaattgatatagtgctagctgaagtattgcctgaagacaaggctaatgaagtcaaaaagcttcaaggagagaacatgaaggtagctatggttggggatggaataaatgatgcaccagcattagctcaatctaatgttggaattgcaataggatcaggtactgatgtcgcaatagaatcagcagatatagttcttatgaaaagcgatttgatggatgttataacagcaataaaactaagtaaagcaaccattaaaaatataaaacaaaatttattctgggcatttggatataacgtactaggtataccagttgctatggggatacttcatgtatttggaggtccattattaaatcctatgatagcagctgcagcaatgagcttaagttctgtttcagtacttacaaatgcattaagacttaaaaattttaaagcctaatcaataagatatgatgataagcaaaaatagaatattaggacatttcttaggtagtagataattacatctagatgcttgaagaaaagtatttcaaatatctatattttgatttctaaattttaatcattaataaacgggaggtaatagatatgaaaaagaaaatattaattgaaggaatgagttgtgaacattgtgttgctcatgtaaaggaagcactagaaaatttggataaggtaacttcagttgaagttagtcttaaggacaattgtgcaacagttgaaactgaaaatagtaatgaagaaataaaagaagctattgaagaagaaggctatgatgtagttaaaatagaagaataagacaaataatattctttcaaaaaatctggttaaacgtaaaatttctaaatttaatgaatttaaagaatagattaaacaatttttatagatagttaacaacaaggatttattttccgtgttgttaactatttatttttattaatttgagctatctgtttaacagttatagaaaaaaataatatgcatataaaatactattacttattaatacgtattaaaacatcattataatgtattgacatttttatcttatagcaatattattcaattagtagaaaaatactaaagaataatacttcgataaaatttaaagggggacaatatatgaaaaaatttttattaaaaaagttaatagtatttgtggcaattagcagtatagcgtttggaattataggatgtagtagtaacactaatagttcaggcaaaaattcagatgttaagtcatcatcattaagtgatataaaatcaaaaggcaaaattgtagttggaacgagtgctgattacccaccatatgaatttcataaagaaatagatggtaaggatcaaattgtaggtattgacgtaagtattgcaaaagaagttgctaaagatttaggtgtagaacttgaaattaaggatatggattttgatggacttcttgtatcgcttcaggcaggaaagtccgatttagtatttgctgcaatgaatccaactgatgaaagaagagaaaatgctgatttttcagatatatacaataaagagaaaaatatatttatagtaagaaaaggtgaagcagattcaataaaatcaatggatgatttgaaaaataagaaaattggggttcaaaagggatcagttcaagaaggcttagtaaaagataacttaccaagtgcggaagtgaagggattaggaaaagctactgacttagtacttgatttaaagaataaaaaagtttatgcaatattacttgattcaccagtggctaaatttaattgtgataaaaacaatgatatagaattgacttctgtaactattgaggcgcaagaagatggagcagcgatagcaatgaggaaaggttcgactgaattgcaaacagaaatcaacaaaacaataaaaagattaaaggatgaaggaaaaattgatgaatttgttgtagaggcaaataagttaatggattaggtccgaataaagtttgatcatttacataattattgatgtaaggaagttactgataccttacatcaataattttatattttaaagggagatgtttttgcaataggtcaatcaggttcgagaaaaagtatctatataatatactcaaataattggtgaataatatttctagcaaattacactgtttaatcagaaaatatatacttactatttaagttcaaaataagttgcataacattatacaatacgttataatacgtatcaataagttcgattaagaaaaatgtttattccaagattagtagtaacgttattatgatacagttacgcaaggtaaaaagagataaatagcttattagttgcagtaagtaatgtacttattaaaaaagtaaaaatgctatatgcttatacgttactatttgggttaatgatcttaagcatttgccaatgtaaaaaatataaattcgtagaatgagattataaatatataggaggaataacaatgaatattagggaaatcgtagggaaaattagatcaagtaaggaagatggaataaaggaagtgtttttagtagcatgtggagggtctttagtagatatgtatgcatcacaatattttttacaaagtgaagcaagagaattaagggctttatcatatacaagtaatgaatttgtacatgcgataccaaaatcattaggaaaaagttcggtagtaatagtatgctcacatggtggaaatactcctgaaacagttgaagcggctaaagtagccagtgagaaaggtgcagcaactataacattaacacataataaggatgcagatttaattaagtatgcggattataatatcctttacgaatggggaaatgatacaagcgtagaagataatccgatggcaataattctaaatatagcagtcgaaatattaaatcaaacagaagtttatgaaggatataataaatttatggaaggtttaaagattgtaaatgatgttgtaaaaagaggccaaggtttagttgcagaaagagcaaagaaatatgcagaaaaatataaagatgagccaataacatatgtattaggaagcggggcatcatatgggcatgcttatggattctcaatatgttcactaatggaaatgcaatggatgaatgcatcagcagtgcactcaggggaatacttccatggaccatttgaggtaactgataaagaaacattatatttattattaatgaatgaaggcagaactagagaattagatgaaagagcacttaaattcctaaataaatatggtgcaaaagttgaagtcgttgattgcaaagaacttggaattagtgtaattgatagttcagtagttgaattctttaatcctatagtattctatagcatcttatgtgtgtatagaggggaattagcaaaacttagaaaccatgatttagatactagaagatatatgggaaaagttgaatattaaaatattttagcataggagaagatattatggtaaaagttattgggttaggagataacgttgtagataaatatgagcatattagaacaatgtatccaggtggaaatgcattaaattttgcagcttatgcaaaaaaaataggaataaattcggcatttttaggtgcatttggatcagatgctgaagcagatcatgttcaaaatacaattcatgaacttggcttagatatttcaaagtgcagacattttaatggagaaaatggatgcgcaagagtaactttagaagatggtgatagagtttttcttggaagcaatgaaggtggagttttaagagaaaatggattaaatcttacgcaagatgatttagaatacattaaaacttttgatttactacatgcaggtttatacggatatacggaaccagagcttgataaaataagagcattaagcattccaatatcttttgatttctctgatgattttacaattgaagaagtcgaaagaattgcgcctaaagtagattttagtttcttctcatgtagccatttaaagaccgatgaaatgcttaatttagtgatgaaagctcataagcttggaagtgaaatagtagtagttactatgggagaaaaaggtgcattattatatgatggaactaagttctattcacaagagccagagcttgttgaagctgtagatacaatgggagcaggagattcattaataacagcattcttgataaattacataagcaaaattaaagaaaatgaattggatagggaaaatataattaaagaaagtctaaatgaaggtgctatattttcagctaaaacatgtctagtagaaggctcatttggatatggtaaaaaatattaattaaaagtatagtggctgttgaatagttattatttaatgagcaatatcaaacagctattttaagattactgtaataaatcaaagaattgatattatcacaacaatagattaattgaagtttcaaaaatgttgtgatagtatatagttaatattatagatgtttaaaaggagtctttatatgctaatacaagataatattattcctttatatcaacaattagcggatattatacgtaattcaataacgagcggagaattaaaatatggagataagattccaacagaagttgagttaagtgaaaaatataatgttagtaggataacagtacgtgcagctataaatgaattagttgagtcaggttttattataaaaaaacaaggaaaaggaacatttgtaagtaagccaaaagttcagaggaaaattgaatatttatctagttttactgctgcctgtgaggccagtggcttaaaagtaactaatgaaatcattaaaagagaggtaatggagcccaaaatagaagacaagaaagctctagaactagatgatgatgataagttaatatatattcaaagagttagatttgcaggtggagatccattaatgctagaaaataattatttttcttttaaaaggtttaattttttactaacagaagatttaagtggttcactatatgaattattaagagataaatatgatataaatccatctgattcgcctaactcaggaaatgatcataccacaatagaaattgcaaaagctatggatgaagaggctgcgctattgatggtgcaaaagggtgaacctttgttttatataaagactgttatttatgatgataagaatagaccggtacatataggaaaacagtacgttataggcgaaagatataaattcgtaatatcatagtatataaattcttaaatgtaaaatattgagaagtactagatacctaaagttatagataaaaaccgaaagaaaggtcatgcatttgttccaggttgctggagtatttagctgtgaatttccaatagcaaaaattgcaccattcctgcatgctcccgaggcaagctcgtgacaagcaaaaatggaacaacttctactaagggaaatatctacagctaaatgctcaatgcaacacttccacaaaagtatgacctttctttctggtatatactacaattaaaattatatgtttgggtttgggttagatatctaggcgcgaaataattagaaataaatatggtggattgtgctcttagaacacttaagcaaaatcttcaaaggaccgaaacaaacgcatattccctttcgaaggtttagcagtaaacttaaaatttcttcatattgtaagtatttttatatttcacctagttcgcaacacctataatttgagatactttattaaatgcatagtccattgcactttctaaatttgaattattttttcctgctccttgagcttggaaaggacttccgccgccttttccatcgataagagatatagcatcttttaaaagttcattcattttgatatctttaatgtctttagaacaagcaaataatagatttactttttcatcagattttactgccattagagctattgtgttctcattttcgataagcttagaagtaaggttattcacatactttaggttttcaccatcaaatatttgtttaattactttaacattatttattttagctgcattttcaagaatttccttaacttgatatttagctagtagaatgttaagatttttatttgtttcattagcttcacgaagattttgatttaagttctttataccatttatagcttcattttcattacaacttaaatatctgcatatagaagtttgaaattcatctttcttaaatgaatcagaaatagcacgttcgccagctagaaactctattcttgttccctctttatgtttctcaaatttttttattttaataagtcttaagtcaagagtagatgtagggtggagtccgcagcaagcattaatatcaaaatctcctatttttacgattctaatatcctcttcagtatttggaagagcacgtctaagagataactttttaagttcggctttagttggaacaaaagattctacaggtagggcatcccctataactttattagcaagtctttctgcttctctaacttgttcttcagttaagacaccataaatatctactgtgcttatatcagaacctaggtgaatagcaaaagtattagcgttaaaaaggttgaagaaagatcctgataaaacatgttgacctaaatgctgatgcataccatcttgtcttctatcccaatcaattgaacatttaaccttatgtatcttgagtggtttcttttcaaccacatgataaacaatttcctctttttcgtatacatcaataactttttgatcttctagagttccaatatcacagctttgtccgccacctcctgggaaaaatgctgttttatccaatataacatgaaatttattatcaatttcttttatatcaataatttcagcagtaaattctttaaggtatcgattatcataatataatttttccatatgtaaattagcctcctaaaatataataatatctaaggctcagctataaataatttttatagtttgtttaacctgagtctaagaaaagttcaataatatcattatagcagatagttcattaatattgcatttttaagaatcaagaaataggtacaaaatttccttaaaaattattattaccctatagtagaagttttttacgggataaaagagttaagccctacaaataatattagtgactttaggtgtacaaaaagatatatatcttttatgtcttgatatttagaagaggtgattaatatgaatgtagtgttttatctgatatttaattttatattttattcatttatagggtggatattagaggaaggttatagtttttcaactacaaaaaagtttcaagaggatggtttcttagtaggaccatttaagccgatgtacggaatggcagttatgtttcttataatatgcaatgaactgttagagatttctggaattccattaatattattatgtttcttaataccaacgacagtagaatatataagtgggtatatacttaagcactcttttaacaaagtatactgggattattctgaatttaggtataatattcatggatttgtcactcttagattctctatatattggatggtgcttagccttattggcctttattatttgcaacccagtttatatgagttatatatggagaatatgaaaattattaatatctttgtagttttaggaggctctatattattaatagacctatatataactgtaaagaaattagaatatgagaagcttagaatgatacagtaattttattgaaaaaataatagaaatcatatttttataaaaatagatataaatattatttgagtaatatttatatctacctaaattatataatttattattttaaattatatagagaagctaacttatcaaaagcaggcaaagatttttctattttctcatatgaagtgcaataagctaatcttacgtgtccagggcatccaaacgaagagcctggaacaagtaataaattaaattgttttgcatcttcgcagaattttttatcatcatcgattggtgattttggaaataagtaaaatgcaccttgtggtttaacacaagtgaaaccaagagatatcaaatgattatataaaagatcacgatttttcttataaatatttacatccacttcagcatctaaggattttgcaattaccctctggaataaagatggagcatttacaaatcctaaaattctagttgcaatatttagtgaagccatcatatctgtaaaatcagccatagatgagttagcaactacataaccaatacgttcaccaggcaaagataaagatttactataagagtacccaatgaaagtattatcataatattttaaaatacaagggacttcaatatcatcataaacaatttctctgtatggttcatcagagatcaaatatattgatgtattaaattcttcttgcttattattaagtaacgttgctaagtgttttattattttctctgagtaaataacaccggtaggattatttgggttgtttattattaaagcttttgttctaggagtaataacctcacttaaagcctttaagtcaggctcaaaagtttcaatgttagtaggacaagtcactagtttaccatcaaaattttttacatagttcccatattctccaaagtaaggagaaaaagtaataacttcgtcatctggatttaatatagattttaggattatatttaatccgcctgcagccccacaagtcataacaatattatctttagaaagtgttaaattatgttttctgtttataaaattacttatatttgttctaacatcatcatagccagaattgttcatataaccatgtactaaatttggtgtttcttcattcaaaatttcaaagataacttcctttactttacttggaggttcaacatttggattccctatactataatcgaaaacattttcttctccatatatttctgataatctttttccttcttcaaacatagctcttataatggaattatttgcaacaagagatttcattttatttgatatcatttctagccccccgatttatatttaaattttattataatttttgaaagtacattcaatttgattgatatatatagtttatcacattttgtaataataattaataacacagtgatttatttaggaatatattacaattaaatttacataattttagttttaatttggaactcaacttgtaagatttatgtatatattgcaaaaataaaccttcatcataattctaaaaatattaaaaaggttttacccaaaattatgaattgtgcattgtgaattacaatatatataaatttatttttaaaatataatatgtatcttagtgagcgcttagaaattatattatatatttcaatattaatttaagtttagtgaagcttaaaataacgtgaaactttaattaatgtggttgaaaataaaaaaatcgcatgatatgctaatatgtgtacaaaaaagtagaaattttacattaggtattgagatatggtagaacggtttcagtggataatagttattatagattaatataacactatattaattatctaataatgtcagagaagcttttagatattaggtaattatagtcgttaaaaatcaaagtatatatgattttaataaaattaagtataagtattaattagatgacaaagtagaaagaaggggtgttttaaatgaacgaagacaaaaaaattagtttattacagtctgttggagtgaaaattttctctggatatttcataatggcattagttggaattgggataggaatagggataaaaactagtacgacacttacggctatagctgtaggaattgccgttatattagggggcgcatttgtagttacaacattaggtaaaataattacaccactacatgaaataaagaagttagcagaaagaatgagcgaatatgatatttcaactaatattacaattacaagaaaagatgaatttggatttataggacaagctttaaataaagctcaggataatttaaggcatatgatagaagtgtgtgcagataacgcaacaaatgtgtccgctttaagtgaagaagcatctgcggttgttcaagaaatatcaactagtttggaaaatataaatctagagtttgaaaaaatcgattcaaaaacacaagataatagtagcaatgttgaagaagtatatgcatcaattcaacaagtaaatgccaatatggaagaattagaagcacaagcggaaaaaggtaatgataattcaaatggtataaaggaaagagctaaggctgtagaaaaaaatagcagaagagcaattgaaaatacagcacttgtatataaccaaaaggaagaacatataaagaaagcaatagaagaatcaaaggtagtagaagagataaaagtaatggcggactcaatagctagtatagcagagcaaactaatttgttagcattgaatgcagcaatcgaggctgctagagcgggtgaatcaggtaaggggtttgcagttgttgcggaggaagtgagaaagcttgcagaggagtcagcatcatctgtaattactatacaaaatactatagaaagagtagaaaaagcatttaataatctttcagagaatagtaaagaaataattggctttattaaaactaatgtaaaagaagatttagaaggatacggaagtatcgctttacaatatactaaagatggtgagtttgtaagtgcaatgtctaaaaaaatagccgagatgtctgaacatgtaaatgcatcaattgaacaggttagtgcagctatatcaaatactgcaaaaaattctgaggaggtttccggtagtacacatagcatacaacagggaatagacgatacatcaactgctatgaaacaagtagttgaaacaataagtaaggaagctattaaggcagaagaactaagcagtattatttcaaagttcaaactataggatatataatataatgcacaatgaacaattagtataagattgtcattgtgcattaaaattttactttatattaagatttccactttcagtagtaatatttataagagaactttcatcgccggaagataatttatcgttaggagaatttaagcttccagatttcgtttcgtagtttattttatagcctgagccttctggtatagataagtgtatggatccagaatgagagcttaaagacatattgttcaaggaattaatcattctcaaattgatatctccagataaagtatttccatttatacttcctaagttaccatttccaataatatcaccagaagaagaagatagtttggtttcagttgatgtttctatgttatcaaaggttatatttccgttggaactatttaagtctaaataatttaaaaatgaatctgaaagagctatagatccactagtagatgaaagattaagtgtatttaatgataagctagaaatatttatatcgccgctgcttgtggttatttttaaagtgctcttatctttaaaattataaggtatacttactgaaatacttgcgtcactgggagtatcatatctagcgttgaaagctaatctattaccactttgaatttcatacaagtcattagaaatattattgttgcttttgatttgaatttttaaatcatcaccatcataatcaacgactttaatatcttgcgagtttaagctgaagtcgatctcattgacattatcatttaggacataatctttagacagatatgaagtattaaaatccaagttgaaattgttaaaattcaaattatgttccaaggcactggggcttagatgaagttcatcggcgtagttagaaagtttgtagccactttgaactagagcaatgcatccagaagtataaaatgtaatggatagaagtaatagtattaacataaatatcttcatattagaagaaatgaatttctttttcatagcgactccccacctttaaactttaagaacttatatgttttagccaaaattaatatgagaaatttgcagagatagaaaaatataatcattaaaagcagtgataatgagagtgaacctaaagaaaatagtactattaccgggtatggaaaattcgagacaaatgctggaatattaggtagcgtaaaaaagtttgtaaaagttccaccaattagtactccaatactagcgataaaaatacttattgctattcccaagagtccgataaagcagccaataacaccagttataactggaaagaatattactaaagataagattacaataaaaaattttaagataatatttatattgaagttagaaatcttatttttagatttattattaaaaatactcattatttgacgcatattaaaattaaattctgagatgaaggaaatatgattactgcgtttaaagttattctcattattgatattatattttgattcttttaattcagcacatttataattgcttttttgaatatcaagtgatatattttcattatgaaggtcataaaaacaatcatttgaagcataagaattattagacttaaaatcattaaagttggaatcagtttttaaatcgttcttgttttctgaatagatattactgaactttttatcagttttaaaattgtgacatgcattgatatgtttattatcagtgctcacatcagtggcatctatgttagaaatctcgtcgctagtttcagtgctagcattattagttaaattatctaaggtaatggtaatatgcaaatgttcatttctaagtttattaactattaaattaggatcacctaattcctttgctatatcgtcttctgttcttccaacagttaatctagttttaaagtaattttcataataagaaataatatcttgcagctttatttcaggaaagtcttttaaaccatccattaaaatgttgaaaaattcattttgggtcattacaataaatctccttttacctaacttcagaatatatttcctgattaaaagtatatgataggaatgaaaagatcacaagatattactttatactttaatgttttattaaggtgttgtaacttagaaattaacaaagtattaagaaattcttaagtatgcccatagtattttattggtagtgctattattatccacataaatatgattaattataaaatcgaatttcgtaattatacgcgtcaacaagaagttttgtgaataaacttgtggacaaacttaaatgatataaaataaaactaaggcttagccttgtaaatataaggcttgtttatactgtggataatagtataaaatctgtggataacttaattgtcaaatatgatattcaattagttctttatgaatgttttagaattaattatggacttgatttcaataaatatggagataattgattatagagagagaaatttgtagaaagtctttcctaacaatttttcgttgagaaatttaatgatatgtatttataaacaatatgcacatatttgtggataaaaactgtggatattgtggataaataaaatttaactttaagaaatacgagaaagtagtataatataaatagtaattaatggaatttaacatattgtatgaagataagtgatttattttaaaaatattataattataagtatatatgcgaaagataattttaatttagaaaatttttaatagaggtttaatttataggaaagtataactataaagacaataaaagaaaaatgtataactagagaaatttattataaaaatctaaccgatagttaatggggaggggataaaaattatgaccaataaagatgttaaatatattcctcaaataaagggtacgcttaggaatcatgtaattgaggttccagcagttataagaaattgtggtggaattaaaatttttgggaagagaataaaatcattgctatttagtacagatgtagcattaataagaaatagcaatgctgatgcaattattgcggtatatccatttacaccacagcctgtaataacacaggcacttgttatggcagctgatgttccggttttttgtggcgtaggtggaggaataacacaaggaaaaagagttgtgaatttagctatggatgcagaatttaaaggtgctatgggagttgttgtaaatgcacctacgagtaatgaaattgttaataagattaggtcaacaatagatataccagtaatagtaacggtcatttctgaagatgaagatgttactaaaaggattgaagctggagctacaatacttaatgtttcaggtggaagaaataccgctaatatagtcagaaatatcagaaagagatttccagagtttcctataatagcaactggaggaccaactgaagagtcaattaaagagacaattcaagctggagcaaatgctataacttttacgccaccaacatcagcaagtattatgggagatcttatggatgagtataggaaagaataagaacttaataagcttgggttttataccattaatttaaagttaaaaaagtattgctttaagtttaatttatggtatcatatttgtaacagtttaataaaatgatattgtgcagataatgatttataatgtcattaatattaaaatattaatgaattctaataatataatatataacatgacctggggtagaggtgctgcaataaatagtaggtatgaggagttggcaaacgttgatttatactaaaaggtattacagccgaagaaaatagattattatgcgataatctttttctgggtattcatagaatatgtgaataactgtcacgaagagtgttgagctacaaggtacttttttcagttataaattaacagtttgaaaagaataataatgattttgttagtatagacgttcaaattcatttattaatcttttgcgaagaattgataattaatgaaaatattgtgcataaatttagcgtaaagatctaccactcgtcacagatacactctgtggcgtttgttttttattataattattagttaatacaacagcaataatccggaggcaatgcaaaaaacggatattttttattgaaattggtgttgtgatttattttaatcaatgaagcaatagctaataaaatataatttgggggttaatcaaatgaagttgtttggaacaatgaaagtagaagacaatcaattaatgattggaggcatcagtgctaaaaatttagtgagagaatatgggagtccgttatatgtatttgatgaagatttaataagagaatactgtagggattatagaaaatatttcaagtgcgaagagaataataatagagtagcttttgcaggaaaagcatttttgacacttcaaatgtgtaaattattgaaggaagagaatatgtgtcttgatgttgtatctgggggggaattatacactgcatataagtctgaatttccacttgaaaaagttatgttccatggaaataataagactctatctgagattgaacttggcgtaagactaggtgtaggtaattttgtagtagataattattacgaaatagacgcattaaatgatatagctaaagaatataataaggtacaaaatatttatttaagaataacaccaggtattgaagcgcatactcatgattatataaagactggacaaatagattcaaaatttggctttgctccagttggtactgtaatagaagatgctattaaaaaagctataagtttagagaatataaatcttgcaggaatacattgtcatataggttcgcaaatatttgacttagagccatatgaagatgctgttgaaataatgttagaacttgtgagaaatacaaaggaaaacctaggttacctaataaacgaagtagattttggcggaggttttggtatatattataccgagggagacgaaccaagaagtactgaagaatattgcagcacaataattaataaagttgatgaagtgtgtgcgagaacaggtcaagaaaggccaattcttacaatagagccaggaagaagtattgtagctaatgcaggaacaactttatatactgtaggatcagtcaaggaaattccgagtgttagaaaatatgtatcagtagacggtggaatgactgataatataagaccggctctttataatgcagaatatgaatgtattcttgcaagtggagttgaaggagatagagaagaaacagttacaatatcaggaaaatgttgtgaatcgggagatatattattagaaaatattaaaattccagaagttaaaagcggagatattctagcaataatgactacaggagcatatggttattctatgtcaagcaattataatagaataccaaagccagcggttgtaatggttaaagataatgaaacaagacttatttgcaaaagagaatcttatgatgatctattaaagaatgatgttgaatagatataagtatttgaatatgtttaagtaagaatttaaattatatagatttcctaaaaggattatgcactaatttttaagattggtgcatatttttgttataaaattaacatcttataaatattttagatagtaaaatatgttatactaatatagcatattaaaatatgcacattagaaaaaagcgcgaagcgcaaccaagatcattttaatttagaaaaaagcgcgaagcgcaaccaagatcattttaattagaaaaaagcgcgaagcgcgatcaagaactttttaagtgaaatgatttatataattaaggattatgaaaaatggggtattaatgaaaaattatgtgtaatttgggatatggaggtaatattgtggcagaaaataacgaagatgaaattgtagcagataaaaaagaaaaaaagaagtccatattaaatgaatggataattgatattgcagttgttctttgcatagcacttcttgtatggaattttgtgggatacggtgtttggattacaagcggatctatgattccaacattagaagttaaagacagattgctagtgactagagtacataatcctaaaaatttaaaagaaggagatattgtattatttaaaaatgacgaatttaaaggggaaattttaataaaaagattaataggacttccaggagatgttatagaaattaaaaatggtgttgtttatagaaacggtcaggagctcaaggaagactatgtgaaaaataatgagatatacaatggaagttttaaagtaccagataataagtatttcttcttaggtgataatagagctaactcagatgattctaggtattggaaggatccttatgttgatgaatcatatatagaaggaaaggctcaagtaaagtattatcccataaaagattttgaaatattaaagtaatatgagttaaattttttataaagtgtgaatactacttagtatgtggtataagataaacgaatcttgcaaaagggagaacatttaatgaatgaaaatgattatgtaatggaatcaaaggacatagatttaaattgttctgataacatcactaataagtcagataacgattttctaaagaaaaaattagacaaaaaagagaataaagaattgctatctaataaaaatattataggaagtttttcgtttgaaagcactttctttagagagtggataattcctataatagcagctataggaatggcttttttaataaataaatttttgatttacaccgtatatatacctagtgaatcaatggttcctactttaaatattggcgataaattaatagtaactagaatttatgacactagtaggattaatagaggagatatagcagtattctattcaaaggaacttgatgaggttcttataaaaagagttataggtcttccgggagatcacattgaaatacacagcggtactgttactgtaaatggatcagatattaaagaagattatgtaaaaaataatgaaaattttgatggggttttcgatgtgcctgaaaataagtttttctttttaggagataataggagccgatcaaatgatgcaagaagatggattaatccatatatagatgcctcaaatatagaaggaagagctgtattaaaattctatccatttaaagattttggaagcttaaattaatagtaagacttaagaatataatatggtgcaagatagactagcaagctcacttgttattttttagtgattactaagagttattggtgatattttcatagatatactgtataatttaggtgattagaggaaaacttacttgcgttcgctctctaagtaagctattcactattcttggaattaatttatactgtgaaaagaggatgctaagtgagtgaaaagtatataatagatagagtagaaggaaattatgttataattgaaaaggaaaatggggatatagataaaatatctattaggaatgttacaggggattttaaagaaggagatattttaattaatatagataataaatattttaaagtagataaaaagtccacagaaattcgcaaaaaacaaatagataataagatgaaagatatgtgggaagaatgagctgatttatgaatattaataaaatataaatttaaaatcaattcagatataattaagtttgatatttagcctaacttgtaacaaaggtgaaaaggtaaatgaaatgctatattgtctgaaattgtgttacttatataggaaattgatgaatataaaagtagtacagtattggacataatgattaataaatataatgggaaggtgattagatgcagaataataataatggtaataaaaagaataacaaaaataagaattcttttactatagcaattacttattttttaatagcttttgcatttttgatggcgtttaattatgcaagagaagaagctacaacaaaagagattacttataacgaatttctaagattgcttgataataaagagatctctaaagttactataactacagaaaacttattaataacgccaagtgaagataatgaagagtacaaaggaaaaactttgtatacagcaaatgtaaaggatgaaacattaataactaagcttaatgcagctggtattgattttacaggtaaaaatcctaaagaatcaccaatgatgaatattctccttacttggatattgcctatggttcttatattcttcatgtggagatttttattctctaagatgggcggaggcggaggcggtgtcatgggcatcggtaaaaataacgctaaggtctacatggaaagtgaaataaaagtgacttttgatgatgtggcaggtcaggaagaagctaaagaatccttaaaagaagtaatagatttcttaaatgcgccagctaaatatactgaaattggagctaaattacctaaaggtgttttacttgtaggacctccgggaacaggaaagactcttattgcaaaagcagttgcaggagaagcaagagtcccatttttctcgctttcaggttcaagttttgttgaaatgttcgttggagttggagcatcaagagtaagagaattattcaaagatgcagtagctaaagctccatgtattatttttatagatgaaattgatgcaattggtaagagcagagataatcaaatgcaaagtaacgatgaaagagaacaaactttaaatcaattactttctgaaatggatggatttgattcatctaaaggtgtagttttacttggagctacaaatagaccagaaatacttgataaggctcttttaagaccaggtagatttgatagaagagttatagttgataggccagactttaaaggaagagaagctatacttcatgttcatgcaaagaatgtaatgctaggacctgatgtggatttagctgaaatagctaagagtactccaggtgctgtaggggccgatcttgcgaatatcattaatgaaggtgctttaagagctgtaagaagaagaagaaaaacagttcttcaagaggacttaagagaagccgttgaggttataattgcaggtaaagaaaagaaagatagaattctatcacctaaggaaagagaagttgttgcattccatgaagttgggcatgcacttgttgcagcgatgcttaaaggagcagatcctgtacataaaataacaatagtacctagaactatgggagcattaggttatactatgcaattaccagaagaagaaaaatatttgacatctagagaagaattaataaatcaaattactgtaatgcttggtggtagatctgctgaagaggaagtatttgatttagtttctacaggagcttcaaatgatatagaaagagctactcaacaggctagaagcatggtttctatttacggaatgagtgatagatttgatatgatggctttagaatcagtgcaaaatagatatctagatggtagagctgtcagaaactgtagtgaagagacttctactattttagatgaagaaacactaagaataataaagcatgctcatgcaaatgctagacagattcttagagataatagagatttattagataaaatttcggaagtacttttagagaaagaaacaatatttggagaagaattctttgatttagtctatgaaaaatatcctgaaatgaaggaagaaaaagaaaaggaaaaatcagagaacgaaaagagagtaaaagagttagcagaaagaagagctaaaaagcatgctttagatattgttatagatgataagtctgaaaagtcacaaagagattttcaagatttagcgaaatcagaattaatagcaagtaatcaaacatctataattatggaaagtgacgctaaggcagagggcgcagctgaaaatattaatgatgatagatttatatctaaagaagaggaaactgctaaaaaggattctgaaactgataatatttaaagaaacaagttgacattaatggcaggtttcaagtgataagttaatgaagaaaagccatcggctcttcataagataatacttttagaaatagagaactataaaaatgtaaatatagtatttaatgcacagtggaggaatgaaacctaaaaagagtttttagccatacattgtgcattttatagtttaaatgtataattaacaatacaaaattcatggaatttgtgtgaaaatattggcataagggtataataatatttcacaggaagaaataaaagattagttattggtagttaatcaccctatataatacttcaaggtgatgaattaactgcctattgatctaagggggtcacaatattgagcaaacaagtagattttataagagaagaggaaaagctaagtgaaattttagaaattctaaataaagaaattttaaagtatttagaaaaaagaaagaatgtcacaagctatatccttgaggctagaaaaaaatacgttgaggaatataaagatgatgaagaccagattatagattattttgatcatgaaaattatgtgaaggaagaagcttatagaacaattgacaaaaggcttatggaatatacaaagcttaaggaaataccttatttcggaaaggtttcgtttaaagaaggagaagacattccagaagatatgtatgtgggtagatatggattgacgcttgaaaatagttttgaaccattaattgttgattggagagcacctattgcatcacttttttataaaggaactcttggtaaatcaagttataatccaccttcaggagaaatagaagtagacatattatcaagaaagcaacttgtaattaagaaaggtcagttaaagggagtatttgattcagccatagatgttaaagatgaaatactacaaatggttttaacggataattcatcagataaattaaaagatatagtaatgactattcaaaaggaacaagatgagattataagagaggatagaaataaaatagttgttgtaaatggggttgctggttctggaaagacaactatcgcacttcatagaatatcatatttactatacaattttagaaaacaatttggagataaggtattaatctttggacctaatgacatttttatggattatatagctcaagtactgccttcgcttggagaaagtaatattaaacaaacaacctttgaaaattttgcaaagaaagaaattaatttaaaatatgaaaatgtaaagagtttcggtagctatattgaagatgctatgaacggaaaagatgatactttagaagaatatagatataagagctctaaggcatttgttgatttattaaattctaatttagaaattttaaataaagaatattttaagatacaaccaattagatttaagaaagaagagattgttacagctaaagagatagaggaactatttacaaattattataaggatatgcctttgtttagaagaagtgagaaaataaaaagaatattaatatctaaaataaaagataagagagatgaagaagtttataagataaatgctgagtttaaagaaaagattagcagcttatcagagaatgaacttgaaatagaaaaaaataatctagaatatttaaaaagaattaagataagagaaattgtaagagcggttatgaaatctcgtgatgaattagatacttggattaagtacgaaccagtaatagatatttataagaaaattgttaatttagatactgataaaaactatattaatgacttagaaaatattaataatgaagacttaggtgagaataaagaaagactaagctatatggatttatctggcatactttatttaatgattaagttaaaaggtataaaagtaaaaaatgagataaagcatattgtaattgatgaagcacaagattatagttttattcaatttgaaataattaaagaaataacaggttgtaagagttatacaattgtcggtgattcaaatcagagattaataacaactagtgaagaaccagcaatgcttcaccttgatgatgtatttaaagatcttaatgtggagattacaaagtatgagttaaataagagttataggtcaactcaagagataatggaatattcaaataaattcttggataaagacaagattgttccgttggttagaaaaggagaacctgttattgaagaagaagtttataataatgaggaatttgttgatacaataatatcattaattgaagattatgaagaagagggatacgagaatattgcagtaatctttaaggataaaaatgaattgaataaattctctcatgttattaaagaaaagatcaatgttcaaagtttagataatgatgatattatgtataagggtggaaaagtacttctaccagcttatttagcaaaaggattagaatttgatggagttataatagtagaaagtgaagagatcgaaccgttagttaaatatataatgtgtactagggcgttgcacaggttgtctgcagttaagtatttaatatagttacattataaaaacttaactctcaggccttattatcttaaaagctatacggctatataaaataaagaattttatatagaatgagctatgctatctaaagtttatatatactaaactagataatcaattttaaataataagtaggcggcaccgataacatgatatttatgatggtgccgcttttattttttattatgtgaataatttttcataaagtatgcaaagtgaaaaattataatataaatttaatgagaataaaatttcataattttttgtgaattttaaattatagaaatactaaataaaatttttttataattttaaaatgattaaaaaacgcttaaagcaagct

SEQ ID NO: 8 - DNA, 121086 bp, Clostridium beijerinckii
tgataatagttagtagtgtggagttaataattaaaattaattattaactccatttcttatatagaaaattttagattttttatgaattaccaaaatttaaaatattaatttattgctttaacacaggtatttaaaagtaactgtataaaaatttgtgaaaaaattataatttaatgcaaaattttcatatgaagaatcgtattatatttagatagtataaaaaataactcattattaaagattggaggatatttatgaaaaagaaaggtattataagcgggatattaacattatgtttaatattgtctactatttctattccgacatttgctgcggatgaagatagcaaaaacttagagcaagctatcatatcagcaaagaaaattataacagttccagatgattatacagagtttacacataattcaagcgaacgtgaagttagggggacaaaagttagaatttgggatttaaattgggcagaaaaagaagataagaaaggatcaatatctgcatcaataggtgaagatggattcttatatcaatatagtaattattatggggatagcaaggagagcaaagacggtttagcaaatattacgaaagatcaggcccaagtttcagcagaagattttttgaaaaatgtaattccagaatatattggagaaataaagttagtaaaaaatgattcagcttcttttcaaggagatgagtataactttacttatcaaaagtttgtaaatgaaattccggttaactatatttatataaatgttggtgtaaataaatacagtgggaaagtgacatcatttagcaatgacaatttagaagtaaagggagctgaatatcctaatttaagtgggataattgattctgttactgcagaaaaagcatatatagataaaataggtatagatttaaaatattattcttattatgattatgagaagaagaaaatgaatatatttgcaggatatgctccaagtaatataagtgaatttattgatgctaaaactggacaagtagtatcatattcaagtgataataaattagatgatagaaataaggatcattcattagtaaatgcttctgcaaataatttggataaagcaaatcaagagttgacacaagaagagatggatgcgattcggaatgttgcaaatcttataagtaaagaaaaggcagaaagtatacttagagaaacatctgatttaataacggctgatatgaaagttagtgatgcatcattaaataaaaactatcttgatgatgaatattcatggaatatttcttttgacggtgtatatggaagagtgaatgcaaaatctggagaagtaatatcgttacattcttataattataataaacttggaacaagtggtaatacttctaaggcagatgcgcaaaacacagtagaaaactttttgaaaaaagtagcacctaataagtttacacaaacaaagtttaaggatataaataatccaattttaaagattactgatagaccaatagaagaaaatacgtttatgtttaactatgtacgtcaagtgaatggaatagagttttctggaaattacttaaatgttgaagtagataagaatacagggaaaatcattggttatgataataactggtatgataatgcctcttttcctgacattagtaatattataagtaaggaagctgcatttaataaaattaaagatttagcaggattctcattacaatatacaatgttagatccaaataaagttggaatagtgtatgactttataaacaagaatgatagctatattattgatcctataaatggtataaggatagattatagtggaaaagcatatagagaaaataaattaccagaatatacagatataaatgggcattggtgtgaaaagacggtaaaagagcttttagataatgggtattatatagatggagaaaaatttaatccaaatatgaatattactcaaatgaatttctttaaatatatatattcgccagtaaaaaataactatagcgatgatgaattttatgatatgttaattcaaaatggagtaattaaagatgaagaaaaagctccaaattcagtagtatcatataatgatgccgcaaaatttattataagatacctaggatatgagaaattggctggacattctgaaatatttaatagtccttttaaagataatatagaagacgcatataaaggatatgcatcaatgtgttatgctcttaatatcattaaaggggatactaatgggaactttaatgggtcacacaatataagcaatgcagaagcagctgtaattgtatataacctaataaagaataacagaaaatagatttaatgaaagtgctaatctttttatgaggattagcactttttgttggtgtagtatgaaatgtggaaataaagtcaataaattagtataatatgatgtaaacaacatattttatatgtgaaaaagttattgtttagaattgatattacataaggggagaatagctgatgttaacatttatttttttactagcatttcaggggttttcaggtggagtagctggatatatcacaaataaatatgcagttgatatgctttttaaagaatatacacctttaaagctaggaggggtaattaaaaagaagaaggagaaatttattgaagagattagcgaattagtagaaagagatataataaatgcagatacattaaggtccgaaatgcctaatataaatataaatacatatattaaacaaatggctcaaactttttttgagaaacaattaagcaatagtttaggaaatactaaaatagctgaaatagatggtttctcagagagcatacttaaaagtgaagaatttataagaaataatctaaatatactcttaccagaattaatagatggtcttatgcgtaatgttgatctacaagatatattaagtgaaaaacagatatcaaaagttataaattcatgctatgagctactgatttgcgaatttgaaaatgccgatgcagtgaatggatttatttctgatttatacaaggaaaattctaatattactttagctgatattttttctaaagaagtccagaaaaaattaactgataatattattgagtgtgttgaaaacatatttaataacgatattttatcagatgaaaagtcgtgcaagatgtttttggacaatatgctttcaaatataaatgtagatgcaacgcttgtcaaattacaagactctatcggaagtcgggatattaatcattttattacggaaactcagcaagaagaagttatttcaagattattcattaaaattactgaatttattaactcttctgaaggaaaggatttaatattaaaaattacaaatgagattgtttcaattgggaaaaatattgattttactatttatgaaatacttcctaaagagatgaaaaaatcacttacgaattttataaaaatagctattcctaaggtcatgccttatattttggagtggatttcaagtaataaatcatctttggatgaaatgattgaatccgcaattgatgaagcgatacaagatatagatgaaagcataaagaagcttataatctcaaaggttaggaatgcacttatgggagatgtttcatctaaaaacaatattgttaataaaattataagctatattaataataattttgatgatgaatcaagtgataaaatagtaacttctattatagattacttgaaggacacaaaggttaaaaacatagtagaatcattggaaaaatacaatttagctacatctgatgatgttgctgaaattattactaaagtatttgcagctcatggaaagaatacgttgaggatactaataaaatctcaattttcaaagaaagtaaatgagattgctaagttagatttgttaaaattattcaatacaaagcttaagccaatgttatatgaaagtatttttaaaaacaaaacgagattatgtaaaaacataaatactttgattgcacaattcataaattcaaagagtgatgaaatattccacaaaaaattatcagaattatttaaagataaaagtgtatttagtttatctaataaattttcaatatgggctaataatttgctcagaaagaacaaagatacatatagcgagaaattagaagaggttatattatcaaatgttaaaaaacttaaaataggagatatattatcaaactataatgtgaacatattggaatatattgtggataattcagtatcaatttatagagaagctgtggataaatataagaattatcagattaaggaattagttaataaaggatttaataaggatcaattatcaaatattcttataaataaaggttacccagcattaatatctaagcttccaagtctattaaatggaaatattaaaaaaattgcaaaaaatagtttaagtaaatatgacgaggatgaaatatgcgatatagttcaagattttatgggaagtcaacttaaaccactttctgtttttggtgctgttttaggtactgtagttgggataatatatcaattaatatttccaaattctattggactttacggatttccaagtaatatgtttaatggattgttgtcacttggagttatggcatttataggatacataacaaatgttgtagccttgtggatgattttccatccatacaaagaaaataaaattatatctaaaataccattttttaagaagtttgcattaggatatataccggcacataaaaatgagttcgcaattggaatggcgaaactaattgatgaagaattattaaacaaagaggaaattaataaaagtttcaattctcataaggataatatgtcttcagtactaactaccttagttaaaaataataattatcaaattttagttgactttgctagaagtaaaaagaatgattttgtaaagtatatctataaaataatcttaaagtattgtaatagtagttcaggtttatccgaaggaattactaacagattaaaagaaagcaaatttgataattttatcaaggaaagttacattcagaatggaatacctaaaataataagtagtattagtaatagtaaaagttctttaacgaagtttatagaaaataaaatatcttcaaattacaaaattggtgatgttatttcagaagatatacttattgaaattcaaagttatattcaagaggaaggcaataagcttatacaagataatcttagtactattgaaaaggtagattttatagatttaattacaaaagaatacaaagattattattctgtagcgataaaacaatcatgtaaagaggttataggtaaagattctatagaaaaagcaaaagttaatatagggaaatatgcatatgaatatttttctaatgattttaaaatatatttagaaaatatgataagtaaatatttatgtaatggcttagatgaaaataatgatgtgggatcaatgtttgatggtagagtcaagaatgtaattgataataatctgcatcctataacgtcttatttttcaaataaattaattgtttacttaaaaaataatcagaatattataactgaaaatgtacaagaaactattaagagtgaacttaatttctttgagaagatagcctacgcaacttttggtggagatgacatagcatatagagttgttgatattatactaaataaaaaacttcctttaatgctaagagaagagaacgataaacttattaatactacaaaagctgcattaaatgaaagtatataccctattagattgagtgaattaaatataaagggtgaagaatttaatattcgaatattaataaataatttatttgaacaatttgataagaatgttgactttgaaggatatatttataatgcaagtgatttaattttagattcattagctgtggctccactttcagaatatcttgaattatttggattaagcaatttagattcgatttataagaagttttttgaggaagtcaatattataaaagaagatatatatagaagcataaatattaataaagataaattatctataacaatagaaaagttctttaatgaaaatatgttgaaaaatttattcaacattgaatttaattctgtattattaaaaggaattgatagatatgaaattgaaaattgtataagtaatattttaagcataattattgagagcgaagaatcaaaaaaatcgatatctatgtttatggaaagtttctatgaaaatacattatcggaattaaagatagaacaaattattgatgtaagtactctaagcaatgatcttgatagggttattaaatatattttcgctaatgcagaatttaaccaaaaaattatgattgcaattgatgctatagttcaaaatgcaattaataacaacttttactttatatcagatagatctaaggattatcttataagtaaaactattgaaacaggtttaaattcagttggtgattatattgtgccaatattaaggaaaataaatctaaagaatatcagcaataagcaaattgagctgctcaatccaaaggaaattgatgtaatgttcaattcctttgcaggagactttttcaataagcttcgcctttatggagtgtttggatttgtatttggtataaatgccggattatcatttatattatggataattgattggagatatagtaagaaatacaatgataaaaattcaaaggctttgaaggaaatgtagaataaaataaattgtatatagtattggaaacaataagaatattcccattcagaattaattatgttagaatagggatagcaaataagaagtatagcaattagagtttatacttcttttatttatgcataagcaaaaagtgggttcctttagtatttgaaatactaaaggttttaaattctttaaatttgacaaaaatttaaaggcaagcatttatggagaattgcacatatgatggtgtgttttaaggaggaaatttattaatgaataaaatttcagatgatatcttatttaaagttgaaaaaccaagtagatacactggtggagaattaaatgagattgttaaagatctaaaggaagttgacataagatttgcattttgctttcctgatgtttatgaagtaggaatgtcacatttaggaagcagaatactttatcatactataaatcaaagaagtgatacatattgtgaaagatcatttgcaccatggcctgatatggaagaacagcttagaaaaaataatattccgttatttacattagagacaaaagattctctaaaggagtttgatattttaggattcacacttcaatatgagatgagttatacaaatattttaaatatgcttgatatgtctggtattactataagagcatcagaaagaggagaagatgagccaatagttatggctggtggaccttgcgcatataatccagaacctttatatgatatcattgatttctttgaaattggtgaaggcgaagaaatgatgaatgatgttttagatgtttataagaagtataaaggaaaaggaaagaagaaagaatttctaagagaaatatctaaaatacaaggaatttatgtgccttccttatatgatgttatttacaatgaagaaaatacaattaaagaatttagacctaagtatgatgacgtaccaaaaactattacaaagagaattataaataattatactaaggtagattttcctacagatataatagttccctattcagaaattgttcacgatagaatagttctagagttattcagaggatgtacaaatggatgtagattctgtcaggcaggcatgctctatagaccagttagagaaaagacaagggaagatttaaaggatttagcaagaaaattagttaaaagtacaggatacgaagaaatttctctttcgtcattaagtacttgcgattattctgatataaaaggattaattacagatttagttaatgagcatgaagacgacagagttggtatagcacttccgtctataagagttgatgctttttcagtagatttgcttaaggatatccaaaaggtaagaaaaacaggattaacttttgctccagaagcaggttctcaaagaatgagggacataatcaacaagggtcttactgaagataaaattttagatgcagctacaagtgcatttgcagctgggtggaaaactttaaagctttattttatggtcggacttccatatgaagagcttgaagattgcagaggaattggggaattagcagaaaaaatagtatatagatataaacaagtgcctaataagataaataataataaaggtttaagacttacagtaagtacatcaatacttataccgaaaccatttactccattccaatggtcaccaatggcgaagtttgatgaggttactgaaaaaatcaaggctgttaaatcttcaattaaatcaaaatgtatagtttataactatcatgagcaaaagacatcagtaatggaatctgtttttgcaagaggggatagaagattatgtgatgttttaattaaagcttttgaaaagggtgctagattcgacggttgggatcaacactttaaatttgacgtatggatggaagctatagaagagtgtaatttagatgtagatttctatgcatacagagaaagaagctatgatgaagtattaccatgggatttcattgatattggagtaaatagaaaatatttagaaatagaaaatgaaaaagctaaaagagcagagttaacacaaaactgtagagaaggatgtacaggatgtggaattaatgtgaactttaaagatggggagtgttttgaaggtgcgatacttaactaaatttactaaagaggaaaatattaagtttatatctcatttagatgtgcttaaaactattcaaaaaaatattagaagagcggggctacctatagaatactctcaaggatttaatccacatatgaatacatcaatagcacagcctttatcagtaggagtatattcaagtggtgagtatatggatatggtgttaacaactgaggtgaatgaaaatgaaattgtggataaattaaatgagaccgcgccaagtggaataaaatatataagtgcacttgcaattccttataaagaaggagaaaagaaagttcctcaagctatggctttaattgatgcagcaagatatactataaaaattaagtattctgatgtctcaaatttagaagaggaagttggtaaacttttagaaattaatgagtggaatacagtcaagaaaagcaaaaaaggtgaaagagaagtcaatataagggcttttgttaaggagtttagtttctgggttaaagatgagttcttaattcttaatgcagttataagtacaggaagtagggaacatttaagtgcagatttacttgttagttatatccaagaaaaaacttcaaatgcgattttagattcgtttgttaataccaaaagagaagaaatgtatttttacaagaataataaacttgtaccattatataaatgtgtataaatatataattcacaatttacaatgcgcaatacacaattaaggaataaatctcttaagagattttaaaaattataataaatgcaaaatactaaggtatcaaattatatgataattagattttcaaaggaaattgctcactaattgtgcattgtgaactgtgcattgtgcattgactaggatgtgttatagaatgaaagagatttttgttgagagaagagaaagaattttaagggtagctattaaatctaataatgaattaatagaaagcattgttgaagaaagcaagaatgaaccgataataggagaaatttataagggaagaattaaaaatataattccggctataaactcagtgtttgttgatttgggtttagataaagaaggttacctatattatagtgatgaattaaaggcaaaaggaataaaaaagggagacgatatactagtagaagttttaaaagagcctcttaatgataaaggcgccaaattaactgcaaaggtgtcaattcccgggaaatatattgtcttaaattgttatgaacaaggaatagaattttctaagagaatagaagataaagaaaagaaaatagaactattgaggaatattgaaccgttaaaagatgtttgcataacagtaaggacagaaggtgcaaatgtagatataaatattcttaaaaatgagatttctaagctttatgatgaatttcaaaatatagataaaaaaatgaaacattcattaggagtaagaaagatttatggtgaagatttaacattaactaagcttttgatgaatttttctggagaagaaattataaaaatttatgttgataatagcattgattttgataagatatcaagctttgccaaaggacaggaaaatttaaaaatagagaagtatgaaggatatagaaaactttttgatttttatggaattgagaaagaaatattaaggttgaggcataataaagttaacctacaatgtggaggatacatagtaattgatagaactgaagcaatgtatgttattgatgttaatagtggaaaaaacataaaggagaaaagtttcaataaaacaattttggaaactaatttagaagcggctagagaaataggaaaacagattaggcttagaaacttaagtggaattatagtaatagattttattgatatgagagataaaagtcaaagagatattgtaatggatgcacttaaggaaagtcttaggttagataaaggtaatgtaaagatattcccatttacccagctagatttggttcaaatagctagaaagaggcaaggaaaaagtatatatgaatatatggaagaagaatgcagcctatgtaaaggaagaggaataattctaaagttatcttatattgaagggctaataaaaaatgatatagtaaggatgcaggaagaaagttctataaattgttttcatatacaaatggatagcgtttataaagatagaataagagaaaatatttttgagtttatgaaagaaatagatggattagataaagagatatatctaaattatgtagataatatagaaggatataaaattgaaccactgatatttcaggggcaaaaagataacttaaaagattataaagttacagttatagaaaagtattaaatcagttaacaatcatgctaaattatgtttatatggataaattatagattatactttacaaagtaatagaaatatgataaactggcttttgtagaccgcgcacgtaaggttttatgtaaaacaaagttgaatctttgtaccaaaagtggcgagaccgttatgaggaggtgttttaatgtacgcagtattagcaacaggaggaaaacaatacagagttcaagaaggagacgtaatatacgttgaaaaacttaacgctgatgttgactcaacagttgaattaaacgaagttttagctgtaggaactgaggaaggtatcaaagttggtgcgccagtagttgaaggagctaaagttgtagctaaggttgcagcacaaggtaaggcaaagaaagttgtagttttcaagtataagtctaaaaaggactatagaagaaagaatggacacagacaaccttacactaagctagtaatcgaaaagatcgaagcataataaaattatggttaaagtaaaaatcaaacaacataataatgatattgttggattcgtaataaatggtcacgctataggtaatgacagagatttttcaaatgagcctgctttagtaggtgaagcatttgatatgatatgtaattcagtttcagttttatctcaaagtgtaattattggtttggatgaagttttagaacttaattcaacatacgaaatacaagatggatacttgaaattagaccttcaagattttaatctagaagaactaaatcaagctcaagttttattaaaaacttttgaaaaaagcttggaaagtgtaattttaggatttgatcaattagtagggaaaaagaaacgtagagaatatataactttaataaaagaggaggtgtagtcacatgctaattatgaaccttcaattattcgctcataaaaaaggggttggtagttctaagaatggtagagactctgaatcaaaaagattaggagttaaatctgctgacggacaatttgttcttgctggaaacattcttgtaagacaaagaggaactaaaattcacccaggtgaaaatgttggaaaaggtaaggacgatactttatttgctaaagttgatggagttgttaaattcgaaagacttggtagagataagaaaagagcaagtgtttacccagtagacgttgaagcaatagctgaataattattttagaaataaagcactcttagtttaagagtgcttttttaaggcatatgaaagaaaataatgagttaagaaggtgccgatgtctagagtgacagatatcagagaaatagactagcattttagatgttattttctttgatatgccttaatatttttatgataatatatattgagattagacattaaatccaatattatataataaagcgatattttttaggaaagaataagtaataatagaactaaaaaattttatattaagatgataaagtaaaacaaacaaggaaaggtgatttttatgtttatagatacggcgaaggttttcgttaaatctggtaacggtggtaatggtgctatttcatttagaagagaaaagtatgtacctctaggcggaccagatggtggagatggaggaaagggtggtagcatcatttttcaagttgaaactggaataacaacgttattagactttaaatacaagaaaaagtttattgcagaatctggtgaaaatggcggcggttcaaaatgctacggtaaagatggtgaaagtttatatataaaggtacctatgggaaccattataagagaagcagaaactaataagataattgcagatctttctcataaggggcaagaattagtattattaagaggtggaaaaggtggaaagggaaatgttaaatttgctactgctactaagcaagcacctcattatgcagaaccagggatgccaggagacgagttaaatatagttttagaattaaagttactcgctgatgttggattattaggattccctaatgtaggtaaatcaacattgttatcaatgacaacaaaagcaaaaccgaagattgcaaattatcattttactacattaaaacctaatctaggtgttgttgctgttgatggaattgatccttttgtaatggctgatattccaggaataattgaaggagcagcagaaggtgttggacttggaatacaatttttaagacatatcgagagaactagacttttaattcatatagtcgatatatctggtgttgaaggaagagatccttttgaagatttcattaaaatcaatgaggaattaaagaagtattctgtaaagctttgggatagacctcaaattgttgtggctaataaatctgatatgctttatgatgaaagcatatttgaagattttaaaaagaaagttcaagaaatgggatttgataaagtatttaagatgtcagcagctactaatgaaggtgttgatgctgttatgaaagaagcggcaagaatacttaaggatattccagttaaagaattagaaatctcagaagatgaaatgtatataccagaagaaaagagatttacttatgatattactgttgaacataataaagaagagggatatgatgtttatatagttgaaggtacatttgtagatagattactaagtgcagtaaatgtaaatgatgcagattctttaagatacttccataaggttcttagaaataaaggtatttttgatgaacttagagaaatgggagtaaaagacggtgatatggttagattaaatgattttgaatttgaatatatactttaattaatttaaatttaatattatatatttgctatataaaaatattctccttataattgagtgcagtgaaatttaagttataagttgaaaaataacccccagggataattaatgcaacaaatatgttgaaaaattttaggaggaataaataatatgttaacaggaaaacaaagagcttatttaagaggattagctaatgatatttcaccaatatttcaaataggtaaaaatggtgttgaggaaaactttttaatacaagtttcacaagcattagaagctcgagaattaattaaaataaaagttttagagaacagtggtttagaaacaagagaaacttctgatatgatatgtaaagctgcaaaatgtgaaggaattcaagcaataggtaataagatagttttatataaacaatctagcaatttgaaaaagagaaaaattgaattacctaataaataattatatataggaaataattaatagagaagctgcttttatagaagcttctttttttataaaaattaagatattaaaaataatatttaagtttacttcatgatataataaaaaaggaatttttaatatgattataataagtatattacttttggaggaaatcttatgaaacgctttggtataataggtggtacttttgaccctattcataatgcgcatttatatatagcctatgaagctaaagaaaaattaagcttagatgaagtgatctttatgccggcaggaatacagccgcttaaggccaataatataattacagatcctggattaaggtatagtatggttaaagcagcaatagagcactttagcgagttttctgtatcagattatgaaatagagaagggcggacttagttttactcatgaaacattagagtatttcaaaaataagattagtgatagagataaagataatgaattgttttttataaccggagcagattgtttgtttagcatggaaaagtggaaagaagtaaaaaaaatcttttcactagcaactcttgtggtgttctcaagaggaggaataaacaaaagtgatatgataaataggaaacatatgatagaagaaaagtataatggaaaaataattgttttagatttgaaagaacttgaaatatcatcaactgatataagaaatagagtacatgaaaataagagaatagatttttttgtgccagagagagtttcggatattatctataaaaatagactatatagatagaatttcataaagctaatgctctggtgacttatagaaatataagttgattcatttagaaatatatttaattttaggaggaagttatattgttatccatagaagaaatgaatttgtatcttaaatctaatttattagaaaagcgttatatgcatactttaggggttgcagacacagcaaagaggttagcaaaactaaatggagtttcagaaaagaaggctgaaattgcaggtcttgctcatgatgttgctaaaaatttatctatagataaaatgagagaaatgatgaaagaaaataatgttattatctctgagatagaagaaaagaatatgaatttatggcacagtattgttgcaccaatagaggcaaaagataaacttggaattgatgacgatgaaatactggatgccataagatggcatactacaggtaaagaggatatgtccactttaacaaagattatttatatagcagatatgatagaacctggaagaaattttgatggggttgatgagataagaagagctacatttgataacttggataaaggagtctattttggtttgactagtagcataaaaatattattggctaagaacttattaattgatgaaaatactataaaggcacgaaattattttctatttaatcctgaatttaaattataagtattgatataaatagaaatttcgacttatttaatgagattagagaggttacttaatgtatattatattaagtaaagaaaatttataagaggtgggtgcatgagaaggaaaactaataaaaagagagatacagcattctcaaaaatttttaaaaaggataatgattctacaacagtatttgaaaagttagttttaggtattatatctcttataataacttttgttatagtatcaatggtatctggggtttatgctttaatgaaggttgagagcaagtcaatgccaagtggtgcaagtgtatcatttaatcagccagtaaatatcttgttacttggtatggatataggagatccgaagcaggtaaataatcaatcaataaagagaacggatacaataattgtagctaattataatcctcaaacaaaaagtattcgtattgtgtctgttccaagagatacactaataagtataaatgatagaaatgttaaaataaattcagcttatgcaattggtggatatccgaagataaaatcagaagttgaaaatctactgaatataaatataaattatatagttaaagttgattacaatgcttttcgtgaaatcattgatgctatcggaggaattgaaatgaaaatcgatagaaatatgatttatgatgatgaaggtcagaatcttcatataaattttaaagccggtgaaactgtaactctagatggtaagaaagcagaggaattttttaggtggagaaaaaataatgatggaagtggacttgctaatggagatttagatagaatagaaaatcaacaaaaatttatttctaaggttattgaaaaatgtacaagtccttttgtaatatttagagcacctaaaataatgacagcattaggagataatgtagaaactaatctgtcaccaactgatattttaggatatgggtttaaatttattggtataaaaaaggaaaatgtaacaatggcaactgtaagtggaacaccaaaaactataaatggagagtcatttttaatagttgataaaattgaaaataaagatatattatcatcacttacttcatcttctgcatctaataaatcagcagaaggagcagcaaaagatgatataagaattaaggttttaaatgccacaaagattaatggattggcggcaaaagtagcaaaggaattaaatgatgctgggtatacaaaagttgatactggcaatactgaacttagtgataaaagtgaaatacttagtaatgatgctgataaattaaagactattaaacaggatttaaacataaaagaaaatgatgaaaaagagaacaagaaagaatataaagattacgatgtgattataattttaggtaaggattttgaaacctttggtaagtaaagtgaattagagttttgtggtggctcaatgtatgttgcttatttctagtatagtgatgcacataaacttaatagatgtatatggttagtaaaaatacaaagatattagaaggagtattatcgttattgtgcatcatcaatttgacatattcctaaattatactatatgaggagaagataaattatatgagtattttagaaaagcaggttgttaacatagagaagggcactaaaataagagaatatttgaaagtggaacttggattatcaacaagattaattagaagtgcatctcttggtaaaagaatatttgttaatgatgaagttgtaaaaatgaatagagttctaaatgagggagaaattattaaaattgatctggctaaagatgaaagtcaggatatagctccagaaaaaatggatatagatatagtttatgaagatgaagatattttagtagtcaacaagaaaccttttatggtggtgcatccaactaaaagttatcaaagtgggactcttgcaaatggagtaataaattattttatggagagcggtcaaaattgtatagttagattagtttctagattagatatgaatacatcaggtcttattataattgctaaaaatcagttttctcatggaatgctatctaaagaaatgagtgaaaataaggtagaaaaaaaatatttagcattagttcatggaattatgaaagaaaaacaggggacaattgatctaccaatatataaacctgaaggaattgaaaatggcattaggagagttattgatgagagaggccaaaggagcataacccactataaagttgttgaagaatacaatgaatcaagtttagtagaatgcaaacttgagactggaagaacccatcaaattagagtgcatttgagtcacttgggtcatcctatttacggtgatacattatatggagatggggatgaagaagatttaataaaaaggcaggctctccatgcatttggattagattttaaatctccaaggagtggagaaatactttcattaagagcagaacttccagatgatatgaaagacttaattagtaaattgaaataaatttaatatgataaataacaatgtaaaaagctcaagcatctaatttaataagttgcttgaacttttgaattattctattgtaagtatgattccataaaacttcttgataaatttaagaattcttttagagcaggagaaatccatttgtttttgtgataaagtacttgagatattattccgaagtcaggaccttcccaatttagaggaacaagtttaccactatttatttcatcatcaacagcaacctttggaagtaaggttattccaagaccactcattgtaaattgtttaatagcttgaacacttcctgtttctatagctacatttggctttatattgcaactgtttaatatattttctaatgtagctctgtagctacatcccatttctgttaatataagtggttctgactcgatatcttttggaaatacttcttttttatttataaggggatggcctggatatgctaaaagcaacattggctctggaatttcgatttctgatataaattctgctgaattaatttttacacctaatgaaaatgctacatcaataatattatcatttaagaaatatttaaattcagcacaatttccaaattttaaagagatgtccacttcaggatatagctttttgtattctttaaggatttcaggaagtcttaatacacataaagattcagcagcaccaattgttaatgtaccacttggaacgtcagtattaagtacagcattttttacatcacttgatagttttaatatttgttttgcatatggcaaaagtttctttccttcatgtgttaaagttatgtttttacctattctttcaaaaagttttacaccaagctcactttccaaaagcttaatttgtgtcgttatactagattgagcatagcccaggttatcggctgctttagtaaaactttgaagtttacttatcgttaagaaagcattaagttgtttaaagtccatataatcatctccatcaaaataattgattatgttaatagaaattatcaattttactaatatatgcataaatgatatcatacttataatagataagcaaaattaattttaagaggtggttttaatgggagataagttgaaggttggtataataggtgccacaggaatggttggacaaaggtttttatgcttattagaaaatcatccttggtttgaagttacagtgctagcggcaagtaaaaattcagcaggagtaacttataaagaggcaatagctaatagatggaagatgacaacaccattacctgaaaaatataaggatatggtagttaaggatgcatttaaagttgaagaaatctctggtatggtagatttcgtattttgtgcaatttctctaaataaggaacaaactaagttacttgaagaagattatgcgaaacatgaaacaccagttatttcaaataattcagccaatagaaatgtggatgatgtaccgatgttaattccagagataaatggagtacatgcacagattattgaaagccaaaagaaacgtttaggaactaaaagaggatttatagcagtaaagcctaattgctcaattcagagttatgttcccccaataagtgcccttatggaatacaagcctaaaaatattctagcatgcacctatcaagccatttccggagcaggtaaaacttttaatgagtgtcctgaaattattgataacgtgataccatttattgatggtgaagaagagaaaagtgagaaggaaccactaaaaatatggggacaaatagaatcgggtaaaattataaatgctaatagtccgattattacaactcaatgtataagagtacctgtagcaaatggacatttggcagcagtttatgttagttttaagaacaaaccttcgaaggaagagataattagtagatgggaaaacttcaaagttccagaaatagttctagggcttccaaatgctccaaagaaatttttgaaatacttcacagagaataatagacctcaaactaatttagatagaaattatgaaaatggaatgggaatatccatgggaagattacgagaagataagatatttgattacaaatttgtgtgtctttctcataatacattaagaggtgcagcaggtggcggagttctttcagctgaatatttgaaagcttgtggatatttaaatgcaaagtaaatttttataattaatatatatttaaataaaaataaaggaagtcatctgttgcttcctttatttttatttctttaattttatatttataagcttccttaatccaaatactcctgctaaaacaatagcgacagatcctatatagagttctgaatttgcattgtttgacaatgaattaatagaaaggggaaattcatactttctagatgttccagcagctaaatccatagttgtatattctttgtcattgacataaacagtaccttttagtatattatcaccttcattaaatgattgtttgcttaaatcctgatcctgtatttttatttcagaagatactgaatcttcctgacccttaggaacatcataatcaatatcttttgaggcaataacaggtattgtaagattgttagttattttatactgtgaaacttcatcgccttttttgtaaaggtgaactaaagaataattatcaaagccgtaatttaagactgcttgcatatcatgaaagttttgatctttgtcaagcgcatttaaaaatgaagctacaagaacatgtccgttcttttctgcagcagctacgtaagtatgatttgattttgttgtataaccatttttaccgcaaagagcaaaagggtaataatatctagaattcttatttatcatataatttttattgttaagtacaatagtttttgaaggattattcttaagcgttattgtgtaatttggtgtggtagatagttgaacgtaatctttattatttatagcttctcttaaaaataacgctaaatcgtgagcagtagttgtatgttctggatctggtaatccacttggatttttaaagtttgtgtgtaaagctcccagttcttttgctttttcattcataagtttagaaaatgcttctgtgcttcctgatatgtgatcagctaaagcatttgcacaatcgtttcctgattccaaaagaagccctaaaagcaaatcgcgaacagttactacatcaccttttaataaaccaacagcagttccatctattttggtgaaatcttcttgaactgtcacttcatcatctagtttacacttttctaaagctataattgcagtcataaccttagtagttgaagcaggctctaaaactttttcttcatttttcccatataacacttgtccagtagatgcatcaattaaagcgcaaccctcagcgttaatctgtggaggctgtgtttctgcttgcacactactataggtaaagcaaaatagaaacaagaataatatattaaatgttttaaaaattcttttcataaaattctccatacttatattaaatatttttaatagtactcaaaatacattttatcaaaaaaaaagaatttacgctatacaaagttcaaatagattccaataagagtctaaataataaaaaagtggaaataataattaaggagaaattataaaggagaaaaagaagtggtacaagagttcttaaaagataagaaaaaaatcggcatattaagtatgctatttattgtggtaattgtacttataggattatatgtgaaatctgggtttaaagagctgaagaaaaatgatactgaaagtatctttgtagatgatagtattgaggctgatacatcaaatgatgaatcagttaatgttaaaaataataataaatcaaataataaggatagcaagaaacaaatagttgtagctaaaaataagaacatagttgtagaaataaaaggagaagtaaaaaagccagatgtttatacaatgagtgaagactcaatagtaaaggatctcatagacatatcaggtgggcttactgaaaatgcagatttaagtaatataaatagagcaaaaaagttgcaagatcatgaattgatttatatttcaaataaaaatgatgaaaacaaggaaatccaaactgtaaattcaaattctagtaataaagatatttcaaataaaaaaattaatttaaatagtgcaacattagaccaattaaagacattaaatggcataggtgattcaaaagcaaaaggcataattgaatatagagaaaaaagcggtggatttaaatcaattgaggaaataaaaaatgtatctggaataggagataacatgtttgagcgaataaaggaacaaattgaaatttgaacaacttacaaatatattacattaatacttgttaacgttataataattgcatgaaagagtaaaaaaatatataataaacagtggtatatcaaaactaattatattaaatgaatgtaaaagcagtctagaaaagagaacataatattatttaggtaagaaaaaaggtataatattgacacatagttgtaatacactgatggtaaaattgtattattcatttgccgtatattagttagacataaaaataacatctaatttaaataagggggaaaatttagtgtctaaaaaggttataagtatacttatgagcataatagttgcagcatcgttagctgggtgtaaaaatgctacagatagttcaacaaagaaaacggacacaacaacggaaagtagcacaaactctaatgatgacagtttagaggggaaatgggcaaaaaattatacattagatcaaacacaaaagttatttaaagataaattatcaaagatggagaatataaccaaggatttaggggtaaaatatacaaaagatgagaaaacaagaaaagaaaaagatgaatctgtaaatgataattccatatattttgacaatcaaaagccagaagtaaataaaattgaaagtatgtattttggaatgaaaacatatggtgataatttagagactggtgatataagtctaaagttgagtttgaattttgatggtgagaatgcaataaaaaataataattttgacttaggaaagacatcttttaaaaagtacatagaagcatttacagaccaagaaggtagagattattcagacataaataaacaaataattgataaactaaaaagtggtgaaaaccaagttcagattaataacacaattgatggcttaaaggaagaaatcttagctaccaaaacgtgtataatatataaattatctacaaagaagtacaaatttgctgatggtgaaatgagtatgaagtagattacaagggggaaaatttcttggaaaaagataacttaaatgaaaatgaaataaacgatgaagtggaagaaaacgaaattaaaaagatttcggatactgaagaagaaacagataacaatgttaataaagaggttgaaagtttaataactagcgatgaagaatcagataaacaatcttcttctaaaattatattagctaacgcacttgatcagttattaatgattgcttgttcagctttattagtgctattgtgtgatataattttaaaattatgtggatacatgttcgtaagggataatggatctataattttagcaggaggaatgatatattttattataaattgtatttatggcccaataatggaaaagagtaaactagaaaatacttttgggaaaaagatattaaatatgaattaatttataaactgaatttactattataatttaaagaatataaaaattactttttatattcttaatttttattagagataaaattttaaaatataagtacttaggagtatatgatgaaaaaaggaagcgatttaagcgttaaaatagaaaagttacaatttccatcgacaggaataggttatgcagaagataagactatatatgttaagaatgcttttccgggtcaaacagttacaggtagggtaaaaaggaagaaagaagactatgcggagttaaaattaataagtgtagatgaacgagctgattatgagattgaaactccatgttctcattttggagtttgtggaggatgttcatcacaaagtataccatatgaaaagcaattagaatttttaagcgaagaagttaaagaattatttagagaagcaaatgttgacacaggagagtatttaggcattcaaggaagccctaaccaatgggaatatagaaataagatggaatttacatttggtgatgaagccaagggagagccactttcattaggtatgcatatgagaggaaaatcctttggaatattaactgtagatgaatgtaaacttgttgatgaggattatagaaaaattattagattgactgctgattactttagagagaaagatttgccttattatagaataatgaaagctgaaggctatttaagacacttagtgataagaaaagctcaaaatactggcgagatattagttaatttagttactactactcagatagattttgatttaagcgaatatgttaaattgctaagagaacaaagttataaaggaaatttagtatctataatccatactgaaaataattcgaaatcagatgcagtaataccagaaaaggtaaatgtgttatttggaaaagattatattagagaaacattactaggattacaatttaatatttctccgttttcattctttcaaaccaatacaaaaggtgcagaaagcctatattctattgttaaagagtttatgggagatagtgaagaaaaaattgtatttgatctctattgtggtacaggaacaatagggcaaatagtagctccaaatgcaaagaaagtaataggaatagaacttattgaagaagcagttgaagctgcaagagaaaatgctaaattaaatggattaaataattgtgaatttatagctggtgatgtagcagaaataataaaaacagtaaaggttaagccagatataataatattagatccaccaagaactggagtccatcctaaggctttggattatgtaattaaatttaatgcaccagagataatatacgtttcctgcaatccaaagacattagttaatgatcttagagtgcttacggaaaagggatacaaagttataaaaactaaggtgaaggatatgtttcctaatacgcctcacgctgaaactgttgttaggctaattaagcaataaagtaatttcaatgtttcaaaatcttatatgaaagctatttgccacccattgttttagatgggtggtaatttaatataaaaataataaactaaaaaacaaatcaatttatattgtatttacatttatattctacactcaaaagaggaaggtgatagatttgaataaaattttagttatagatgatgattattatatacgagagcttatttgtacagtattaaaagatgaaggattttctgttgctgaggccgtaaatggaagggatgcattagaaaaacttggggaggaaaaaattgatctttgtgtgcttgatattatgatgcctcaaatggatggatatgaattttgtaaacaagcacgcagatattatgaggatatgccaattttaatgctgaccgccaaaagtgagctttcccaaaaagtaaagggatttgaacttggtacagatgattacttaacaaaaccattcgagattgatgagttgcttgttagaataaaagcgcttttgagacgctataaagtagctgcttcacggagtattaatattggtaatttagttatggataaaagtagttatacagtcattagtaacaatgaccaattcgatataccaatgaaggaatttgaacttttatttatgcttggaagttatcctggtaaaaccctttctcgtgacaggctcatagaagaggtctggggccttgattttgaaggaaacgaacgaactcttgatgttcatataaatcgtcttagagagagatttcagtctgatatttacaagttcaaaattactacaattcggggacttggctacagattggaggaagtaaagtaatgagaaacaggtattttttttcactaatactaatttttattacaacattacttggccttgctagtggatactatattttcatatttattttcggtgaattagaatatattcctttgcatatactatttatcgtccaaagtttagcttctattgtgatatattttctaggttggaaagcatttatatatatgcactggcacttcgctaataaacataaaaaatttgatatttcacattttccaatattaagcggagctgttgaagctatgaataagatagcctctggtgacttcaatgtgcttgttaaaacaaatgaactcgatccttttaatgaggtagcagacaatgtcaatagaatggcaaaagagctggggtctttagaaaaactacgccaagattttatatcagatgtgtcacatgaaatacagtcaccattaacttctatatcagggtttgctgcgctattaaagaaaggaaatttaagccatgatcagatatcacattatgccagcataatagaaactgaaagtaaacgattatcaaagttaagcgaaaatctattaagattgtctaatttagaatcagaagacaataatttaagcttaaagaactatcaaataaacaagcaaattgaaagtgttttacttatgttagagccacagtggtcggcaaaaaatataacactcgatatttctcttgaagaaactatgatatgcggagatgaagatttattaagtcaggtatttataaatttgcttaataatgctattaaattcacgccagaaaacggaaatataggtgttaacttatataacgatgaagacgggatcgaatgtaaaatctccgatacaggtataggtatttcatcggaagatcaaccgcgaattttcgagaggttttataaagcagataaagctcgtaatcgttctttgggtggaaacggacttggactttcaatagtaaaaaagatcattgacttacatggagggaaaatatctcttacaagcgaaattggaaaaggtacagaatttattatttggctgcctaaggtatatgaaagaaaataacaagtcctaatattcaggcagattgacttgttattttttgataatgcccaaatagaagctaaatatgttcagtattacagtctgaattaacagactgtaattttttgtttacattgagtttaagttccatttaagtttagtttaaatttcagacatatactatgttttgtagaagccaaacgggctttagaaataatattattgttaaggcaaattttattacttaaatacaatgcgaaaggagtttttttatggaaaacacagaaaatatagatgaaaaatcactctactatcttgaaaaggcacctgttacaaaagcaataatacacatggctattcctatgatactaagtagtataacttcagttgtctataatatcatcgatgctttttttataggtaagcttaataatactgcaatgatggcggcagtgatgctggcactaccattttcatcagtattaatggcacttggacaaatgtttggagtaggttcaggaacatatatatcgagacttttaggtgagggcaatacagatgataccaaaaaagttagttcaattaacttttggtcatcaatgcttatgggtattatttttatgatgatatgtttgccttttttatcttctattttgccgcttttaggagcaagtggtgaaacattacaacacacaagaaattttattatgatacttgttattggtgctccagttattattgttaatatggcgcttgaatcagctgtgcgtgcggagggagcatcaactgtttctatgactggtactataggaggtattatagttaatataatacttaatcctttattcattttcgttcttaatatgaatgttatgggatcagcgttagcctctgtttgtggtaatatagtttccatttcgtattttatatattatttgcaaaagaagagtactgttcagagtttgtcaattaagtactttaaaccaagtaaaaaaatttatggtgaaatttttaaggttggagtttcagctttgttacttagtggttttatggtcattataggtctgcttttcaataattattccatgatttatggagataatgttgtggctggatttggagttgcacaaagagttgttcaaattgtagattgtattggtatgggatttgcaatgggagttgtaccactaattgcatttgcttattctgctaataatcaaaagcgtctcatggaaattgttaaaaaaacaatattgtatattctaggtttaacattagttataggagcagttataagtatattcaggctacagattattggccttttcagtattgacccagaggttattgctattggtgaaataactcttatagcccaactttcatcaactatatttgctgccctatgtgaattttttactggaattttccaagctcaaggagctggtgtacaatcaaacgttatggccgctgtaagaggtgttttatttattcctattttgattgtaggaaacttaatatttgctgttaacggcgttatttgggccatgacagctacagaaggactctcatgtctgataggaattgctctatggcttggaattagacgaaaaagcttactagcaatataagttaatcataattttttagctaaacgaagataagtagaattgtggacttggatagttgttgtaagagtatgctttattaagtactaagagatttttctaaatataattaattaaaaatcctctgactgtagattcatatagttagaggatttagttttttacatattttgatatagataagtattactttatcttaaaacaaaatagcccctaaagtaaaggggctagtgaataggttaaaacaaaaaaagattatgaatggagagtaactaaatgagaaacaaataacattcaagaggtttcttttaattatatggaggctaacatcaaataattctaaatagtaatagataattcttcgcacttcaattaaggagtaaaaaatatagcttattgctgagtatattaagaaaaagaattattatgaaaagtttaaaacttagtgaaatgtaacgataataattgtataaaaagtagataaatgctaattaggataataatctatggaagtttaacaatattacattaacaataaacgttagataatcaaaataaagtttttatttaaaagtacgataaatttaatgttaaatttaatattgaattggcaaagcagttgaaaaactgtgacgcaaagctagagggccttttccttttgaaaggatggcagccagttgcaagtctttgcctatttgaaatgaataggaggaaaatgaaatgaatgacaaaattttaatttgtgatgatgctagatttatgagagttactttaaagaattccttagaaaaagagggatatcaagtagttgatgaggcagaaaatggagaagtgttgattgaaaaatataagaaattaaatcctgatttaatactaatggatattacaatgcctgtaatggatggaattagtgcactatcatcaattatggagattaatcccaatgcaaaggtgattatatgttctgcgatgggacaaggagatatcgttatcaaagcgataaaaactggagccaaagatttcattgttaaaccatttagaaatgaaagattaatacaatcagtcagaagagttttggaaaactgatttcccaatgtacatatttaaggtaaatatcacgctaacgtatcacattgtttataaataagagtgtgattttttattatgtaatgcaaaagatttgaaaaaactagtatagagcatactagtttttttcggttaaattagctcacatgctgcctaatattttgagtttattgggacagatttatatcgtttaatactattaatttatccgttattttcttttaacaatatattaagaaatgattaagatgtttgacaaagaactgacaagaaaaaataatagtatattcataaggaagggagtttgatatttatgttaagagaaattgaagaattaaaaattaaagataaaattacaatagaagacaaacaaatgcttagaaaagcactagatggcataaagggatggaagttcaatccggttgcagtaattacaaatggaattgaagattattattttatatgtagagtaaaaacagtaataaaagatttacaaatgaagatggcaaaagtatatattaaaatacaagaggggagtaaccctagactgttagcaatagaagaaatataataattcaaatacatgaataaataaaagcggaaataaatttatatctataatgtatagaaaagcaatttctaagtaaaaactggagattagattagtaaataaagatataaaatagatattacaatatcaacaagttttcgagataggctatgtgataaaactagtcctatcttatttttatgtgtattttaggcagactgataatttgtaaatagatactgcagcttaataaagttttttattcctaattcacttagtataaaagtggagaatatatgaattataaaaagcattgtcattaaaagttaaagtagtttttattagaaacaatttattaatgacaatgctttctatatgaaagattaaaatatgttgattaggaagctaatgatttttctaagttctttataaaagtattaaattcatcaggttgacgtttacctaaaagtaaagaagttaaggcagaatttatttttccaaatatgtttctatcactctctatctcagtaaaaatgagtttagtctcattttcagaaataggaataagttgatatctagttataaaggattctcttctatttctagcagttatttcgtagattttatctctttcaaatgcagttatttcaaccctaaatcttttattcttcttttgcttagaataggttccaacagctcttttttctttaaagtcaggaaagtttgcctttgcagattttacaaaagtattaaatattttcttacaagagtgattaattatagattcggcagtaaatgttttcaaattgaataccccctatgcaactaaattataataccaattatatactataaaattcaattttcaagttaacattagatcaaaattatatagttaagtgatattatagtaaaattataataacttctatatcattaattctaaatatacattttgttaattacttactatacaaaatgtatatttgattaaaatgtaaagggtttaataaatgctagtaaatacaatgcttaggataaaattacaaaaaagaattaagtatggcatggaagttgctatatttaatttgcgagaggagatattattatggatttagaaaacaaacttataaacatcattaataccgaaaataaaaaaaatccactgactgatgttcaaatggctaaattcttgggtgtggctagagaatcaataaccaatttaagaaaagaattaaatatagcaaactctaggcaaaggcgatatccatatttaaaggtggcaacatcaactatattaaaaaaaaataaagacattgcagtatctgagcttactagagaactattggctgaaggatttgatgtttcaagaagaattgttgaagaaatattagaaaaagataattttgaggttaataaagttaaagttgaaaaagaggaagtaacagatccttttgattgcttaattggaagtaatggaagtttgaaaaattctatcgaacaagctaaatcagcaattctatatccacctagaggacttacaacattaatagttggagaaagtggagttggtaaaagtaaattttctgaatgcatgtatgaatttgcaaagaaaaagaaggttataaaagaaaacgcttcgtttgttgtattcaattgtgctgattatggtgacaatccacaattattattatcactcttatttggacataaaaaaggtgcatttacaggcgcagattcagatgcatctggattagtagaagaagcgaatggaggagtactttttttagacgagattcataggttacctccgaaaggtcaagaaatactcttctctattatggacagaggaaaatttagaagattgggtgaagccaattcagaaagaaaagttaatttaatgttgattggagcaaccactgaaaatgtagaagctaatttactattaacatttagaagaaggataccaatggtaataaaaattccttctctgcatgaaagatcaataagagagaagattgatatcatctataatgaatttcaagcagagtgtaatagaatagatgctaaaatttttgttgataaaaaagtagtagaaatactcgctctaaaaaagtttagtgctaatattggtcaattgcagaatatgattcaggttttatgcgcaagagcttttatgactttcataaataaggaagatataaataaagaatcattgataatagatatgaatcaaatattaaagataaatgactcgtttcaagatataaaatttcaggatattaatagagcagagatacgaaaatatgtaaaggattctatatttattccatttatgttggaaaatcaattaagagaagaatcaacagaagttagtgaaagcgcgtttccagaggatatatataggcagattgaaagaaaatattacgaacttaagaagatagatatacaagaagcagatattgaaagtattctctgggcatttatacaaaatagttttacaaatatagaaactacttttaattatgaaaaatcattttctatgaatgatttaagaagctttgtaagtgaagatttattagattttatagaaacttttatggaagaactaattaaagagaatccatcattagaaataaataaaaatgtatttaaatacttagctatccatgtagaggaaagcattaaaaggataaggttaaaacaaaagataataaatgtagataaaattataagcgatacaacttatgaatatgaagtagccaaaagatttgctatgggagttgaaaaaataaaagacatagaaatacctaatgatgaaattatatttataggactgtatataaaagcagcactaaaatctgaaaataaaagagataaagttggattaatgataatttctcatggaaaaatagctactgctataactaatgtagttaaggaacttttaggaataagatttcctgtagcaatagatatgcctttagatgagaatccaatcaatatatataacaaggtagttgaactatcaaaaataatagatcagggaaaaggcgtgctcttcttagtagatatgggttcattaaataatataggagatatagttaataaaagaactggaataaaatcaagaacaatggatagggtagaccttataatcgcattagaagcagctagaaagatttcaataggagaagggaatcttgatgaaatatacttttctttaatgaaggataggcttggtcatagatattttatggaaagtgtatcagataaaccaaaagcaataatttcattatgtctaactggtgagggaatggctaaatatataagtaagagtttaatggataaatatagtgatgtaaacttctatgaaatgagtgcactagatgaagaattatcaaacaagatagttaaattaaaagaagataataatatattagcggtcataggaactatggatccagaaatacagggaatgaatttcataccgtatgataaagaaatcttaaataatttaaatatagattcattagtaaataaaagtgaagaactaaaaaaatatgaaaggattatagatgaagatttgttgatatttgaaccagatatatatttcaaaaaggatttattggagtatgtttgctcaatacttataaataatggaagtgtagataaagagtatttatcatctgttgttaatagggaaaatttagctccaacatatctaaagggagaaatagctgttccacatggagagtcttcatacgtaaacaagacaagctttgtgtttatcaagttaaaaagtccaattgattggggggttggaaatgtaaatataatatttatgccagtttttaaagcaaatgataaggtaattgtaaaaaacacactaaaaattttagaggataagattttcatagaaaatatgaagaatagtttaactgagttggaatttaaaaatataattttaaacaagtttaaagaaatataacaaatagggggaataacaatgaattcagatttaattgcattaaatttagaagtaaaaaacaaagaagaggtcatacaggaattaggaaagagaatgtttgaaaagggatatgttaagtctacttacatagatgctgttctagaaagagaaaagacgctgcctacaggacttgatatcggagaaatgtgtgtagcaatcccgcataccgattctaagcatgtaaatgaatctaatgtagcactagctgttctaaagaatccagtagagtttagaaatatgatagatcctagcaaaaaagttgaagtaatggttgtatttttattagctataaacgatcctgattctcaggtaactttgctaagcaagctaatgtcagtttttcaaaatgtggagttattaaagcagataaagagttcatcatctacagaggaagtaacaaaattattagaatgtataggaatatagtacttaaaattataaaagattttaagtttatataataaatttttgggaggaatatattatgaaaaatgtcaacgtattatcagtttgtggctcaggtacagtaacatcatcaatggtcgcaggaaaagttaaggaaacattaaaggaaaaaggaataaactcatctacaacagaagcaagaccaacagaagcattaaatttagcacagtcaggaaggtttgactttattgtttatacaagtccactaccacctggggattacaagataccaactatcaatgcatttgcatgccttacaggaataggagaagataagttttttgaagacgtattcaaaacagtagacgaactaaacaaatagtaaaatattattaataatgggggaattaaatatgttagcatttcttaaatcaataattgacacatttgggtcagcaataatagttccgtttattatatttgtaatagcaaaagttttcagaatatcaactaagaaatcatttctttctactatatatgctggtgttgccttgcagggcttttcactaatattgaattcatttactccaatagtaacaccggttattaatagaatggttgaaagtacaggggttaatcgtcctgtgtttgacgtaggctggcaagctacatcgctagttgctttttcttcaagtgcaggtatgatatatcttggactaggaattctattgcagactgtattatttctaataaagtggacagatgtttttcaaccatcagatttatggaataattactcatacatggtttggggagctatggttataggggtaacaggaagctttcctttaggaatagcatgtatggttttattgaatctatacagcttactaatatcagaattagtagcaagaagatggtcaaattattacagatatccgaattgtacaataatagctatgcataatgtagaagcatcaatatttgcagttgctatagatccaatatataacgcattaggatttaataagattaaactgaatccacaacaattagaaaagaaactaggattttttggtgaacctatgacgctaggattatttttaggaatgtttataggtatattaggtaatgttgcaagaataggaactatggaggcatggggagaaatattaaaattaggtattgcaactagtgcagttatggctattttccctaaagttgctagtatgtttgcacaagcattttcacctataacagatggagcaaggaaattcatgcaaaatcaaggaaatcgtgattggtttatagcagtaaacgatgcagtaggatatggtgaaccagcaacattgatatcagggttaatattaataccatttatgcttgtattagcaatgatacttccaggaaatcaagtattacctgtagttgatttacttgcacttccatacatggttcaaggtttagttgctgtatataacggaaatatatttaaagttttactttcaggtataatatggtttggattagggttatatgtatgtacatttacagcgccattgttcacatcgatggcagttggtgtgggtgtagctataccagcaggtgctatgatgattacaagctttaatatactaggaaaacctttaatgggattagtattctttgcattcttaacaggaaatccagtgtttattgcaattgcggtggcagtatatattgctttatgggcattgtttaagaagaataaaaatgcgattgttgattatttagaaagacaagctgtgaagaatataggggaagatggggcaactccgagcatggcaagttaatatagaaaaataaattaagtgaaaagtattctgtttagtagatagtcatagttgatctactgatcaggatacttttttattctttaggaatttatatttcagtaaaatctatggaagatgtactccttaagggtataacttaaaaaagtttgattgagtagtttttatatttaaaaaagaatagaaaagaaatcttattcgctttaacaaagataggtcacaatagaaccatatgattttacaatttatcataatgtaatgagttttataaaatgtaatataaatcaatttaacactttaaatataaggcatataaagaaattaaaattacttttttgtatggcacggaaattgctttatatattttcagaaagatagaaaggggatgtttatagtgacaaataaaatgaaggcttcattattatatggaataggagatgttagatatgaaattgtagatataccagaaatttcatctaatgaagtgctagtaaaagttaaaaatgtaggtatatgtggttcagatctaccaagaagtatggtaagtggacttagtggaggagcaaaatatccgattatattaggtcatgagttctcaggtgaaataagtggggtaggatcggatgtcaaaaatattcaaataggagatagagttgcagttgcacctttagttccttgcggaaaatgtatttactgtaaatctggagattatggattatgtactgattatcacattattggaacaagagtaaatggagctttagctgaatatgtcaaagtgccagcggatcatatattaaaattaccagatagtttagattttgaaactgctgccggaattgaaccagcaactatagcataccatggactagcaaaagcaggtattaaggtaggtgacagtgtagtagttttagggtgtgggccaataggtcaatttgctatacaatgggctaaggttttcggagcatctaaaattatagcagtagatatttttaatgaaaaattggagcttgctaaaaaattaggagctaattattcagtcaattcgaaggaatctgatgttgtggctgaaattaaaaagattacaagtggtggagctgatgcggtaatagagacagcaggaagcaaatttactcaagaacaagccttacttatttctaaaaagaaaggaaatgtggtatttgtaggaatatctcatacaccactaccattaagtgaatcagcaacagaaagtatattaagaggagaattaaaaattcaaggatcttggaattcttacacacagccatatccagggaatgcttggcatgcaaccgttgattttatgggaaaaggagagattgtatttaaacctatgatttctcataagataaaacttgaagaggttggagaatatttaaagaagatggcaaatagagaaattaatttcaataaagtagtagtagaaatataggtggtgaatagttatgaaagaaaatttaaagaaaatatctaataacattagaatgaacataattaaaagtgtatcagcagcaaaatcaggtcatccaggtggatcattatcaattgcagatattttaactgttttatattttgaaaagatgaagattgatcctaaaaatcctaaagacctaaatagagatagattcgtattatcaaaggggcattcagcaccagcattgtattgtacattagcagaaagaggatactttcctaaagaagagcttttagggttaagaaaatatgagtcaaatttgcaagggcatcctgatatgaagaaagtaataggagtggatatgtctacgggatcactaggtcagggattatcagctgcgaatggaatggcattagcaggtaaattggataagagtagttatagagtttattcaatattaggagatggggaagtacaagaagggcaaatatgggaagctgcaatgagtgctgcacactataaacttgataacttaactgcttttcttgatttaaacggattgcagatagatggatctaatgaagaaataatgagtataagtccaattgacgagaagtttaaagcatttggatggaatgttgtaacgatagatggacattgctttgaagagataagtgaagctatagatgatgctaaggctacaaaaggtaaaccaacaattataatttgtaagacagttaaaggcaaaggcgtttcgttcatggaaaataacgttaattggcatggatcagcaccaaataaagaagaaaccgaaaaggcattagctgaattagaaggaggggaagaataatgggagtagcaacaagagaagcatatggacaagcattaaaggagttagcattagataataatgttgttgtattagaagcggatttaggaaaagcaactaaaagtattgagtttaagaaaattgcaccagaaagatattttgatatgggaatatctgaaggagatatgattgggactgcggcaggccttgctacatgcagaaagataccatttgcgagtacgtttgctatgtttgcagcaggaagagcatttgagcagataagaaattcagtagcatatcctaaattaaatgttaagatagtggcaactcatgcaggtataactgttggtgaagatggtggaagtcatcaagcaatagaggacatatctttaatgagaagtatacctaatatggttgtattaagtccagcagatgttattgaagcaaaaaaagcaatatttgcagcgaaagaatacagtgggccagtatatataagattaggaagagcagcaactccagaaatacacactgaagattatgaatttaatattggaaaaggtgaagtattaagaaatggtgatgatgtggctataattgcaactggaataatggtagcaaaagctttggatgcggctcaaatattaagtgaacaaggtattaatgcaacggttgttaatatttcaactataaagccgtttgataacagtctaattgttgatgttgcaaaaagagttggtaaaatcgtaacagtagaagaacatagtataattggtggtttaggttcaactgttgcagaagctttaattgaagagtacccagtaaaaataaagagaattggtataaatgatgagttcggaagatcaggaaatgctgaagttttattagaaaaatataatttaacagcagaacatatagttgaaacagtaaaatcaatttaaaggcagggatataatatggaagttaaattatcaccttcaatattaggagcaaattttttaaaactcgaagatactatattaaaacttaaaaaacagggaattaaagaattacacatagatataatggatggacattttgtacctaatattgcttttggaatagatcaaattaagatgattaaacaaattgcttgtgatatagaattagatgtacacctaatggtaacaaatccagagatattcattgatgcgctagttgaagctggtgcgaatacaataacaatacatcaggaatcttctccacatatatataatttaatgtatataattaagagttttgggataaaagttggggtagcattaaatccggcaacaccaataaatacattgaaacatataagtcatatggtaaataaaatattaataatgactgtagaaccaggatttggaggacagagcttcattgaacctatgatggaaaagattcatgaagtaagcaatttcataaaaagcgaaaatatagaatgcgaacttcaagttgatggaggaataaatttagagaacataggtaaagttgttgaaaatggagcaactaatatagtagttggatcggcaatatttagagaagaggatattgattcaacaataaaaagatttagggaagcaatactttaactaagcttataaagtgaaggagctgaaatacatgatagcaataggggcagaccatggaggatataaattaaaagaacttattaagggatatttagataaaaactcggtagaatatatcgatgttggcacattttcagaagatagtatagattatcctcaaatagctatggatgtagcaaatagggtatctataggagattgtgaaaagggaatactttgttgtggaactggtgttggtatgtctatcgtagcaaacaaaataaaaggtataagagcagcattagttggagattgttttactgcgaaagctaccagagagcataatgattctaatgtactttgtttaggtggaagagtaattggcgaagaattagctttaatgatagtagatatttggttatctacagagtttataggtaagcatcatgttaatagactcaatcaaataaaagaaatagaagaaaaatttaaataatatattaattaggagagtgattattaatgttagaagaattaaagaaacaagttttaaaggcaaatttagaattaccagcaaagaaacttataacttatacatggggaaatgttagtgggattgatagaagtactggattagtggtaataaaaccaagtggcgttgagtatgataatatgactttagaagatttagtagttgtagacttagaaggaaacgtagttgaaggtagtttaaggccttcatcagatacaccaacacatttagaactatataaagagtttgatgaaataggtggaattgttcatacacattcaacttgggctactatatgggcgcaaataggaagagctataccagcttgtggaacaacacacgcagattatttttatggaagtataccatgcacaaggaaaatgactaaggaagaaataagtagagcttatgaaaaggaaacaggaacagttataattgaagaaataacaggaaacaatccgttacactgtccaggtgtagttgtaaatgatcatggtccatttgcatggggaaaaaatgcagaagaagctgttcataatgccgtagtcatggaagaagttgcgaagatggcatatttcactgaattgttgagtccagacaatattatggacaagatgcttatgaataagcactttttaagaaaacatggcaaaaatgcttactatggacaaagcaagtaacttcctttaaaagcaagataggagaatatgcttattttcctatctttttatctaggttatagatatatggaattagagaagtatccttttttgcggggaaattatgcatggacaaaaatggggagggtttattatgctgcaagaacttaaaagactacaaagtggaacggatataaggggaatagctatagaacatgaaggaactaaaaatcttacgcctaatttagtcaataatgtcgggtttggttttgtagagtggcttaaaaaaactaaaggactcagtaataaaaatataaaaatagcagttggcatggattcaaggttatctggaccagaattgaagaaatcattaatagaagctttagttgattcaggttgcaatgtttatgattgtggaatatgtacgactcctgcaatgtttatgacaactatattagagaattattcatgcgatggagctgtaatgataacagcaagtcatcttccgtattactataatggattgaagttttttactaaagaaggtggatgcgaaaaagaagatattgaagacataattgaatgttctaacttagcagaaaagaaatgtactactaaagggctagttgaaacaatctatttcatagatgtttattcaaatatattagttgataagatacgaaagaatgtaaattcaaaaacaaattatgagagacctttagagggaaccaaaataattgtagatgcaggaaacggagcaggtggtttttttgcatataaagttctagagaaattaggtgccaatgttgaaggaagccaatttacagaaccagatggaaatttccctaaccatattcctaatccagaaaatgaagaagctatgaattctataaaagaagcagtacttaataataaagctgatttaggaataatttttgatacagatgtagacagagcggctatagttagtagtgatggaaaagagataaataaaaatgcgcttatagcattaatatcttcaatagtgctagaagaaaatccagattcaattatcgttacggattcagtaacctctactggactttcagattttataactagtttaggtggtatccatcatagatttaaaagaggatataagaatgtaataaatgaatctaaaaggttaaataaagaaggaaaattaagctgtttggcaatagaaacatcaggacacgcagctttaaaagaaaattactttttagatgatggggcatatttaatagccaaaatactaattaagatggctaagttaaaagatgaaggaaaagaaatatcaagccttatagaaaatttgaaatatcctaaggaaagtatggatatgagaataaacataaagagggaagattttaaatcatatggagaaatgataatagaaggcttgaagaaatatgcagatcatgtgaatggatggaccattgaacctaaaaattatgaagggataaagataaattgcgataaagaaaatggagatggctggctattgttaagattatcgctgcacgagcctgtactgccactaaatatagaatcggattcggaaaactctattaacataatattagaaagattaatgccatttttaagaaaatatgaagatttgaacttagataactttagcaatatatttgaagtacaattaaaaaaataataagggcattttggacttgttattttctttcatatgccttaaatgatttttgattggagtgattgtattgaagatagcagcctcaataatgtgcgcgaatcaattagaacttcatagtgaactaaaaaaattagaagatgcaaaggttgatttattacattgcgatgtaatggatggagtttttgttaacaatttagctatgggaccttatgtattggaacaaataaaaagtgttaccaatattcctctagacatacacttggcaactgtagacacactgaaatatatagatatgtatagctatctaaatccagaatatatatcatttcatattgaagcaagtaaagatgtagaaatagatataaagaagattaaatcaaaaggaacaaaagcatcaattgctataagtccagaaacgtcattagaaagcgtaaaaccatatttacaggatatagatatgattcttgttatgactgttaatcctggtttttcaggacaaaagtttaattataaagttcttgataagttagatgaattaaataaatatttatcaacacttagtaatagaccattaatagaagttgatggatgcataaataaagagacagttaaggaattaaaacataaacaaatagatgtttatgttttaggtacatctgcattatttaacaataaaatagaggattataaatctaagataaatgaaataaaagaaattaaataataattttcgccagtatttaagtataaaccaataatcacatacaagaatattaaatagtataatcatgctttcacaattttaaatttttattaaaactgctacagagaaatttttgtagcagtctttttttcatgaagatatttatatatgttgctataataaatttacaattaggactatagtaagctaagcgttaaaataagattgtaatttagaaacttgagtgtaatatatatttagggggcgtaaagagaaaaatttataataaagagagattataatatttaaatttgaaggaatataaaaatattatataggcaaaagtacatgtagtaattaaaataatattatgaagatatattgcattacataagatacggggaggaaatacaatgttaaagataggttgccatttatcggcttcaaaaggattcaagaatatgggagaagaggctattagtataggcggaaatacatttcaattttttactagaaatccaagaggtagtaaagcaaagactatagatgaaacagatataaaagaatttttaaagttagcagaagaaaataatttctctaaaatattaggtcatgcaccatatacattaaatgcttgctctgcagatgagaacacaagaaattttgcagtagagataatgaaggatgatttagaaaggatggagtatattcctaataatctttataattttcatccaggcagtcatgttaagcaaggtgtggagattggaattaaatatatttcagatatgctaaatacagttcttaagccggaacaaacaactactgtattgctagaaacaatggcaggaaagggcacagaaattggacgcacatttgatgaattaaaagagattttaaataatgtagaattatcacataaagtaggtgtttgtcttgatacgtgtcatgtttatgatgcagggtatgatattgttaataatttagatgaagtagtagaacaatttgataagataattgggttagataaattatgtgcaatacatttaaatgatagtatgaatccatttggaagtcataaagacaggcatcaaaaaataggagaaggttctattggattacagggaattaagaatattattaatcatccaatgttatgcaatttaccatttttccttgagacaccaaatgagcttgacggatatgcaagggagatagaattattaaagagtatatatcaaaattaaaaatatttattaataaaattatatgatgtgtatagcgtaattttactaatcaaattgcataatgaataaaaaatagtaatatagcaatattacttctataataaatattaagtaatatagagaattatgatatacttaagctgtcaaaatatacataaaaggtggaaaaagttatgaggatcacgaagaagaaaagttttgtttttataacaattataatgggaatatttttattggtaggttgcggaaataaaaatgctagcaatggaaaaggggaagcagataattcctctaaaacaagtgaaagcaatgaggcaactccatcagcaaatagtaaggacctgccaatagctactataaaagtagaaggattcggagaaattcaagctgaattatatccggaaattgctcctaatactgttaacaactttatatatttagccaataaaggcttttataacaatttaaaattccatagagtaattaaagggtttatgatccaaggaggagatcctaaaggaaatggaaccggtgggccagattattcaattgaaggggaatttacttctaatggttttgcaaacagtttaaagcatacaaaaggagtattatctatggcaagagcacaagaccctaacagtgcaggaagtcaattttttataatgtcaggagatgcaccaaatcttgatggagaatatgctgcttttggaaaagtaatatcagggttagatatagtagataaaattcaaaatgtagaaactaattctgctgatgcacctaaaaaggatgttgtaattacatcaataactgttgatacaaaaggtgttgaatacaaagaaccgaataaaaagtaaatttaaaatgtagcttagaatctaagaataaatgatttagtggagacttatatgactaatatcaatcatataagtctccactaaaattttatcaggcatttattggatagcttgagtaatggagtttattttatcactgggatgcttattccaattatttttccaagatttaatacattcatataggattataattaacatagcaagtattataactgataacacggttaatgtagtcttaccatttggaatatagttattaaagatattttcaatagaagctgttgaagttgttatagcgataaatatcataggtaatattgttataggggtatatttcttcttgcccatctctataagtacagaagttccgattgcaaaagcaattgcggcaagagtttgattggcgactccaaatagaggccaaatagttgaaatgttaccactataaagtaaggctccccagctaagtgacattaatgcactgaaaaatactagattaaatttagaatcttttctagcaagtggtttgtacattttgccaaaaagatcttgtaataaatatcttccaattcttgttcctgaatctatagttgttaaaataaataatgcttcaaacattatacagaaatgataccaataagacattaaggttgatgcaccaggtagcttttggaatacatatgtcataccaacggctagagacacagatccaccaggccttccagcaagtttctcaccaacaagtgattcgagcattcctaaatcttttgggaccaaatttaatttatcaaaaacttctggcaaagagtttatggcaaaatagtcagctgtaggcaatgaggtagctgcaatcaatgccattagggagacaaaagcctcaagtaacatagaaccataacctattggaagaatatctttttcgctctttattagttttggagtagttccagtgctaataagtgaatggaacccagatagcgcaccacaggctattgttatgaataaaaacgggaatactttaccgctaacaaccggaccaccaccatgaacgtattgagttagtgcaggcatttctaaatttggtctgactattattataccgataactaaagcaccaataactccaagtttcatataagtacttagataatcacgaggtaataataatagccatacaggtaaagccgcagcacagaatccatagattactaatattacagatagttgtttagtatcaagagtcaaaaaattaccaagagttgtaccttcaatttgtggcccaaagatgaccgcaagcattattaaggccatacctattatagtagcctcgcctattttaccaggtctaatgtattttaaataaattcctataaaaattgcaattggaatagtagccccaactgtaaatgtaccccaagggctattataaagtgagttaacgactggcaagccaagacctgccattgtaattattaatatgaagataactgaaatggaagtaataaagccaattctttttcctaatgtatgttttgcaatttctgctatggactcaccattaaacctaactgatgagaaaagcattatcatgtcatgaactgcacctgcagcaacggaaccaatcaatatccagagagcaccaggaaggtaaccaaactgggcggctaaaacgggtccgataagaggcccagctcctgcaatagccgcaaagtgatgacctagcagaacccacttatttgttggaacataatccttgccatcattgtatatttctgaaggaacttttttagattcgtctaaaaccaatacctttgcagcaatgaaagcgccgtagaatctgtatgatagtattagaattaaagcaccaataataactaaaacaatagaattcatatctacatcccctttgtgtaaatgttttcttacatatataatctaacatcagaaataaatagtgactatattttgtatgtgaaatgctatatttagtggatgaattaacaaaatattgaggcggtttgcagtaagtttttatataaaggaagtaaaaattgagattttattacatagtagtataatttatgtatatagggtaaaagggaggtgatagtatgttgatggtgaatatgctagagagaatggcacttataacaatatttatatatgtaatattacagactaatattatgaagtgttttgttaaggacaagtttgatagaaaagataatataatgatgattctgatattttcactccttgctattttaggaacttattttggaatatatataaaagatcaatcattagcaaatagcagaccagttggagcaatagttgcaggatatttagggggacctgttattggaattatagttggatttataagtggattgcataggtattcatttggaggatttacggcattagcttgcggattatcaacaattgtggaaggcgcaataggtggaggatttagaatattatttaagaaaaaggggctaaacccagccgttgcagggttagcagcagtagtagcagaaattactcaaatgataattatattaatgttttctaaagatataaattcagcaatagatcttgagaaaacaatagcattatctatgatacttataaattctattggtgtatttttaatagttatggtaattgaaagctcaaaaaaattggttgatggtgaagtaaaacttataaaattaaaagaagaaaataaagtagcagaattaaaggctttaaaagcacaaatagagcctcattttttatttaattctcttaatgtgataagtgcatattgtagaactgatggagaaaaggcaagagaacttatattaaatctttcaaattattttagagctacgctagaaatagaaggagatttttctacattaaaaaaagaattggctttgataaaggcttatgtagcaattgaacaagctagattctcaaatagactagaagtgaaatttttaatagatgataatttactagatataaaattcccaatacttgtacttcagccaattgtggaaaattcaattaagcacggaatactgaaaaaaattaatggtggtatagtaacaatttctattagaaatgatgaaaatgacgttagtattgaagttagtgataatggggtaggctttgaaaatgcagatgaatctttatcaactggacttggccttaaaaatatcaacaatagacttagattattatatggagaaagttactctttaaatatagtaagttcaaataatggaagtagtgttaattttaacattccaaaataattattataattaatggggggaattaaattgaaattactagatgagataaaagtagcaatagttgaggatgaagcaatatccagcgatgaattaaaatacataatatctaaggatggcagattcaaagttgtagggcaagcatatgatggaataagtgcattaactttaattgaaagcgaggagccagatattgcttttattgatattaatattccgggaaaaaacggaataaaattggcagaagatgtaaaagagatatttccggatataattctaatttttttaacggcatatgatacttatgcaataagggcttttgaacttaaagtttatgattatatactaaagccatatgatgaaaagagaatagcggaatcattaaattgtgcgttaaatacaattagtaatagaaatgaaaatgaaataatcaatatattaagtaagcttgaaaataaacaagcattgaagaaaatcccgtgtgagaacaatggaaaaataattcttatcgatgttaacaaaatttccttcttttattcagagggagagaggaattatgttaagactaataaagatatttattgtacaacaaaaactttacaagagctaactgagaaaacaaatttctttagatgccacaggagttacgtagtaaatcttgaaaaagttaaagaagtttacccttggtttaacggtacttataagttaattattgatgatgatgaaaataatgaaataccggtgagcagatctcatgttaaggaaataaagattattttaggactatagtaatagccccagttttagaagtatataaattttagaagaatattaattaaaattgagtttttaaattaaaaaactagatgaattttttgaataaaatattaatttattcatttgtaatttatgaaaaagtctaaataaaggatactcattgttaatcttggtaagattaacaatgagtatcctttatttggattaattattatataaagttctgtattatctcagttatacagtctttttgcaggcgcaattataaaaattaattttgtaattaattttatcgagatttctttgtaattcagctatttggctaataacttcttcacggtgttttataaatatttctctacgaacatcaatagtattatcacctttaaggcataactggatatattctttgatttgctttataggcatacctgtattttttaaacaacaaataagttcaagcaattctaaatctttttctttaaaatccctgttgcctgactcactgcgatccacaaatggaagtaatccttctttttcataatatctaagagtgtgtggacttaaatgtgttttttcagcaacttcagcaatactgtatcccatagtattaccctcctttaaactgcatgatgtattttataacttagagtatactctaagagtaagcatttgtaaaattgcatcaaaaaattatttctaaaatgaaaagttataaatgatgaatatggtattataaataaaaaattactttttaattttagaacaatgactttagtactgtaataacgaaattaacttttcattttagggtttatttttccaaaatatgttgacttagagttaactataagatgtaaaatatatatagaacaatttatcatataaattatctattttaaggaggaattactttgttatatagagggtttggaaagacaaatgaaaaggtttcggttctaggatttggttgtatgaggttacctattattaatggagatactactaaaattgacgaagaaaaagctacaaaaatgattcgccacgcaattgatgaaggagttaattatattgatactgcatacccttatcatgggacaggaatgggaactggaggggaaagtgaaccatttgtaggtagagccttaaaagacggatatagagaaaaggtgaatttagctacaaaacttcctagttgggcaattaagactagagaggatatggataaatatttaaatgaacaattagagcgattgcaaacagatagaatagatttctatttagttcatgctttaaataaaggttcctgggaaaatttaaagaagttaggaatagatgaatttttaaactcagcaattaaagatggaagaataagatatgcaggattttcatttcatgataagttagaagtttttaaagagatagtggattattatgattggtcattctgtcaaatccaatataactatttagatgaagacttccaagccggaactgaaggcttaaaatatgcagcagatagaggtcttggagttgttatcatggagccgcttagaggtggaaaaatagttagaaatcttccggatgtagttactgatacatttgataaagcagaaattaagagatctccagccgaatgggcactaagatgggtatggaatcatccagaggtatctgtagtactaagtggtatgaatgtaatggataatgttactgaaaatattagagttgcaggtgaagctttaccaaattcactaacagaaaaagagctagaaataatggataatgttaaaaaagcatttaaagaaagaataaaagttaattgtacagcttgcgagtattgcatgccatgtccagcaggcgtaaatattcctaagaattttacattatataatgagtataatatattcgttactccagcaacagaaaaagaacttaaggaaagatataatggagtagcaccatcagaaagagcagataaatgtgttgaatgcggtaagtgtgaaagccattgtcctcaagcaatcaagattcgtcaagaattaaaaaatgttaaaacaatatttgcataaagtaaaatattacaattcacaaaatagtttctagacagttgaaaaaagatgattacattccataaagaagaaaaaaatttatataattcaaaagagtattttttcgataattaagaagatacaacattatatagacaaaaataaatttattaaaatcatacaaatgagttaaggagtgagctaaatgagaatattatattacgattgtttttgcggtataagtggagatatgaatctagcagcgatgttgaacttaggagttcctaaagaatatttatttaaagaaatttcaaagcttaatttaaattctgaatatgagatacaaattaacagttctgagaaacttggaataacaggaacaagagtagatgttatattaaaagatgaagcaaataatgtagataacataggatataaagattttgagcgttgtagtactgatattatagaagatcacagtcactctcacgtacatgatcaagagcacgatcatcataatcattctcatggtgaagatgcttcacataatcatgaacacaatcatccacatagccatgaacatgattgttcacataatcacgaacaagctcatgttcatagccattcaggaaatcacgagcatcatcatagaaacttaaaagatatagagaatataataaattctagtgacttaagtgaaaaagttaagaatttaagtttaaatatgtttatgagagtagcagaagcagaagcaaaggtacatggcaaaacattatatgaagtacactttcatgaagtaggcgccattgattcaattgttgatatagtaggagctgctatttgtttagattatttaaaagttgataagattatggcatctcatgttcaagttggtggcggattcgtaaaatgtgctcatggtctcatgccagttccagcacctgcgaccgtagaaatattaaaaggcattccaataaatgttggggtggttcaatttgaaacaactacgcctacaggagctgcgatactagctgaaaatgttcaagaatttacttcgaaaatagatttctctataaagaaaattggatatggaattggacatagagatctagatatacctaatgttttgagagtttacttaggagaagacaatagtttagagaagatagaagaacagtatatattagaaactaatatagatgatatgaacccagaattttatggatatattgaagaaaagctttttgatgcaggagcattagatgtttttaaaactcctatattcatgaaaaaaggaagaccaggaataaagttaagtgtattaattagtgaaaaaatagaaaaagatattttggacatagtttttgaagagacgacatctataggcgtaagaaaatataaagttgaaaaaataatgttaaatagagagttttcaaaggtagaaactcagtatggagaagtaacaatcaagaaatcatattataaaggtaacttagttaaatataagccggaatatgaggaatgtaaaaagattgcaaaagagaataacataactatggaaaaggtgtatagggaagtttataagcaaacttcgaatatttataatgagtaattctacaatcaaattgagaaaataaaaatgtataggtgagaggcggaatagatagatgattaataatgataaatatagtgaactagtgaaataccttaaaggattaggaaaagtagttttagcattctcagggggagtagatagcacattcttacttagagtagccaaagaagctcttggagacaatgtaaaggcagtaacgattttatcaccttacattcctaagtgggaaatagcagaggctagagaattggtaagggaattgggagttcaacatgaaattattgaggctccaattattgattcaattaaatttaatccagaggatagatgttatctttgtaaaacagctgtattcactatgatattaaatgtagcaaaagaacaaggttataattgtgtaattgatgggacaaattttgatgacataagtgattatagaccaggtcttaaagcgttaaaagaactagaagtaaaaagcccgctattagagtgtaaattaactaaagcagaaataagagcattctctaaagaattgggacttaacacttgggataagccgccttatgcttgccttttgacaaggataccttatggaaatgaactgaaagtagaagattttgaaaagattgaaaatgcagaaaagtatatgatgagtataggttttagagctgttagggtaagatgccacggtgacttagcgagagttgaagtaagtagggatgatagaagtaaattatttaatgaagagcttttagatactattgctgaaaaaataaaagaatgcggatttaaatatgtgacattagacttacaaggttatagagtaggaagttttaatgaaactatagtgaaaaaagaatagaatcaaaaataaataagaatattttgaagattaattaaagcggtgtaagaagttagcagagaaaatcttaggaggataaagctaatgaacaaagaagaaattaaagaattgttagaaagtgttaaagataacaagttgaatgtagatgaggcacttgaaaagttagaagatctaccttttaaagatttgggtttcgcgaagatagataatcatagagaaattagagttggctatccagaagtaatatactgcgaaggtaagactgtagagcaggttagagatattgtaaaatttatgcttacaaaaaacaataatatattaggaacgagagccaatgaggaaatgtacaatgcagttaaagaaatatgtaaagaagcaaaatataataaacttggcagaacaataactattaggaaaaatgaacaacctcttacggagaattatatagcaattgttgcagcaggtacttctgatttgcctgttgtggaggaggcatttgaaacagctagtatattaggcaatagagttgaaaaaataactgatgttggagttgcagggatacacagacttttttcaaaattggatgttattaggggcgcaaaagttgttatagtaattgccggaatggaaggtgccttagcaagtgttgtaggaggacttgtagataagccagtaatagcagtgccaacaagtgttggatatggtgctaatttcggaggaattgcagccttattatctatgttgaatagctgtgctagcggtgttagcgtagttaatatagataatggtttcggggcggcatataatgctagtattattaataagctgtagttttttacaatgattttatatgggtaattaatatttaaaattcagtatccaattgtttaattaggaaagaatagaattaacatcataaatataaaaacacaagggaggagaattatatgtcaaaacttttttcaaattttaaactcaaaaatttagaatttaaaaatagagttgttatggcgcctatgtgtatgtatacagctaaagaagatggaatagccactgagtggcataaaatacattatgctacaagagctttaggcggagtaggacttataatccaagaagcaactggagttgaaagtagaggaagaataagcgataaagatttaggaatatggaatgattcacaaatagatggcttaaagaagatagttgatacatgtaaaagcctaggtgcggttatgggaattcaacttggtcatgcaggtagaaagtgtgaaataaagaatcttgagattataggacctagtgctgaagcatttagtagtgaatataaagttccaaaggaaatgagtaaagagaatataaatgaagtaataaatgcctttaaaagtgctgctaaaaggtgtattgaaataggatatgatattatagagatccacggtgctcacggatacttaataaatcaatttttatctcctcttaccaacaaaagaaatgatgaatatggaggaaacttagaaaatagagcgcgatttctaaaagaagtagtaaaagcggttagagaagtgtggacaaaggaaaaaccaataatacttaggataagtgctgaagattatttaaatgaaggaaatcatccagaggatttggctaaaataataaatttggttaaagaagaaggaattgatataattaatgtaagctcaggtggcgttgcaccaactcctgttccaattaaggtatatgaaggatatcagataaaacttgcagagataataaaagaaaatacaggacttcctgtaatggctggaggacttattatatcgccttatatggcagaggaaataattcaaaatgatagagcagatatggttttcttaggaagaattcttttaagaaaaccatactggccgcttgaagctgattcaaaattagatggtgaggtaaaatggcctgagcaatatgaaagaggtaagttcaggaataatagataaccatattaattggcaatagttaattttattaataattatttgaataaattttaattttaaagccagcagtataaaatgaatttaaatgtacaccataataatgaggtgatacatatggataataacaaaaacagaataaaagatagacctaaatctaatgctgaacgtagaaaaatagatcctaaaaataatgcggatttaggcattattgatggaaaaaagataggtgcgtctccacataaagaaaaggatcacctataatataaagaggatatatcaaaatgtttttatctgtttgatatatcctttatattttatattaacaagtatatagatagagggaaattaaattattaattttttataaaagcaattataatagatggtatattacataagcaaaggagactatagaatgaaactagatttaacaatatttgaattaggaaaacttttaaagaaaatagaggataaatatgatttgaacatattagtgaaattagccttgagtggtggatgggctacaataactggtaatgctaatgttttaaagtatccaaataattcaaactgtggctgcaatggaaaagacaacattatagatataagtgtagagcgtgatggtaatgagcatggatctgtaataaaaattacaggcgctaaagataaaaagtttgatatagatatatcaagtactagatacaaagaattacgtccgaataacttaactgtcaacaaaataaaaattaacgaaaatgaaagtaaattaagaattgatgaaaatataatatttacaataggtgcgtcagttgatgatataaaagaacttatagaaaactaaatatatatatacaacattagccagcataaaacagtctaaaatacacataatattaaagagtcaataggaagaggagagtgatataaatggacaacagtatgaaaaagaaacatacaagcaaacataagactttaaatcataatccacaagcagaaagcgtaaaatcagtttttggtgagccaaaagcgaaagattctgaatttactccaagaacttttgactaataaaatagaaattaaacataggcgcgattgtatatattatatagttatatttcagaatgatttctgaaatgtgaattgtataatagagcaaacaatttaatagttaaagaaggaatattttgagtataaaaaacttaaaatattccttttttagtgcaaaagaatttaatgttttaaggtataaatttgaaatattattaatttatttaataattagttattaattagaaatatcaaaatatctatatattagacaggctacagggaaaaacaaaattattatatggatgttatttaataaagttatgaaataacactcacttagtgataaatttgtatggttattgtttaggtttttatttaataggaattaaacagtaagtatttgaaaaaagtagtcataatgtctttgtttaattgaatatattttagttataaaggaggaggagtgtttatgagtatgaactttaaagaatttatagaaacagatagagaaaagtctaacacccaaaagtttgaaggaagttttctagaatatttagatattgttaaggagaatccagaagttgttaatcttgcgcataaaagaatctatgagatgattatgagcaaaggcgtagaggagttaaaaggtgaagaaaaccctcgagtaagaaaaatttatggaaatgatttaataagaaaatatggcttttttaaaaatgatttttacggaattgataaagttataatgaaacttgcaagttattttaaatcagcagccatgaaaggtgaagaatcaaggcaagtattatatcttgttggtccagtaggagcaggtaaatcttcaatagttgagagtttaaaatcagctttagaaagttgtgaaccagtttattcattaaagggatgcccaatgcatgaagaacctcttcatttaattccaaagcatttaagaccaaaatttgaggaaatgttaggagtacaaatcgaaggagatttatgcccagtatgcaggtataaacttgttaatgaacttaagggagtttatgaagattttccggttgaaagaacaggattttctattagatcaagaaaaggaattggagtagttccacctgttgatcctaataatcaagatacatcaatactaacaggatcaattgatatttctaagatggatatgtactctgaagatgatccaagaattttttctctaaatggagcatttaatgtcggtaaccgtggactagtagaatttatagaggtatttaagaatgatgttgaatatcttcatacaataattactgcaacccaagaaaaatcagtaccatctccaggtaagggttcaatgatttactttgatggagtcatagttgctcactcaaatgaggcagaatggaataaatttaaatcagaccatacaaatgaagcaattttagatagaattgtaaaggttgaagttccatattgcttagaactagacgaagaagttaagatatatgaaaaaatattaaagaagagcaattttaaagcgcatatagcgccacatactattgaaatcgcagcgatgtttgcaatactttcaaggttaacaccttcagctaaagtagacgcggtgacaaaacttaagatctacaatggagaagagattgttgaaaaaggaactacaaagaagatcgatattggagaacttagagaagaagccggtcaatatgagggcatgaagggaataagtacaagatttatcataaaagcaatagataatgcacttgctgagtcaggatatgattgcataaatccacttagtataatggaaagtataataaaatctgttagagaactagatattgcagcagatgataaaaagaagtatttaggctttattcaggataatataagaaaagaatataataaaattcttgaaagagaaattacaaaggcatttattcactcatttagagaacaagctgagagtttatttaacaattatatagataatgctgaggcatatgtaaataagactaagataaaagatgtttcaactggtgaagaacttaatccagatgaagaatttatgagaagcatagaagagcaaataggtgtatatgccgcatcagctaaaggctttagatcagatgtgacttcatatatgttctatatagttaggaaaggcggaaaattagattatacttcttatgaacctttgaaggaagcaatagaaaagaaattaacagcttcagttaaagatttatcaagaatcataactaaatcaaaggttagggataaggaacaagcagagaaatatgattctatggttgaagaaatgaaaagaaacggatattgtcttcattgttgtgacgtaatcttaaaatatgcagctaataacttatggagggattagattagcttatggcaatatttagagattacactaacaatcaaattgatcacgacagatccatagaagatagaagaaggcataggcaacttgtagaaaaatcaataaaagaaaatttgggagatatattatcagaagagagtatagttggagagagtaaaaacaaaaaatttaagataccaattaaaggaattaaggaataccaattcgtctatggaaagaactctaagggagtggctagtggagtaggtaacgaaaaaaggggagaaaaattagggaatggaaataagaaattggccaaaggaaaccagggagctggaaatgaagagggtgatgatatatatgaaacagaaatcactctcgaggagctaatggactatatatctgaagatcttaacctacctaatttggatcaaaaaaaatattcagaaatagttactgaaactagcggcaagaagagaggatatcaaactcatggaataagaccaagacttgcaaaaaagaaaacagttatgtcaaagatagcaagaaaacagggaaagaagagagctttaaaggaattagaaagtgatgaagagttagaaagatttccttttagagaggaggatcttaggtactatagggttaaattaaaacctaaaaaagatagcaatgcagtaatgctatttatcatggatgcttctggttctatggatgtgactaaaaaatatttagcaagatcttattttttcgtgttggcaacttttctaaaaagaaaatataacaatatagcatttgaatttatatatcatactacagttgcaaagagagtagatgaattcgaattcttccataagtctgaatctggtggtacttatatatctagtggcattaatgaggcattaaaggtgattgaagagaagtatcctccggcagcatggaatatatatagcatatacgcaagtgatggagataactggtctgaagataatgaaaaagcagttgcagcggtaaaagatatatgtgaggttagcaatatgttcggctatgcagaacttttaccatccacatataccactacaatgtatcataagttcaaaaaagagatcactaatgaaaaatttgttcctgtaattataaaagaaaagaaggacttatgggatgcacttaagattatgcttaggaaggagttaaaggaggaataagaaattggaatatagctttagtgatattgaaaagtggaatgagaaaatagagaaaaaggttaaggaatatgggctagaatgttatcctcaagaatttgaaattataggctttaatgagatgattggatatgaagcttatgttggaatgccttcaagatatccacattggagttttggtaaatcttatgagaaaagtaaaacactttattctttaaatcttactggccttccttatgaaatggttattaattcagatccttgtttagcatatttaatgaaggataatacgttattgttacagatattaacaatggcccatgtatatgggcataatgacttcttcagaaataacagattatttaaagaaggaactaatgctaaatatactttagaaatgtttaatttagatgccaaaataataagaaattatattgatgatccaagtattggatactcggaagttgaaagaatactagatgcaggtcatgcgataaggtatcaatctaaaagaactgttggagttaaggaactgactaacaatgagattaaagaaaatattttaaaagattatgaacgcaaaaaagaaaatagagatattttagatccttatgaagaaattagtttaccagatttagataagattccattggaacctgttgatgatctcatgggatttataataaattatggtcagttacaagaatggcagaaaacagtattaagaattgttaagagagaaacagaatattttattcctcaaattgaaactaaaattatgaatgaaggatgggcaagctatacacactataatattttaaaacaattagaattgccacaagaactacatttagagttcttgaaaaggcataatgatgtaatagctcctgctataggcgggttaaatccttattatgttggtttcaaagtatttgaagatattgaaaaaagatacggaaaggaaaaaatatttgaagtaagagaaattgaaagagattcttcatttttacgacgttatttaactaaagaattgtgcgaagaattaaatttatttcaatataatcaaagaacttttgatgttgtcattgaagaaatttcagatgaaactggctggaaaactattagagatactttaagttatactgctggtatggggaatataccatatattagagttgttgatttgaataagaagaattatacattgaccctagaaaatgttttcgacggaagaccacttgagctttcttatgcaaaggaaacgttgaagtacgttcaagaattatgggggcatgatgttaggctaattactaaatcaagcgataagcaagaagtaatcttaacttgtaatcaggaaaagaagataattgtatcctaaaagatcggaattataaaaaagtaataaacaatattttatgatttaagctaataagcatgtttcatcattatgagttaacttatgaggtaaccaaaagtataaaaatgaatagtttatatatgagagaaagtaatattttgggagacaaagatgaacttaaaaggtagtcaaactgaaagaaatttatttaaaacatttgcaggagagtctagagctagaaataaatatactttttatgctgagaaagctagggatgatggtttcctctatgttgcagaggtatttgaagcaactgcaggtaatgaaaaagcgcatgcaagagaagtatttagaagatatttagataggattaataatacaaaaaataatttgatagaatctgcacttagcgaatctgaagaaagtaaggtaatttataaagaatttgaagaaattgctagagaagaaggttttgatgatattgcagatttttataaagaacttcaagaagttgaagaacatcataaggagagatttttagatttagctaaaaaactcaaagaaggtaagatgtttaaatcagatagagaagaagaatggatatgtctaaattgtggttatatatacgaaggtaaggaagcacctatgaaatgcccattatgtagatatccaagagcatattttagaagattatgtaatgaggattgtaagtagggggaaaacatatgatttatgaatatcctgaagaatttgtggttcctgtggtttatgtagagggtttgaaagagaagcctattaacagaagtttggagtttaagtattttcagattgatgaaagtatgactcttagtgaaaagccgcaagaaaataaaatgtttcagatgagcacgtaccatgatgaagatatttcaaacaaaggaatgatgtttttagatttagatgaagatttgcttcaaaaaccttgccatgaaaaatataagtttgatgatatagttgaaagtgaagaagaacattatagctctaacaatatatttaacgatatagataatgaatatgctgatggtgaaacattaagaatgtaatgtattatttgtagttagtcacttattagggattaactacaaatattttatttagatagtattaattttttgtaaaggattaattatgagatttaatgatttagctaaaaaacaatatgaagatatcgataatttaagtgtattattaaagaattatgtggatgtttatagactattaattgctggagcatcagaactatacggtgtaaatttagcagagaaaagtgaagttaagaaagcactagagagagttgaaaatgtaggtgaattaatagataagttgataagtactttagaacgatgcgaaggttcttatctaaagtattgcaagattaaaaatgaatatattacagtaagtacagagaaagataagatatttactgaaatagataatgaattgaattttcaaaactcagaaagagaagaataatgatgaaaactaaacaaaaaaactctatcttgaaactttaggatagagttttttattatgaattataattaaaatttctttaatttaattttacttaccattaagtatgaaccaaggatcatcaaaagaacgacaagataaatcgatggtgtaatattaaaattaaatataattaatgaaaagaatgccataaagcaacctgctattgttattggtataccagtaaaagcgccgtcaaaatcagtagtattaaatctagctaatctataggcaccacaaattggaaatagtaataaaactataaatccaaataatcctttagggccaaaagattcaagattaaataatatatatactaatatagatggtgctactccaaatgaaaccaaatctgctaaagaatctaattctttacctaattcactagaaacgtttaaaaaacgagctattcttccatcatatctatctaccaatcctgctaataaaataaatgcacctgatattgcatacttttcattcattactgataatatagatataattccacaagataaattaataaaggtaaatacattaggaatacaacttttcctcataaaatcactcctaaaattataaaaaatacttacaaagagttattatagcacataaatgaaaataatataaggtgcaaaattaactttaagtttttattaagattatctagtatcgacattaagtaagtaaaatgatataataaactctatgacaaaggtattatatgtaaatatttataggaatttaatatatgtatttagagctaattataattttgtattaagaattattttaaggctattttttatgtatataaataataatttaagaaaatttattggaggtaggttaatttatgaaaaaggttagattcatatacaacccatactcaggagaaaatagtataataagcgaattagacaacattataaaactacaccaagaagtaggattaatagtagtgccatatagaattcaaaaaggtaaagatttagcagaggcattagatataatagatgaaacttatagctatattttaatagctggtggagatggaacagtggattctttagtaaatgctatgaaaaataaaaacataaatatacctataggtatattaccagttggaactgcaaatgactttggaaagtttattaatatgccaaatgatatagaagaagcatgtaagcaaatattaagctcaaagccagtagctgttgacgttggaaaaataaatgagaagtattttataaatgtagcaagctcaggacttttcactgatgtatctcaaaaaactgatgtaaatttaaaaaatacaatagggaagttagcatattatctaaaaggtcttgaagaattacctaactttagaaagttaaagataaaattatcatctaaagaatgtgattatgacggagagatgtatttgcttttggtttttaatggtaaaactgctggaaactttaacttagctacagaagcagaagttacagacggaaaactcgacgtaataatatttaaggctatacaaataatagagctaataccactttttataaagcttttaaagggcgagcatttagattcggataaagtggtttattttaaaacagatgatttatatatggaatctccagaagacattgttacagatattgatggagaaagagggcctgattttccattgagggttcaatgtattaagggtggaattaaacttttaggtataaaataagatagacagtaataaatataagtaacaggaatatggaatggagcgtaatttgtgaattttgcatattatttatttttgttacttataatttttttgtcaatttcacttataagaaagaatcttgaggtttcaccaaagaaaataaaaatatatttggcattagtaattacattatttttattaaggcatatagcattatttttattgtgtatactcaagaatagtacaataatatattatttaaaaccaataatatttttgaatcatctgtcagtgcctcttatagtgctagctgtaagctatgtttatttaagatctgagaagttgaattttggtggaacatatgttattgcagcaacagtatgtattatttatgctgtaataatgcaaacttcaaagttgacagttcgggtaaattatttatatggatttatcttacagatagataaggaaactattttatttttgttttcgctaatactacttggtgcattactgatactaaatgtaattttattggatagaccatacgcaaataagaagggaatatggtttataattatagcaatattaatagtaatgatagaggatattattatcttaggtggaattaagctcttcccttattcggtaattggcgatatgttatttcttataatcataaatttagtattaaagggctttaaaatattgccaaagaacaattatcgttcctaggaaatggattgagtacgaattcgcgctttagaatatgtaaatagcaggtaaaatactaagataagttgttataagtgtgtagaggatttttttgaataagagtaatatgtgctaacggttaatagacagaaaggatacttagttgcaatatcaagcaactaagtatcctttcttttatatggttctttttcttctatttgaataattatcagatgaatgtttatttgagtgttttttattgctattagttgaattattcttagtattactcatagaatttttttcattagatattttactactaacatttgaatttttatttgagttattcctaggactatcgtttgatttatgcttaccttgatagcctagttttccaggagcaaagcctattaaacagtttttactattaccaattaggtcttctctgtgagctttaagtagagctttctttactttttgataatttttaggaacagcaaactgtattaaagctctttgcatttctttctcttcgggtgtttttggaatataaactttttctccggtaattgggttgaatccagtataatacattgttgttgataagcttcctggtgttgggtaaaaatcttgcacttgttcaggtgtatatcccatctctttaatgtataatgctaaatctattgctgcatttatatcagaacctggatgagatgacattaaataaggcactaaaaattgctttttatctatttgcttattaatttgaaaatacttattaacaaatttatcatagacttctcttgttggtttacccatctgattcaatacttttggaactacatgttctggagcaacctttaactgaccactaatatgatgctcacataattctttaaaaaatgcatcatttttatcatgtattaaataatcatatcttagaccagaacgtataaataccttttttattccaggaagttttctaactttctttaatagagaaagatactcagtatgatctattatcaagtttttacatgggctagggaacatacattgtttatttttgcaagtaccgtgttctatttgtttcttacaagctctatgtctaaaatttgcagtaggacctccaatatcatgaatatatcctttgaagtcaggtaaagtcgttaaaagctttgcttcgtcaattattgactcttgccctctattctgaattactcttccttgatgaaatgttagcgcacaaaatgaacatgagccgaaacagcctctatggcttgttatagaaaatttaacttcttgtattgcaggtatgccgcccttttcttcatatatagggtgataggttcttgtgtaaggtaaatcatatgtcatatccatttcttcttgagttaagttttcttgaggtggattttgaactaaatatctatcaccgtattgttgaattatagttctaccgtttatagaatcttgttcgtagtattctaatttataagcttcaccataagcttccttatccgtagatacttcgtcaaatgaagggactataactgcatttttaatattagatatatctttagtcaaataacaagtcccacgaacacttgttatatttttaatatttgctccatatcttaataactctgcaatttgaacaacggttttttcgcccatgccgtacatcaataaatcagctttggaatctacaaggatacttcttctaactttgttatcccagtagtcatagtgagcaaaacgtctaagacttgcctctattcctccgattgcaatagctgcatctttataagcttcacgtattctgttgcagtaaacaattattgatctatctggtctgtggccagcctctcctccaggagaatataagtcttcacgtcttgttttctttgcggccgtatagtgattaaccatagaatctatattccctgaattaactaggaaaccatatttaggcttacctaattttttgaaatcctcagaactatgccaattaggttgagctataataccaacattaaaaccttgtgcttcaagagttctgcctataatagcagtaccaaaagaagggtgatctacataagcatcgccagaaacaataataaaatctaattggtcaatttttcttttttttaagtcttctttactaataggtaagaattctttacaaagcttcatataatattaactccaattcttaatttattttacttaaagcatatttatattaaaattacgtatattaaagatcgctatattgggatattatactaacgtaataaataattaaaaagtcaaatgaataagcttttaaagcttattcttaaagtatattaacataacaataattagtttacaaacaatatcaataggcaagtgtagtgtaaattcaatgcaactcataaagaaatatttataatttacaaattgaggattaattaaagaaatttttatgtgtttaaaagataaatcaaaacaaaaaattattgcctttttacttctatgtaatataataattagagatagtagtaaattataactaagtgaagatatacagggcggtgtaaaagatggaggaaggacctcagaatataaactataatatggcaaaaactaaatatattcagaaggaaaatcttttatcttgccttaaaagatataagtagatgcaatttagttacaatactaattttacttaaggattttctttctgcagaagtagggggaaataattaagatggaattatctatatttctatatactaacattctagataaaaaagtttatgacgagtttggtgatgttttaggaactctaagagacatttatgtgactacggaggatggatatcctagaataattgggtataagcttaaaaaggacggagtagcctttcattatgagtttagatatatagaatttttaaatagggatggtaaaattaagatcacaacaagaggaagtaaagaaatattaccgatgaggtacagctatcttctttcagaaaatctattagataaaaagatagttgatataaatggaaaacaagttgtaagggttaatgatttgagaatcgcaaaaattgcaggagaatacagagttattggagttgaaacaggaaaattagcgagatacagaagactaaaaatagctggtattatgaaattcatatacgggatcatgagaaagaagttagaagataaagttttaagatgggatgatgttgaatccttggaaatggttgaaaataatttgaaattatccataccatataaaaaattgtcaactctacatccagcggaccttgcagatatattagaaaatctagatacaaactcaagaaaacaagtgttggaatcgctggatgaggatttagcagccgatacattagaggaaatagattcagaatataaggggacaataattaaggaattatctgacagcaaaactgtagaagtgctagaaaatatgcctaatgatgagatagctgatttgttagatgatttagatgaagaggaaagagaaaaaatattagtgaatttagaaaaagaagatgcagatgaagttaaggaattgttgcaatatgaggatgaaactgttggtagtataatgagtaaagaatttatatctgttaatctagatattacagttggagatactattgagatattgaaagaaacaaaaccagatgaagaagttatttattatatttacataacggatgaagaagaacgtgttcaaggtgtggtatctttaagagatttaatagttagtgatagtgagttgaagataagagaaataatggactattctgtatcacgtgtaaggcatgatgatgaaattagcgaagctatagaagttgcctcaaaatatgatttgaattcagtgccagtagtagatgaatacgaaaaattaattggaatagtaattattcatgatttaatagatgaatttttgtatccactctggaagaagaaaaattagaacataaattatttgaatttttaataaaaagaatattttagttttagtatttaccatcaggaatacttatttttatatatttaagaaagtcaacactttttaattaaaactttaaaaagtattgactttttttttagaaagaatataattataatataaaacctatcaaaacactaagaattaaaaactatgaaaaagaaaagtagcataaaggaagtttacagagagaaaaggatgctgagaactttttatctagaatttatgtgaagtgctctttggagttgaaatttgaaattaattatattaaaaaatggagcgatagtatatccattgattttttgatatattttttagtatgattttccgggatcacccgttatagtgatatgatatcttaagtatcaaaattgagagggattagttatttaatccaattagagtggaaccgcgaaatttacttcgtctctataattttttatggaggatgaagtttttttattatatttaatataaaaagatatactaaaattagtagaagtttgaggaggagaataataatatggtttataatggaggattagagttaataggaaatacacctattttaaaaattaataatttaattaaggacgaaaatagtgcagatatatacgtaaaacttgaaaaatttaatccgggtggaagtgttaaagacagagcagcgttaggaatgatcgaaagagctgagaaagaaggagtattaaagccaggggcaacaatagtagagcctacaagcggaaatacaggaatagcactcgcacttataggaaaattgaaaggttatagtgtaacaatagtaatgccagaaacaatgagtaaggaaagaagagatcttataaaagcatacggcgcaaatctgatattgactgaaggatctaaggggatgaagggagctatagaaaaggctctagaaataggaagtggagaaggattttttatccctcaacaatttgaaaatatagctaatccagaaaagcactatgaaacaacagcagaagaaatatataaagacattccagatttagatgcctttgttgcaggagttggaagtggtggaactgtgataggagtatctaaaaatttaaaaaagaagaattcggatattaaagcatttgcagttgaaccagcaaattcaccagttttaagtggtggaaatccaggtggtcataaaattcaaggtataggggcaggatttgttccaggagtttatgataaggaatatgtagatgaaatactacaagtaagagatgaagatgcatttaaaacagcaaaagcatttgctgaaaatgaaggcgtattgattggaatatcttcaggtgcagctgtatatgcagcaatacaggttgcaaaaagacttggaaaaggtaaaaaggtattggctattgctccagatgggggagaaaagtatatatctatgggattatatgattaattaatttaactataaaagttttattaatcatcagcaattaacagtgaaacaattgatttaacttaagatactaatgaagttctattaataattgtatatgtgaaaagctctactgaaaactatagaaaggagaataggctgtgtttaaaaaattaaattacgatctagaaagagttttaaacgaagatccagcagctaaaagtaaactggaagtattattattgtacccatgtattcatgcactaatatcatatagaatcgcacatgccctatatttaaagaaatggtttttcttggcgagattaatttcccaattatctaggttttttacaggtatagaaattcatccgggagctaagataggaaaagggttgtttatagatcatggaatgggagtagttattggtgagactgcagaagttggcgataatgttacgctttatcatggtgtaactctaggtggtacaggtaaggacgtagggaaaaggcatccaactattgaggatgatgttttaataggtacaggtgcaaaggtgcttggacctataactgtaggaaagggtgctaagataggagctaatgctgtagttgtaaagaatgtaccagcaagtgcaacagcaataggagttcaggctaaaaatattgttagaaatagtgcaagtgcagcaataattgaaattagtgatttaaaaggacgcaaaaagaaaatatttaacgatatggttatttaatgctttatagtattggaatatatgaagtacaattaatataaactcgtatcttgtatagttcagtagcatttatttataggaattttactaagttaagaggttttactaaatattaaaatagagcattttttattaattattttattaagaaatgtatcataatctgaaaattaatagatgcattaattaaactttagatcaagaaagtttagttaatgcattttttatattaaaattctgataaagttaaataagttatattaatttatcttggtcataattaaaatgctttttgcaaataagttataataataaaagaagatattagtataattggtgttaaatcttacaataaccttaatatttttggtaattgcatagacatatgaaagcatatataatgtatataaataataatcaataatatattatgcatgtaatacttgtatagaattgaataattgtaataaaatgtaattagtagtataatataaaatgtgattattaagaaaggttggagaaaaatgttatcaccagttgcaataaaattaataagaatgatgccagaaggaataattataaaaatagcaaaaaaaatagtagataattatataagaaaatatgctaatataactgttaatggagcagataatatagataaagtaaaaaaaccaagaatatttgtatgtaatcacttgagtaattcggatggattagttttatcaaaaatgctaaaagagaaaagtgatcctcattttgtaatgggaataaaattgtcagaagatccaataacgaaattaggaactcagatagtgaagaacataccaataaagcctaattctgctgataaggaagctattacaagagttgttaaaactcttaaagagggaaatgatattttaatatttcctgaaggtactaggagtaggacaggtgctatgatagaaggtaaaaagggaattctgttatttgcaaggatggcgaaagcagaaataattccaattggtatgtctggaacagataagttattacctataagtaaaagtggtgatatgggagcagagaaatggcaacatgctgatgttactataaatataggtgaaaaaattgtatttcctgctaaagaaaaggatgaagacaaacatgaatatgataataaatgtatggatatcctaatgaggagtatagctagtcttttacctgaaagttatagaggaatttataagtaaggagattacaaaagatatgaaagcaaggacaaaaaaaattgtagatatattaaaagagacatatccagatgcaaaatgtgaattgaattatgaaacaccactacaattgctgatagctacaatattgtctgctcaaacaacagataaaaaagtaaatgaggtaacaaaagatttatttaaggattatccagatttagattcacttttaacattaacgaatgaggaacttgaaaaacggataaaacaaataggtttatatagaaataaatctaaaaatttaatacttatgttcaatcaacttaaggaaaaatttaacggagaagtcccaaagacaatggaagaaataacttcacttgctggagcgggaagaaaaactgctaatgttgttttatcaaatgcctttaatgtaccatctattgctgtagatacacatgtttttagagtatcgaatagattaaaacttgcagattcggaaaatgttttagaagttgaaaaacaattacaaaaagaactaccaaagaaagagtggactcttatgcatcatctacttatatttcatggaagaagatgttgtagtgctagaaatcctaagtgtggggaatgtccaataagggatttatgtagttatgataataaaactaacagataaaagaatagttataaaattttcacgaaccacaattaagacaatttatagtcaaagtggttcttttaattgtgctgttaatttaataaaataaagataagttagaatgaataaatttaattaacgggaaatattaataagtattttggaggtaatctatgaaaattggagttataatgggtggtatatcatcagaaagagagatatcattgcaaagtggaaaatctataattgaaaatataaacaaggaaaagtatgaagtgttaccaattgtaatagataaaaaagaagatataataaataaatctaaagggatagatttcgcacttttagctttacatggccaatttggggaggatggaacagttcaatcagtgcttcaaacactaggtataccatattcagggtgtggacctttaagtagtgctatgtgcatggataaagacgtatcaaaatccgttttagaggcaaatgggattagaactgcttcttggattaatttaagaaaagatgataatatagatttcaataaaataaatgaattaggatatccagttgtagtaaaacctactcatggtggatcaagtgttgcaacatttatagttaaagaagataaggaaattgaaaactgtgtttcagaagcttttaaatgggatagtgaagttatgatagaaaaatttataaaaggtgatgaaataacttgtcctgtatataataataaaatgcttccagtaattgcaattaagcctaaggctgaattctttgactttacatctaaatatcaagatggaggggcagaagaaatagtggttgagctagaagcagagttacacaaggaagtagaaaagatggcgttagaaacttataaggcacttaaatgcgaagtgtattctagagttgatatgatagttacagaggaaggtgtaccatacattttagaaataaatactcttccaggaatgactaaaaatagcctaattcctaaaagtgcagcagctttgaatataggattttcagaactaatagatatgatcatacaggattcattgaaaataagcagatagtatatgaagtataaaactttttgaatatttataacattaaaattgaaaaactacttgtttaagaataccttagacaagtagtttttatcataatttctattgaaaacaatctgcaaatcttcctgtaaaaccttttagaaaatataacttatattaagacaacttagttattgtttttttttgcaatctttacatacgcccttcataaccaagtcatgatctgttaaagtgaagccagtcgcattttgaactaattcctgaatttgaagcatagggcaaggaatttcaacttctttgtgacatatatcacattccaaatgatgcctatgagtttttccttttagcttatatgaaaagactccatcatttagagttattttttcaataatttctttttcttcaaataattctaaagttctataaaccgtgctcaaatttatatttatattattgcttttataaatctgatatattttttcagctgacaaactgttttcagaattttttaatatacttaggatttctgttcttcctttagttattttaattcctttatttttaagaatttcctttggttccattttcatatcccctaacagctaaatattaaatatattatatcacatatatttaatatcttaaaaaaatatcatcttaaaaccaaaaaatataagagctatcccgccaaaaaagttagcatacgttgtaacaaattttatttttttaatatatctacacataaaaaatcctactgtacatgtaaataaagtgattaatccaatcaaaattgaatcaacacaaagtagtagattgtatgaaatctcatgaaatgcagtgaatcctataactaatgcatctatactaacggatattccaagtattaaacaagtagtattctttattaaaatttcagtttctttttccttaaagccatctattattataagaattcctacgattgccataattattccaccagcaatggaaggtatacatgtaatataagtatcaaataaatatcctaaacttccacctacatatgtaaataaaaactgaaagaatgcaaatgataataaaaactttattttatggattctattaattctaggatttagaccgattcctaatgttacgccaaaagcatccatggccagtgcaattcctattattataatgtcgtacaaattcattttctcttcctcctttaaaattagacttactctataataattaaagtttttttaatatatgcaaaaattttaaaaaaagtctttattaaatcttttttttgttgtatattaataaatagtgtattactattggctaaatagtatagcatatttaaccaaattagtatagcaaacaaggaggaaatttcatgtcaaattgtataatagctcaatctggggggccaacagcagtaattaattcaagtgtagtaggacttttaaatgctaataaagaactaaaaacttttgaaaaagtttatggaggcctaaatggtattgagggtatattaaatagaaatataattgatttgtcatcagtttcagaaaatgaaatagataattttagatttactccatcttcaggacttggatcttgtaggtataaattaaaagatttagattcttgtagtgaagaatatgaaagtttaatagaaatacttagagaatatgatataacgtcattcttttatgttggtgggaatgattctatggataccatagcaaagctttcacgatatgcaaaacaaaatgacattggaataagttttataggtatacctaaaactattgataatgatttaaaattcactgatcatactcctggctttggcagcgcagcaaaattcattggaacaacagcgcttgagacatatttagatgcatcagtgtacataaacaacggtatatttattttagaaacaatgggaagggatacaggatggcttgcagcttctgcatgtattgcaaagcttgatggaaaaccaattgcagattttatatatcttcctgaagcagcttttgataaaattaaatttttaaatgatgttaggcaaagatttgaagaacaaaataaagtgtatataattgtatcagaaggaataagagataaagatggaagattcatttctgaatttgattgtgtttctcaagataaatttggacacgttcaattaggaggtgtatctgaatacttaagaaggataattcttgatgctggatttacaacaagagtaaaagcactacaacttggggttcttcaacgttgtgcaatgcattgtgcttcagacactgatttaacagaagcgtataatgctggaaagatggctttacaatatgcttcacaaggagaatcagggaaaatggttagcattaacaggttatctaatgagccttatgaagtgaattacccattagttaatgcagaagatgtagcaaataatgttaagtatttccctatagaatggattaataaagaaggtaattttgtaacacctgaagcgtgctcatattttgagccattaatcaaagattctcctaatttagcttttgagagaaatcttccaaaatataaggtatttaatcaatagataataagtataaaatcgtaagcttagatgttttaatatttaactaatagaaggatgtatatatgaagaatttcatttatacatcctataaattaatagaattttcaatagtataataaattttattatactatttatttttagttctaaatcaagaaaatttgttattttatttttcgtaaagagatatcttctaatacatttaaaaaggtatcaacttcttcaattgaattatataatgcaaaacttactcgtatcattcctaacatttttttatctggattatcaaggaattctttagcttcatcttcacttacgttcatgagccttctacaatatggatgggaacaaaaccagccatgtcttacagaaattcctttctttttagccaagatatcagctacatcatgatgatacatatcctctatattaaaggtagcaattccaagcctatcactgatgttttcagtatctccatagttcataattttagggattttcttaagtccttctatagtgtgctctaaaagaagtctttcatgtttttctatatagtcgtatccaatggtattaataactcgtaatgaattaactaagctcattacacccaaaaaatttggtgttcctgcttcattcttctctggtggtgtaagaaacttaacctctctatccattactaattcaacggttccaccacctaaataatctggatctgcatccatgaaatcctcttttaatcctattatgactcctataccaaagggagaataaattttgtgcgacgaaaatactaagaaatcaatttgatcatcatctgtatccccgctaatattaactcttgtgtgtggtacaagttgtgcaccatctacaatcaatttggcaccatatttatgaaccagttttgctataaaatgaatatgatttatataaccagttacattagaagctccagtaagagatacatattttattttaccattgcttttctttagtttctcttccaactcttcaagtttaagtctgccttgttgatctacttcgatataatcaacgttacctctttttcgccaaggcaaatcatttgaatgatgctccattctagaggttaatactatttcgtctggagttttagtaagagtttttgctagtttgtttataccttcagttgtattactaacgtatattacaacatatttatctttatcttttacattgaaaaaatccaataaaaaatttttagattctttatataaattggtggttatttcagctttttgacctgttcctcgtcctatagaagcataagtattgctcaattgttttatatattcaatacttgacttaataggcggagttgtagctgcattatcaaaatttattccatctatacagtttccatctgaatcacacactttttcatctaatccaacaaataagtctttaatgttttccttattttctatcttcatatgcatctcctccaatatatatattattcctataatatatttattgttcgcttaagagggctgtaaaattcatatctttttctttccattttgtactatatataattgttatgcatattaattaagagaagcaaatattatttatttataggaggtagtttaaaatgaaccctgataagaagtatatgtctcaagtcagctcgagtgataacgatattagatttgttccaccagcatttatgagtacaaatatctacgaaaaagcttcgtttggtattgatgataataatcgtaatttagatttatttccttccgaaacaggcatgcctgaattatgttattattccgataatcaaaatgagggaattagtagtggtctcaattttaataacatagctaataatgaaatacctactacttttgatgcactaagaggtcttgatttagatttaaatgaagaagatcttgaaagaaataattctgataatgatgtgaataaaatttatgctagaattgaaagaagacatccaggaatattcgcgactctttattcatatagaattcctcgtccgatagttagagtaattataaaaaggttgataaaacttacattagcatattgcgataaaaataataactattaataaccagtttaacatacaaaaatatcttgaagatttacaactactataatgtaaaatctttaagatatttctttacatagcttttaaaaataggtttcaatatatatgagttacacgcttatcatagctaaaatttttttaaaaagtattggttttatactttcgatatctgttggttctttcaatattatagtagtaaaacatatgctgccaactaattcaaaaatcataaataatgtcatttcagcttcttcttcgttcattcctgatttagttaggttttttacaaaaatatctagaactttctttacatcattataagcttctggtttcattattgcctttctataaagtccccatgaaatattcttattaattagcttcaacagagaaacattatcttttaaataatttattatataatcaataaagaatagtgtacgttctttaaaatctttgcttccaaaagcatttgttttagctaatccttctcgtattatttcattacttttttgaagaattaatttatttaaaatatcgtatttatcactgaaatacagataaaaagttccttttgctacttttgcattcttagttatatcatcgatcgaagttttttctatgccatttttaagaaataaatcatatgccgctaaaaataactcttcctcttttaattgttttttattctgggtaagagatttgttgttattctttaaagtcatattttgcctccaaattacgtgtttaacttattataaagcaaattaaataataatccaaattttacgtagcgataataaaaaattatcaattaactcttaatatagttaaattgatataacaccgataagatagtataatttagtagagaaaatttagttaaactattaatccatgatatataggatttacgttttaatattaaattaaacctttatagtttaaattctggattttcgtatgaaatactggaggataaaaaatgattgtattaagttgtaaaaatatatgtaaaagttatggtataaatactattttgaaagatgtaacattttcaataaatgaaggagataaggttggtataattggatcaaatggagaaggaaaaacaaccttgtttaagatattatcaaaagaaattacgcaagatgatggagaagtctttatagataaaaataaatctttgggttatcttgctcaacatttagcattagattcatgcaaaacgatttatgatgaaatgctcattgtttttgaagatctccaaaggttagaacggaagattacagagttagaagctaagatgaatgaaccgtatgatgaaaataatgcttcatatcatgagaaaattataaaagactatggaactgcccaagatctgtatcaaaacagaggtggatatacatataagggggaaatatctagagttcttaaaggattgggatttactgaaggtgactttgataaactaatttcaactttaagtggagggcagaaaactagagtcgcactttgtaagctattacttttaaatcctgatatattattgcttgatgagcctacaaatcatttggatttggaagcaattgaatggcttgaagaatatttaaaaacctataaaggaactgtaattgtaatttcccatgatagatttttcttggattctgtaacaacaggaacatttcaggttataaatggtcatgtgaattgttataatgctccatatacaaaatctttagaacttatgaagaaagattatgaggctaaattaaaagcttataatttacaacagacggaaataaaaagacaagaagcaataatagaaaaatttaggtcattcaatagagagaaaagtataaaagcagctgaaagtagagaaaaggcacttgataaaatggaaattgtagatgctcctgataaagaaaaaaccgcatctaagattaaatttgaggcttccgttaaaagtggatatgatgtgcttcatgtggaaaagttggctaaaagctatggagaaaagaaattattcgataatttatcttttgatttaaaaagaggagaaaagattgcgttaataggtgaaaatggccgggggaaaaccacactttttaatataataatggataaagttaaaagtgattcaggagttaaggttttaggagtaaatgttaatgtaggatactatgatcaggaacaatctaatcttgatcctaataagacaatattaaatgaagtatgggatgactttccagagttaactacaagtgaacttagaggatttcttggatcatttctttttagaggcgatgatgtatttaaagaaataaacaagttgagcggaggagaaagatgtagaataaatctcctaaaattaatgttatctaaatcaaacttacttctattagatgaacctacaaatcatttggatattccttcgagagaggctcttgaagaagcaattttaagctatgatggtacattaattgtaatttcccatgatagatattttttaaataaagtaattaatagaatattggaattagaagagcatggagtcaatgaatatcttggaaattacagctactatactgaaaagaagaagaatccacagagatttgaaacatatgaggggctagcatctggaaagacaaaaactcaattaaatgaagaaaagaaaaagaaaaaggctctagagaaagaagctaaggctaagcaaaatgaaattaagaatatagaaactaatataactcaaaatgaagaagctcttgaaaagttacaggaggaactttgtaaagaagaagtttattctaatccatctgaaagtgagagagtaaataaggaaattaagaatcttcaagaaactattgaaaaattatatgaacaatgggaagagctttctagttagtttaatttgagatagactaacaagttataaagagaaaactgggagaaagactattaacattataaataaaggcatgttttgtgtatggtgcaaatgtgaacttaattacagtttattaggtttcataaactatgacaatgcatgccttttatcaggaaattatatgtgtattatatgcacatatagaggatattttatattttaattattttgatagtcatacataaaaatatgcatgaacatattttataaaatattaagaactactagtaattttttttaagatatttaggttagaatgaaattataatagaattcagatataaaatttttagattggagatggaatgtttggaaaaaggaactattctaattgtggatgatgaaaaggaaataagagatttagttgatatatatcttaagagtgatggatttaatactataaatgcatgtgatggtttggaagctattaatttagttagagataatgatatagatttaattatattagatgttatgatgcctaacttaaatggaatagagacttgtttaaagattagagagattaaagaaatgcctataataatgttatctgcgaaaagtgaagatattgacaagatattaggacttaatatgggtgcagatgattatttaacgaaaccattcaatccattagagttagttgcaagagtcaagtcacaacttagaagatttcatatgtttggtaagaacacaaatatgttagaagtagaagaagaaaatataatacaaatagaagatcttacaataaagttagaaacacatgaagtattgttaggcgataatatagtgaaactcactccgacagaatttgatatattatcattgttagctcaaagccgaggtaaagtattttcaatagaaaatatttatgagagtgtttggaatcaggaattcatgacttctgataacactgttatggttcatataagaaaaataagagagaaaatagaagaaaatccaagaaatcctcgatttataaagactgtttggggggtaggatataaagttgagaaataaagatgttggaaggcatagaacttttagcaatgacattccaaattcaaaattactacagtatactgaaaaattaatacgaagtataaaaaagagaattgagaagaatataagatttgaacttatgatggttataggaatatgctttttagtagcatttatcttctatagtttttctaataatctttttaagagagagcatactgagccgcagataaaatatgattatgattctattgagaggtctgcaaatgatttggctaaacaaatagagtctcaagaaaatttgaaattagaagataaagataagattaatgatattttagaaaatgtatctgatggagaggaaagttatataacagatttagatggaaaggtgttatataaaactaaaaatgttgcagaggaaaatatagatatttatagtgcactaaaaagtgcaatgacaaatgtaaatagtgaaaagattggtgaaccaagagaaaaaagttatataatgcctctaaagataggaactgatagggtgtatttaatctattcaaagattccagaagcaaggataacatacaatacaattagcacgtcaaattcatctttagcactaattcttacagttatagtttttatagttttatttgttgtaataactaataataagatgaaatatttagatgagattgcagtcggtcttaagataatagcaagtggtaacttgaattataggatagaagaaaagggaacagatgaaattaaaaatatagcttataatataaatcaaatggctaaagaaattggagagaaaattagtgctgagagagatgcagaaaaaacaaaagcagatttgataacgaatgtttctcatgatttaaggacgccactgacatctgtgatgggatacatagggcttgttattcaaaacaggtataaagatgaaaaagaaatggaggaatacttaaacatagcattcaataaagctgaaagattaaagctactaattgatgatttattcgagtatactaagctaaataacagcggaataacactaacaaagactaaagttaatctagcagaatttctatcacaattaatagaagaattgacaccgttactcgatgaaaataaattaacgatatataaaaaattcgaatctgaaaaaatctcagtttctatagatacattaaagatgcttagagtttttgagaatataataacaaatgcaataaaatattcgtataaaccaggagaaatattaataggattatacgagaaggatggtaaagccattgtagtttttagaaataaaggagaccatttatcaaaagaaaaaagtgaaaaattatttgatagattttatagactagatgaatctagaaatactaatacaggaggatcaggtcttgggttagctatttctaagaatatagtagaattgcatgacggcaaaatatgggctgaatcagtaggaaataatataagtttttatgtacaactaaacctataattaattactaaattataggtactttttctgttgtaaattaatatttatattagagaagtatttttatgtggaggaaatatgcaaaacaaaaatcctaacagtcgttttggagtagacataaatgaatatacaacaagtgttcagtttaacgtattggcaacaaaagtagattttttgtacttgagagcgtcaggatctgcaacaggaaggtttagggttgatagaaagtttgtagattatgcgaagaatagtaggaattatggaatcccagttggagcatatcatttttctatgccatcttatgatctaacagatgcggatagacaatgtgatgactttataaatacactgcagcaggggttcggaaacaatgattatggggatttgtttcctgtaatagatgtagaggcacctttggataaatcaataagtacaagaacattaattgattggattgatagatttagaaaaagatttgaaagaaaaactagaagaaggcttatgatttacacaggaacaaattttatagagctttatgataatttttatattcctggacgtggctatccactaaaaaatatgccactatggattgcaatgtatacaagtatccctattaatcctgaattccctcctaatgttggaggctggaccagatggaggatatggcaatatagtgaaagccaaactgtacaaggaattgggaatcctgttgatgcaaattggggaccggataatgtagatttattaaggcagcctcgtgttgttactggattaaaggcagcgtaccagaataggaacataaatgtttcttggaatagaaatcctgatgtagatttattgggatataacatttttgtaaatagagaatgggttggaactgttgatgaaaatgctacaagttatttaataactagtaataaggtaaatactcagaagaatgcaccagtagaagtatcaattgaagcttttgattatgatggagaaacttcaaaaactcgtgcaaaagtaaatctataataaatagtatcgtatttcagcttatatgggaatataatcatatttctattgatagttggaatatgatataatgaaaacattgatgacaatttgaaaaatatgtaaattatcatcgataaatgtactcaaaataaatattaaacatagaagatgtatgatatttaattccttgaaaggagaataagggagtggaaaaacgcaccggcaaaagagcaaacgcttctaaaaacaattataataaaaagaagaaaattatgctcgcaatatttacattaattatagcaggagctgctgtactaattgcatactcaatagctataaaaggtatagttaaggagtgggatgataaaatatatccgggagtaactgtacaagaagtaaatattggaggaatgactaaagaagaagctaagaataagcttaccgaaacatttgtaacatctatagaaaataaaaagttatctattaaaatagaggacaaacaatatgaacttatttactctgatattaatcctaaatatgatatagatgcaactgttgaagaggcttataaacttggaaaaaaagatggggtcttaagcagatatataagcataaagagtaataatagtaagagcaaggaggttccaatcaaattttcttataatgaagaaaaattgaaggaatacgaggaaaaacttcagatagctgttaatcaacctgctaaagatgcagcagttagtatacaaaagaataatattgtgattaaaccagagacagaaggaaagacagttaatttagatacactagatcagaagttgaaagaaaatataaatggagatattaattctgataattcagtatcaattgatttagaagtaacaaaacctaaaataactcaagaagatctatccaagataaaaggagtaatgggtactttttcatcaaattattccacatcgccggaaggaagatgtaataacatagaaatagctacttcagcaataaacggaacaatagttatgccaggagaaatatttagttttaatgacgttgtaggacctagaacagctgaaagaggttataaggaagctggaacatatgttggaaataaaatagaacccggaattggtggtggaatatgtcaagtatcgaccactatttatagagctgctatgaaagcaaacctaaggtctattgaaagaacaaatcattccatggctgttggttatgcacaacctgggcttgatgccactgtttcatatggatatttagattataagtttaaaaacacatatgattttcctatatatattcaagggaatacgtcaggtaaagtagtgacttacagtatatatggagatcctagtgctttaaatggaagaacatatgatatggcaagtgaaattcttgaaacaataccaccagaaacaaaagtggtagatgatagcagtttaccagtaggacaagaagtaacagagggagctggaatgactggttatagagcaagagcatatcagataacttatgaaaatggttctgaagtgaatagagaagtagtatcaacagatacttatgcaagtgtaggaatagtagtcaaaaaaggaactcaacccgtagatgcgactcaacagccagaaacaacagcagagccgccagcagctcagccaacagcagaaccacctgtagctcaaccaacacaataggtaaaaatttaatatttataaaaaattcaaagcatattttctttaggaattattaagattaattaaagaaaatatgcttaagttttattaaggttaaaacaactttaatatatttaataatttactgattagaatacacaataatataccttttatagtgaaaggcttttccatggttaagcaattattatttttgacttgttatgaaccatatagtataattttaaattaaagtgaaataatttttgtacaaaataggagaaggtgacgttttgaatttaaatatagtattatatgaacctgagatacctcagaatactggaaatattgcaagaacttgtgttttaacaggcagcaagttgcatttaataaaacctcttgggttcgaaataaatgaaaagcaagtgagaagagcaggtttagattattggaaagatttagatctagaaatacatgatagctatgaagaattcttgaaaaaatatggtgataaaacaatatatttatccactacacatggagaaacgcattttgatgaaatttccttcaaagaaggggattttataatgtttggaagagaatctagtggagttcctgaagaggtgcataataggcatattggatttagggttccaatgataaaatcaagtactagaagtttaaatttatcgaatacagtagctatagtggcttatgaagctttaaggcagataggatttcctaatatgaaataattgaagaggaatgaagatatatggaaaagataaaaattataacagatagcactgctgatctgccaaaagatatatatgagaaatacgatatagaagttttgccattattgataaactttggtgaagaaagttatctagatggcgttgagataaatacggatgaagtttttgaaagaattagaaatgaaaatatacttccaactacagctcaagttactccgaatagatttgttgaaatatataagaagtacttagcggaaggatataaaattatatcaattcatatgtcttctgtgatgagtggaacataccaatcggcatgtattgctaaggaaatgctagaaagccaagatataatagttgttgattctcagaatgtaacagccgctttaggaatacttgtattaaaagctgttaagctcagagaaaatggttataatatttcagaagtagaagaaaaattaaatagcattagaaataaagttaagctttcagtttactttgattctttagaatacctcgtgagaggcggaagaatttcaaaaactgctggcatggttggtggaatgcttggaataaaattaatacttgaaataaaagatggtataatgtcagttaaagataaaattagaggaaataaaaaggcgattaagaaaattattagtgatttagaaaacgcgacgttagatgatgaagtgcctgtaatattgattgacgtaaataatattgaagtaaaggaagcacttagaacatatatgaaggacaatggtgttaactttattgaatgtccagttggatcaactgtatgtatacattctggacctggctgctgtggattagtttttttaaataaataaatttaattaataaataaaaaacatgcttttagctacaatttatatttaaacatagttgatataagtagtatataagcatgtttttatatttattttaccagacctaattttcatagttacatatagtggacttgcaatatttacagaataggaggtatactaatagaaagagagatcacttcaataaatttaatgaatacgtttaattaaaaataatttatataaattataaggaggaaacttatgaatttggattataacatgaagatgacccaggaacagagattagtactcactcaaaatatgcaacaatccataaagcttttacaaatgtctcttcatgatttgagagaatatattgacaatgaatattcggaaaatccagtgttagaggttaatgaggaaataagctcatatgatgatgaacagataaacagagacgttaatatagaagacaaatacgatcataaaaaattagttgaagaattatattctgataattacaaggatagatcagaaacaaattattctaatgaagaagtttcgccattaaatttcattgagaaaaaagtatcactaaaagaatatttacaagagcagttgattgaagccgacatagatcaatatatgttagatatatgtaattatattgttgaatcattggattatagaggctatttggaaatatcaacaggagaacttgcagaagaattgaatatacctgaagagatagttaataaggcattagaagtggtacaggcgttggaaccatatggaataggtgctaggaatatcaaggaatgtctgcttatccagagcttaaaattaaatattttagatgatgtaatagaaaagataattttaaatcatttagaaaatattgcagaaaataaatatgaaactgtggcaaaggaccttaatataaatccaagagaagctcaaagatatggtgatttaataaaaaagctggaacctaaaccatcaagaggattttatacaggagaagaggttaattatataattcctgatgctgaaataaagaatgttgatggtgaatttttcattttgatgaatgaaagtgttttgccaagacttatgataaataaaacatatagagatgttttaagaaataatcaagattcagaaacaaacacttacgttaaggaaaaaattaatcaagcacttttcttaattaagtcaatagagcaaaggaaaaatacattatataaggtgttagaatgtgttgttgaaaagcaaaatgatttctttaagtttggaagacagtatataaaacctttgacattaaaagaagttgcagaaataatcaatcttcatgaatctactgtaagtagagcaattaaagataaatatgttttaacaagttatggaacagttaaaataaaagatttattcgcaagtgggttatcctcaaataataatgaagatatggcaacttcaaaaataaaaaatgaaataaagaaaataatagaagaagagaataaaagtaagcctttgtcagatcaactaataagttctatgttagtagaaaaaaatatgaatatatctagaagaactgtcgcaaaatatagagaggaattaggtattaaatcatcttctgcaaggaagagattataaaaattccataaaataattactttaaaattttaatgttaaaaattcaattgtcaatattcaattacgttttaagaatatgttaactttgagtatagtaatatataaagttcatgattactttttctgtaattaatattgacagttgataaaatggttcttgaattcaaaaatactatttcacatagctattattaagcgtaataatattaaatatgaaacgctgtataaaactagaaaaaagtttgctaataatttattttgttaggttttttttgttttttttgaaatattataaaaaaagttttcctaaagactttaaaatttcaaaaaggtgttttataataatagatgtgggacgtaatgaaatgatatgggacacgtagtgaccaaaggagtgtttgagttgcaggaaatattagaattacaaaagaagatagttcctgagcttgtaaatacattggagaaaaggtataacgtactcagaacaatctttcataatcaacctataggacgaagagtactcgctgatatgttaaatgttggtgaaagaacagttagaacagaaataggttttttaaaagaacaaggtttaattgagataaatacttctggaatgacagttacaagtgaaggcgtagagattatacacaaactaaatgatttcattcatgaaataaaaggtctttcagaagttgaaaagaaaatacaatcttctcttaacttaaaaaaagtaatcatagtcccaggagatgtagaagaaaatcctttagttttaaaggatttaggaaaagcatgtgctaattatgttaaagatgtgctaaaagataattctattatagcattaacaggagggagcactttaaaagaagttgtagaagcttttccaagagtaacaaatttatctcagatacaagtagtaccagctagaggtggaatggggaaaaaggttgaaacccaggccaatacgttagcagccactttggcaaaaaaattaaatggtacttataagatgcttcacatctcagaaaatttgagtctagatataataggcaccttgcttaaagaagaggcagtaaaagttgttatagatactatacataaggcagatgtactaatttatggtataggtaacgcggtgcaaatggctcgaaaaagaggtgtgccacagcaagaaattgataatttgattaataatggagctgttggagaagcatttggatgttattttaataaagattcgaaaataatctcagaaactaccgcaattggaattaaaattaatgaagcaagaaaaataaaaacacatattgcagtagcaggtgggaaaaataaagtagagtcaattattgcaactgaatataacgacaatgatggtgttttagttacagatgaggcagcagccaaaggaatattaagtaaactaaatagttaaattcagttattaaattagtttgtaaaatttatttttataaaaaagaaaagcattattaggaggtaattgtaatggtaaacgtagcaattaatggttttggaagaataggaagattagctttaagattaatgattaacaaccctgaatttaatgtggttgcaatcaacgacttaacagatgctaaaatgttagctcatttatttaaatatgattcagctcaaggaagattcgatggagaaatcgaagttaaagaaggagctttcgtagttaatggaaaagaaattaaggttactgctgatgctaagcctgaaaacttaccatggggagaattaaacgtagatatcgttttagaatgtactggattctttgcatcaaagaaatcagcttcagctcatatcgcagctggtgctaagaaagttgttatttcagctcctgcaggaaatgatctaccaacagtagtttacaatgtaaaccacgacatcttaaaggcagaagatacagttatttcaggtgcttcatgtactactaactgtttagctccaatggctaaagtattaagtgatgattttggattaacaaaaggtttcatgactacaattcactcatacactaacgatcaaaatactttagatgctccacacagaaaaggtgatttaagaagagctagagctgctgcagcttctatcattcctaactcaactggtgctgctaaagcaatcggattagttattccagaattagctggaaaattagatggtggtgctcaaagagttccaacaatcactggttcattaactgaattagtttgtactttatctaagaaagttactgtagatgaagttaacgctgctatgaaagctgctgcaactgaatctttcggatacactgaagatgaaatagtttcttgcgatataatcggaagcagcttcggttcattattcgatggtactcaaactaaagttatggaagttaatggagaacaattagttaaagtagctgcttggtacgataacgaaatgtcatacactaaccaattaatcagaactttaggatacttcgctaacttaaagtaatttgaattatatcttagaacataaagagcgcaaatttatgttaaagtaaataagtctggttttgtagtataaggctataaagccagactattttaaaatgaaggaataatcaataaaataaatatcagaggtgaaaataaatgaatttcaataagaaaacaattgaagatattgaagtaagtggaaaaaaagtactagtaagatgtgactttaacgtaccacttaaagatggagctataactgatgaaaatagattggtaggagctcttccaactattaaatatttagtagaaaaaggtgcaaaggttattctttgttcacatttaggaaaagatgcttcaaaatcattagcaccagtagctacaagattaagcgaaatgctagggaaagaagttatttttgctagagatgaagaagttgttggcgaaaacgctaaaaaagcagtttcagaaatgaaagatggagacatcgttttattagaaaacacaagatgcagaaaagaagaaactaagaacattccagaattctctaaagaattagcttcattagctgatgtatttgttaatgacgcatttggaacagctcatagagctcactgttcaactgttggtgtaactgattacttagatacagctgtatgtggatacttaatccaaaaagaattaaaattcttaggaaatgcagttgaaagtccagtaagaccattcgttgctatcttaggtggagctaaagtttctgataaaatcgctgttataaacaatcttttagataaagttaacacaattattatcggtggaggaatggcttatacattcttaaaagctcaaggatatgaaatcggaacttcattagttgaagaagatagacttgaatatgctaaagaaatggttgctaaggctgctgaaaaaggagttaaattcttattaccagtagatcacagagttgctgcagaatttaaagatgtagaagctacaattactgaagatcaaaatattccagtaggaaacatgggattggatattggaccaaagacagaaactttatatgctgatgcaattaaagatgctaagactgtaatttggaatggaccaatgggtgtatttgaattcgaaaactataataaaggaacaattgcagtagctaaggctatggctgatgcagatgctactactataattggtggtggagattcagctgctgctgttaatattttaggatttggagataagatgactcacatttcaacaggtggtggagcatcattagaattcttagaaggtaaagtattaccaggaatcgctgcattaaacgactaattttaaataattggttttgaataaataatattttcaaaagaagtttataagtttagttagattatatagtgaaacttgataggtagtgattgccccctaatgaatttaagttgaacttatccacaagagtgtaaacatatctcttatatttaagtaatagatttttgaagatgctagatggttaagtaagatatttgaatagttagggaatatatattcaaaaaaagtaataagctatttttttaggaagcaaattcgacgggatttggtgggtccaaggccaaggagccattcttaaatatttagtttgtaatttttgtagatatataataagcttaaggaaatttgatcactttccttaagcttatatagattcataatataattaagacaatttataagtttcattaataaaaaaattatgaggtgagtggaatgagaaaagcaattatcgcaggaaactggaaaatgaataaaactattgatgaagcagttaaaatggtagaagaattaaagccattagttaaagatgctacatgtgatgtagttgtatgtcctacatttgtatgtttagatgctgttaaaaaggctgtagctggttcaaatataaaggttgctgcacaaaacatgcattttgaagaaagtggagctttcacaggagaagttgctccaggaatgcttgaagctatgggaatagattatgttgttttaggtcatagtgaaagaagagaatacttcaatgaaactgatgaagcattaaacaaaaaagttaagaaagctttcgaacataatattactccaatactttgttgtggagaatctttagaacaaagagaaaacggaactactaataaagttattgaagctcaaataaaagctgatatagctggattaactaatgaacaagtagaaaaacttgttattgcttacgaaccaatctgggcaattggaacaggaaaaactgctactgatgaacaagcaaatgaaacaatcaaagctataagagctatggttgctgaaatgtatggatcagaatcagctgaaaaaacaagaattcaatacggtggatcagttaaaccaaatacaataaaagcacaaatggaaatgtctgatatagacggagcattagttggtggagctagcttagttccagctgatttcgctgcaatagttaattattagtattaaattttttaagctgtcttagaatgacgaaaatcgcactaagacagctttttttaagtaaataataatttgatattaaagtaattcataaaacatttatattataataacataaatttactttaaatctttataaagttgcattaagtgtaaaaaaataatataatttaagatattaatagtatgtaaaacataataaatgataatatttaatattatctatttataacaaataaatttatttagttaacttacagatattaatttaataaagaaatctaagaattttatagtatattttgtgaaaatatttggagggataggaaatgtcaaaaaaacctgttatgttaatgatattagatggttttgggattgcaccaaaatcagaaggaaatgctgtaactttagcgaaaaagccaaatttagataaactattcgaaaaatacccaacttcacaattacaagctagtggcttagctgttggattaccagaaggtcaaatgggtaattcagaagttggtcacttaaatatcggatctggtagaatagtataccaagaattaacaagaattacaaaagcaatagcagatggagatttttttgagaacgaatcattaaaattagctatgactaatgctaaaaagacaggatcgtctttacatttaatgggcttattatcagatggtggagttcattcacatatagaacatttaagaggtcttttagaatttgctaaaaaagaagaagttcaaaatgtttatgttcatgcatttatggatggaagagatgttccaccttcatcaggacaagaattcattgaaaaaactgaaaagatgatggccgaagtaggggtaggtaagattgcaactgtaagtggtagatactatgcaatggatagagataatagatgggaaagagttgagcttgcatataatgctttagttttaggaaaaggtgaaactgcaagtagtgcaactgaagctatagaaaaatcatatcatgataataaaactgatgaatttgtattaccaacagttgtaactgaaaatggtaatccaactgcaaatattaaaaatggagattcagttatattctttaactttagaccagatagagcaagagaaataactagagctattaatgataaagaatttgcaggattcaagagagaaactctagatcttacttttgtaacaatgactcaatatgataagactctagaaagagtaaatgttgcatatactcctcaaactttaagtaatactcttggagaatatgtaagtaataagggcttaaatcaattaagaatagcagaaactgagaaatatgctcacgttactttcttctttaacggtggagtagagaaagaaaatccaggtgaagacagaaaagttataccttcaccaaaggttgcaacttatgatttaaaaccagaaatgagtgcatatgaagtaacagatgaattactagatagattagatagcgataagtatgatatggtaattctaaactttgctaatccagatatggtaggtcacacaggagttgttgaggctgcagttaaagcaatcgaagcagttgacgaatgtgtaggaaagattgcagataaaattttagaaaagaatggatgcttatttatcactgcggatcatggtaatgctgaaactatgatagatttttcaacaggaaccccatatacagcgcatactacacatgaagtgccatttgtttgggttgcaaatgatactgaaggtaagaaattaagcaacggaaaacttgctgatattgctccaacaatgttagttcaattaggacttgaagttcctacagaaatgactggagaaaatctaatagtaaataagtaattttaattaataaaaaagctgcttgaaataattttaaaattgtttcaggcagttttttattttagaaaaaatataattttttgaaatttctttattaaaatttgagttgtcattaaaaaaacaatgttgtatacactaaattataagcttcatgaattaaaacttatgatatatattgcaaaaataattctttatgataattctgaaaatattgcaagaattttatcagtaagtgtgaatttaaaaatatatatgactaaatataaatctacttagataaggtaagaaagacaagattttaaagaaggatttaatcagaattgcataaagtaagcataaaattaatatattagtaaaaaagatttaggattgataatatgaaaaagaattttgcatattctgctgattttgatgagtatacagaaaaattatttagagaggctaagtatctaggtgagggaaacaatggtgtggtttatgagttgccaaataaaaaagctatcaaaatatttctgaggaaaaaggtatgtaatgatgaaggcagtattcttgctaaaactaatggatcaaaatactttccctatatgtataagcgaggaaaattctatgtgataagggacttggtggatggaataaggcttgataagcatattaaggaaaatggattaagtgaaagattagttagaaacatatatgaactattattagagttcaagagacttaaatttaagaaattagatataagatgtaaagatgtttatgtctcagaggatgaaaaacttatgataatagatcctaaaaaggcgtatactagaaaggttgattatccaagacacttaatgaaaggattatgcaaagttggtgtattggatgaattttttgaatgtataaaaaaaatagacgcaaagaaagctgcatcatgggaattaaaatttagaagatattgtggggcaaaaaatttatcgatattagatgatgattaaatatataaagatataggagaagataactcaaaatgaatatttaatgtaatgagttttaagtaaagcaattataaactttatgacattagtatcattttgagtaaatctctaatggaatttatataaaatattatatcggataatatgttaagaagaattatataaattaaacaaataagttatgttatgtaagtttgatttttgatctaattagatcatataagtcagttttatatttacataaaaaataatatgaatattcctaaattattttaccaataatattatggtaaatgaaataaaaagctttttatttagtaaattatgtattataattatattgataagaattctcaatacaattataaaaatgaggaggtaatattaaatgaaagattatttagaaattgtagatgtagttgcaagacaaattttagactcaagatgtttcccaacagtagaggtagaaatatatttagaagatggaacaattggaagagcagcagttccatcaggagcttcaacaggaatgtatgaagcagtagaattaagagatggtgataaagataaatttttaggaaaaggtgttttaaatgcaattagaaatgtaaatgaaattattgcagaagaattaattggatgcaatgtgtttgaacaaacttacattgataaaatgctaattgaattagatggaacaaacaataagagtaagcttggtgctaatgctatattaggagtttcattagctgttgcaaatgcagctgcaaattcattagatatgcctttatatagatatattggtggagttaattcaaaagtattgccagtccctatgatgaacatattaaatggtggatcacatgctgataactctgtagatttacaagaatttatgataatgccagcaggagcacctacatttagtgaagcgttaagaatgtgtgctgaagtttatcacacattaaagaaaattttaaatgataaaggttattcaacaggtattggtgatgaaggtggatttgcaccaaacttaaaatcaaatcaagaagctcttgatgtaataattgaagcaataggaaaagctggatataaggctggagaagaaatctttatagcaattgatgctgcttcatcagaatattataaagatggtaaatacgtattagaacatgaaggaagaacattaacatcagcagagatggttgatttctttgaagattgggttaataaatatccaattatctcaattgaagatggtatggcagaagaagattgggaaggttggaagcttataactgaaagattaggaaagaaagttcaattagttggtgatgatttatttgttactaatacagaaagacttgaaaaaggtattgatcttggcgtagctaattcaattcttattaagctaaatcaaataggtacattaacagagacattaaatgctatagaaatggcaaatagagctggatatacagcagttgtttctcatagatcaggagaaacagaagatacaactatagctgacttagttgtagctgtaaatgcaggtcaaataaagactggagcaccagctagatcagaaagagttgctaagtataatcaattgttaagaattgaagaagagttaaatgatgttgctgagtacagaggcagaaaagctttctttaatataaaataaattattattaaagataatttttaagtaagaagtaatgttgcttaaggataaatcataataaagtttattaggaaaagttataggaatatagttcttataacttttttctaaattctaaataatgtgatcttaatgtaatttttattacataagttgtaataagtaaataaatgtgatattattaaacgtatgttattgatcattataggaggtgttacctatgcaaaatatattattaatttttgaaggaatattaggcttagctactattataactgtttatatgcaacctagtaaagctgatgcgttaagtggtttaatacaaggaagcacaaaagatacattctttgcaaaaaataaatcgagaactaaagaagtaattcttgtgagattaacagttatttttatggcgttgtttgcaattaatacagttttattaaatttaataaaataataactataagctactttacttaggtagctttttttttatgagaaatttactaaaaaaataaattaaagtatttaataaatactaataaaattgcaaatatatattgacaaattattcaatgtgatatatatttaatatactttactaaatatataggaattgtaagaaataaaagattatctgactggaaaaccagaggacattttcattaatttgaatatgtcctctttttgcattacaaagatatttaatagctacatacttgaataaatgagaagaatataaagcataaaaattaattagatttagttatctgactggaaaaccggaggacatgtttctatagctatggaaatatgcccttttcttttaataatgcaccttatagataaaggaataatatttatgctatttagatttttatttaagtctatatttaaaattaagtactttaaggaggtgataatatgcctagatattccgtaaaaattatatgcatcaaagcatactaaaaaaagatcttaggatttcatataagttattggaatcacttatatgaaacctaaggtctgagtttgcaataaatatttaaagaaattaattaaaatttttatagatagggggagaaagagtaatgggtaaattcaaaagattattatctctgacattagtttgtgctatcagtgtttttgttactggatgtcaaaaaaatgtagatcaagcagtcaattcagaatataaatatggaaaattaaaaatacaagcacttagtggagctgtttgcggggcaccagcgtatgttgcatatgaaaagggattttttaaagaagaaggcttggatgtagaacttgttagtggaaccttagatgaaaataaaactgggcttgcaactggagagtttgttgtaactaatggtgattttcaatggtttccatctatacaacaaggaatgaacttaaaagtgattggagggctacacaaaggatgtataaaaatagtacttccaccaaattcaccaattaagactgctgctgatttaaaaggtaagaatataggtgttgatgaaattggtggtacaccaatgtcagtagcaacaattgtattagctaatgctggaattaatcctcaaaccgaagtaacatggaaaccatatcctttagatcaattaaatgaagctgttagtaaaggagaagttgatgcatttgcagcatgggatccatttggaacattagctgtagaaaacaatggatatactgtattaactgatatttcaacagacccattgtttaaaggtaaaagctgctgttttctatatgcaagcgaaaatcaaataaaagaaaatccggataaagttaaagctatagctagagcatatcaaaaggctgatgcatggataaaagaacatccagaagaaacagcacaacttgaaatagataaaaaatatatagcatctgatgatgttaagcttgtaacacagcttattaagtcttacgattttgaatacacaacagatactgcaaaagatgatattagttattttgttaaaaaattagataaaacaggatttttaaaggataatacagatccagcccaatttgccaatgatacttattatgatattttaaagagttaaaaaagataggagttgtgcacatggatttacaggaagcaaatattgagaaggcaaaaaatgtatcaaatattattatattaaaaagaaataaagaagatattggattgaaattgttagatgctctttattggaagccaaaatctgtagtatggagaattattaatattgcaatttttgctttagcgcttcttgtaagctttgtaattccattaaagcaaaatttaattttagaaccttacagattttttctaataattttaatagtgtattttatagtaacaaatataatcgcattatttaattctaagattaaagctaagattaatcataatgcgcaactgtattcgggaataggtatattgcttataatatgggacttactaacaacaaaatctaatactttaccacttccattctttccaagctttgctcaaatacttcaagttatggtcgaagattatggaactttaataataagtaccggacattcaatgagactgttagttataggatttacaataggaacaattttaggaacaactacaggagtattaataggctggtacaggcagtggcattattggatatttccaataataaaaataattggggtagttccagctacagcttggattcctatagtaatgtttatattcccttcaagtttttatgcccaaatatttttaatagtaatttgtgtatggtttcctgttgcatttatgacgtcttcaggaattgaaaatttaccaaaatcttattttgaagctgcaagaacactaggtgcaaaagaagattttttagtatttaaagtagcaataccgggtgcgatgccttcaatttttacaggcatctatacagctacaggaatctcatttgcaaccctagtggtatcagaaatgattggagctaaggctggtcttggatggtatattaattgggctaaagggtggtctaattatgctaaagtttatgcttctataataataatggcaattgttttttcaatagtaatggctattatattcaaaattagagataaggtattagtatggcaaaaggggttgttaaaatgatagaagaaaatagcaagaactatggttcaattactgtaaagaatgtcttcagaacttatattgatgtaaatggtaatgaagttgaagcgttgaaaaatataaatcttaatattgaatctggagaatttatatcttttatagggccttcaggatgtggaaaaacaacacttatgagacttattgcaggtttagatgaagcacaagaaggcgaattatttttagatagtgaaaaaattaatggaactagttatgaaagaggatatgtttttcaacaggctaatctgtttccttggcaaaatattgaggataatgtctcagcaggccttagagcaagaaaaatatataaagagcacaaagaagaggtatcacattatatagaaattgcgggacttaaaggatttgaaaaatcttatcctcatcaaatatctggaggtatggcacaaagagcatctttagttagagcgcttataaacagtcctaaggttttattattagatgaacctttaggagcgctagactcctttacaagatttgcacttcaggacaagctactagaattatggaaagaaagagaaaacacaatgattttagttactcatgatgttgatgaagctgtatatttaagtgatcggattgtaataatgtctccaaggcctggaaaaattgaagaggtaattgatgttaatttaagaagaccaagaaatcgtaccagtgatgattttttgaagctacgtaagagaatacttgaaaaattaaatctggtaagtaaacctaaagatttagaatattatttatagttttatagaggtgatgcttttgattgaaaaaactactttaaaagtagaaggaatgacgtgtacactttgtacaataataatagaaaatgcaattaaaacattaaatggagtagtaaatattcaagccagttatgcaagcgagaaggttaatattgaatatgatagtaaaataatttctatttcaatgataaaagacaaacttaagaaaagtggatattatttatacgatccagaagaaaatcatgtgcctaataagagaaaaagtgaaatcgacacattaagaaaattagtaataatatcatttgttttaaccagtcctatgattttaatgatgatccttaatggagctagtgactgttgtatatcttttgacattttaaacaaatcaagcttaagtaaatttttagaaagcttaagatataaaactctcttccttcatgattggagattacagtttatattggcaactccagttcagtttatagtaggttctagattttataaaaaagcttattttgctgtgaaagctaaaattttaaatatggatgtacttgtggtattaggaacaaccgtaacttatttttatagtttatatacatcattctttggagtaaccaactcatcagggataaaaaatgtattttatgaatcttctatggttgtaataacatttgttttacttggaaaatatttagaggaaataacgaaaggaaggacttcaaaggagataaaatctttacttaatctacaagctaaaacagccagagttgaaatgaatggagtagaaaaagatactccaatagaagaagttaagccagaagataaaattatagtaagaccgggagaaaaaatacccgtagatggcattatattagaaggaaattcatcagtaaatgaagcaatgattacaggagaaagtttcattgtagaaaaaagcatcggagataaagtaataggatccaccttgaatatgtatggcacatttaagtttaaagcaactaaagttggaagtaaaacaaaatttggtgaaatactaaaactggtagaagaagctcaaaacagcagggctccaatccaaaatttagtggacaaagtatgcagcatttttgttcctgtggttgttttaatttcaatagttacattcattatttggtatttcattatcttaaaagggagttattactttttatcaaaaataataatatactctgtagctgttttagttgtatcttgtccgtgtgcactaggacttgccacgccaactgctattatgactggaattggaaatctcgctaaagaaggaatattaataaaaaatagtgccagcatagaaaaattatgtaccttagatacagttgtatttgataaaacaggaacaattactacgggaaatctaactgtagatcaaattatatttgtaaaagataagagtaatttagaaaaagaaaaaattctaaaacttgctgcaattgctgaaaaaaaatcagaacatttaataggtaaagctatatatgaagaaattgagaaagatttttcagcaaaaatagaagatccagatgattttaaagctattccagggagaggaataattgctatctataataacaatgaaataatcattggaacagaaaaatttataaaggagcaaggtatttgcttagataatgcgctaagtaatttaattgaaaataaaggttatgaaaatggaaagacagttattgttataggcataaataataactgtgaagcaattattttgttatctgatactataaagcaagatgctaaggaggctattgcgaagctaaaaaataatggtatagatgtaatactgttaagtggtgataataaaaaatccactaaagaaatcggtgataaagtagggattactagtgttatcgcagaagtactgccagaagaaaaaggaaaagtaattgataggttaaaagctgatggaagaactgttgcaatggtaggagatggaatcaatgatgcggttgcgttggcaaaagcagatgtaaattttgctatgggaagtggaacggatgtggcaatagaaataggagatgtaattattttgaatagtaatctattttctataccaagtgcgattaagaaggctaaaaagataagaagaaaaatccgagaaaatttaatttttgcatttatctataatataatagcaattccgtttgcagctacagggcatttaacaccagccattgctgcaattacaatgtcagctagttctttatctgtacttttaaattcattaagtttaaaaatgcgactaagcaacaaaaagccattttttagagaaaggaggagcttttgatgaatgaatggggaaatgaagtaataaatttttttcaaaacatactattgcttaaatatctgccggatcttaatacaaacacaagttatggtataatatttatcttcggattactaagttcttttcattgtatcattatgtgcggaggttttacaatttctcaagtattagggagtaaagtagaaaataagaaaaaatttaacggatatttattatataatgcttcaagaataatttcatatactattgttggtggacttgctggtggaattgggagtgttcttggatttactgaaatacttaaagggattgttccaataataggaggaatatttataattattactgctataaatcaattgggatttttaaaatttttaagaaagttcaattggaatccttctttaaaaattataagaaaaattggagttggaagaaactatggaccaatattcttaggtctaattagtggaataatgccatgtgtaccgcttcaaacagtagaattatatgcattaggaagtaaaagtattatagttggaagtttttctatgtttctatttggtataggcacgcttccagttttgatgatatttggaactataaattctcggttaaacagaagatatactgttaaaatagctaaagtgggagcaatactagtctttatattaggattttcactaataaatagaggttttgcattatttggagctaatgcgatggatatgaaaatggaatcaaaagattcaagtaaagtttatacatcatacattaatggaggtagtcaaaatttaattacagagcttgagaaagattcatttccagagatacgtgttcaaaaagatgtgccagtaaaatggattatagaagtggaaaaagataaattaaatgagtgtaataacgagattgttatttcagaattaaatattgataagcatttgaaagaaggagagaatatcattgaatttacgcctaaagaaataagagaaataccatatacgtgtggaatgggaatgataaaaagcaaaataagtgtagtagataagatagattctaatgttaattaaatgatatgtaatcattatattgaaataattttagagtcaaaatatttaagttaataaatacaaattgttcattgacaaagttatctcaatgttataatataataaaaatacatttcttataaaaactatcggaatactgaagattttttcttagtggaagttaaccagaaaactggagactaaatttattttctaaacttatagaagataaattagtctccttttaattttactcaataataataagcatagctaagcaattgtcgaaagtagaaacattaatcaagaaacttagagaagatattaattacaaaaaataattaaataaaatggaggaaaaattatgagtaatcaagaaagaaaattaaaatttgaaacattacaagtacatgtaggacaagaaaaaccagattctgcaacagatgcaagagcagtcccaatttatcaaacaacttcatatgtgtttagaaattctgaacatgctgcagctagatttggattgtctgatgctggcaacatatatggacgtgtaacaaattctacacaagatgtttttgaaagccgagttgcagccttagaaggaggaattgctggtcttgcagtagcatcaggagcagcggcaattacttattctattgaaaatataactcgtgcaggagatcatatagtttctgcaaaaactatatatggaggatcttataatttattagcaaatacattacctacttatggtattacaacaacatttgtagacccagaggatttatcaaattttgaaaatgcaattcaagataatacaaaggcaatttttatagaatcacttggaaatccaaattcaaatattatagatgttgatggactttcagcaattgcacataaacacaaaattcccctaattgttgataatacatttggaactccatatctttttagaccaattgagcatggagcagatatagttgttcattcagcaacaaagtttataggtggtcatggtacaactttaggaggggtaatagtagactctggaaaatttgattggttaggttcaggaaaatttcctcaattaacagaagcagatccgagttatcatggcattaaatttatagaagcggctggaccagcagcatatataactagagttcgtactattttattaagagatactggagctagtataagtccatttaatgcatttatactactgcaggggctagaaactctttcgctaagagttgaacgacatgttgaaaacacgttaaaagtaatagagtttttgaataaacatccgaaagttgaaaaagttaatcatccatcattatcagaaaatgcagataatgaattatataataaatattttccgaatggtgcaggttcaatattcacatttgaaattaggggtgatgctaaagaagctcaagagttcattgataaactagagatattttcattactagcaaatgtagcggatgttaaatcattagtaatacatccagctagtacaacacactcacaactaagtgtagaagaattacttgatcagggaatcaaaccaaatacaatacgtctttcaataggaacagagcatattgatgatataatttatgatttatcacaagcctttgaagattaaactaaaaggccatattaactaggttcaaatattttggattaagctgactagaaagctagaggcattaaataggattaatataattttatttaatgccttctttgatatttgaatcacataattttaagtaaaataatagcattatagcaaatagtattaacgctacttatcttaatgattttaagaacaatataatgaatttggaggaaaatattatgacagtaaataatgtagaaagcaaagaatcaaaaattgtattaaataacttaagtcaagtatattatataaaggaaaattcaaaaaaagaaaaatttcaaacgttaaaagatttttcgttatcaattggtaaaggagaatttattgcaattgttggtccaagtgggtgcggaaaatcaacacttcttgatataatatcaggtttagtaaaagcagaatcaggaagtatttctattgacggaaaagttgttaatgggccagcgttagacaggggattcgtaatgcaagggtatgcattatttccatggagaacaataagaaaaaatgttgagtttggtcttgaattaaagaaagttcctaaaaaagaaagaaataaaataagtgatgaattcattgagcttataggacttaaaggctttgaaaacaggtatcctcatgaattatcaggaggtatgaaacaaagggttgctatagcgcgttctcttgcatatgatccagcggtgttgcttatggatgaaccatttgctgcagttgatgctcagactagagaaaatcttcaagatgagcttatgagaatttgggacaaaacgaataaaacaataatttttgttactcatagtattgaagaggctgttcttcttgcagatagagttgtagtaatgactagaaatcctggaaccataaaagaaatagttagtatagatctaccaagaccaagaacaaattctgatatgagagcttcagcggattataacaggataactaataagatatatgaatatcttcataataaaacagaagagaaaaaagagaagtatgatgatgaattgatcatttcaaaagaaataactcctgcaatagcattataaagttgttatttagtgtgcaaaatcataataggagctatttaactaaaattttcactagtttttaatggattaaaagatgagacacataagatgtaagagattatagaaataatcctagtgtatatgtataattccgatgttgttaatttatttttaaagcaggtgataatgaagcagcttaagtttagtttcacaaagcaattaaagaggtagattttaatgaagaataaattttttatattaactattgtgatattagcattgatgtttacaggatgctcaaaattatatgaaaatgacgatatagtaaaaataggatatattggaaattttactgaattgcctttatttgcggcatatgaaaatggatattttgagaaagaaggagtaaaggtagaattagtaaaaattaatgataatgaagttgaagaaaaaataaagaatggaaatattgatgcatttacatgcgattataaatttttaaaatggaataatcctaatattaatatgaaagttagtatgggtattacaagcggtgcaattgaaattataacatcaaaagatagtaatcttcaaaaaattaccgatatagaaaataaaagaataggtattgtaaatcaaggagatggaactatggccgctgccattaatgtattaaataaaaataatataaatgataatagtattaaatgggtttatttaaaggatgaaaatccaacaacagctattgaaaatggagaggttgatgctgctgtggtttgggatataaatagagaagataataatattaatgttatatataaaactggacttatagatagtgaaaattcatcaggcaataatcatggtaatcatggcaatagttatttttatattaattttgctggagtaagaagtgagattgctgacaagtatccagaaaagacagcaggtattttacgcgcgtggattgaaggtgcggctgatgttgaggaaggtaaggataaatctttaagtaatgctgtggaaaaaggatatataaaaaatgtaagtgaggatgaagaagctaaaacaaaatattttatgtggatgccttcagttaaaacaggtaaagaaaatttaaaggaatatatacatattcaaaaatcaatgggaattattaatagtgatttaaatgaagagaattttcttaagagtatttttgcagatgtgttaccattttgggattagcaaacttttagatattaaccatagaaaagaaccaaagattagaatatacaattttatgtgtctgactagaaaactggaggatatatattttattaaaagatagaatatacatcctccagttttcttttattaaattaccgatttgtataattatgaaaaaaaactgtttcaacattaattacttatagctatggtttaaaagcaataaaaaattaagaaaggtggagaagcatgaagaaaataaatttaaatattgcagaagtagaaaagcgtgaaacaagattgggaacaattatagcttgggatggtaatgcagcggaacttgtagagcaatctgactataatggaagagggtgcggcagtaaaaatggcagttgtagactatgtgaaatagaaggcccctttgctcaaggctctggatgttctgaggaaatggtagagtgtcaagcaggtcaggttagagatgcagtattaatacaacattcaccaattggatgtggtgctggacaagttggaaataacagactattccgttttggacttgcaacaagaaatctcccaatagaaaatgtaaaaattatgagcactaatttacttgaaggtgatatggtttttggagcaacaaagaagttaaaacagacagttgaagatgcatataagaggtataaaccaaagactatttttatagtatcatcatgtgcgactggaataattggagaagatattgaaagtgtagcatctgaatatgaaaaaaaacttaaaattccaatagtgccattgatttgcgaaggttttaagtcaaagcactggactacaggatttgacgctacacagcatggtatcttaagacaaatagtaaacaagcatcctaaaaagcaggaagatttaattaatattattacactttggggatcagatgtatataccccaatgtttagagagcttgggcttagagttaattttgtaattgacttagcaagtgttgaggatttggaaaggctatcagaagcagcgggtaccgtaagcttctgttatacattatcctcttatctttcagctggtttagaacagtattttggagttccagaaataaaagctccgcaaccatatggattcaagggaactgatgcatggcttagagaaataggaagagtaactcatagagaagaattagttgaaaaatatattgaaaaagaacataagagagttgaacctattatcaatgaattaaggaagaaactaaaaggagtaaaaggattcacttcaactggctctggatattctcatggtcttatcacagtacttagagaactaggaatatcagtagatggttctttagtattccatcatgatccagtatatgatagtggaaatgtagaagcagattccttaaaacacttagtcgataattatggagatgttaaaaactttagtgttagcaacagacaacagtatcaattttatagcttgctaaaaagagttaatccagattttattttaataaaacatggaggattatcaccacttgcatcaaaattgggaatttcagctgcacctttaagtgatgaaagtttaacaataggttatcagggaatgatatatctgggaaacaagatattagatattttagcaaaaaagaaattccataacattctgaaagaacatacagaaatgcagtatacagactggtggttagaacaatctgatccatatgtattagctaaaaatcctaaccttttagatcagaaatttaatgaattacttgaatcaagaagagcagcagctatttagaaggagttaagaagatagatgagtaaaaaagttaaagagatagtgagaacaaattctatagaacaagtgcgctatggatgtgcaataggagcacttgcatcagtatcagcaattccatatgctatgccaatcacacattgtgggccaggatgtacatcaaaacaatccggtgtattaatgagtaatggcgctcaaggtggtggatatagtgccggtcccgtaatcccatccgttaatgcaacagaaaaagaagttgtatttggtggagaaaaaaagttaagagagttaattaagggtactttacttatagttaaagcagacttatacgtagtgctaaatgggtgtataggcgaattagtaggagatgacataggcgcagttgtaaaagaatttcaggagttaggatttccaatagttcatgcagatacaggtggattcaaaggaaataatttaattggtcatgaaatagttattaaagctataattgatcaatttgtaggtgattatattggtgaaaaagaagataaacttattaatttatggtcagaagtaccttatcaaaatacattttggcgtggagatttagaagaaattaaaagaatattggaagggtcaggttttaaggttaatgttttctttggggtagagagtaatggtgtagaagaatggaaaagcattcctaaagcgcagtttaatcttgtactttcaccatgggttggccttgaaatagcagaatatcttgagaagaaatatgaacaaccatttttgcatattcctactgtgccaattggcgcaaaggagacaacggattttcttagaaaagtagcaaagttttcaggtaagaacaagagaaaggttgaagacttcataaaaagggaagaaaaaagatattatcattatttagatagtttttcagaattctatgcagagtatggatggagtgtaacctcaatgtatgctgtaattagtgattcaacttatggtttagcacttaatagatttttggcagaccaattaggttttgttccagctatacaggttattacagataatccaccagaaaaatatcgaaaacaaataagtaatcaatttgaaaatctttcagaaggtgtatctactgaagttgaatatgctgaagatggatatacaatagatgaaatcattagaaatactgatttcaagggtagagcaccaataatttttggtacatcatgggatagagatttatcaaaagaattgaaaggatatattatggaaattgctcttcctgtgtcaaatgaaattgttattgatagatgttatgttggttatagaggggcattaacattcctagaaagactttatactatagtcacagcaacagatacaaagataataacatcataaaagtttttatgatgatatttcttataattttaaataatttggaaaggtgtgacaggaagaatgaaacaaagatatgtaaatattattgttgtagctattttctttttaatatgggaattagcagctagaactggaatattagatactcaatttataccggcattttcaactgtagcattaagaatgtttaagatggcattaagtggcgaattatttatccatattgctataagtattgagagaatggcaataggatttagtttagctacaattgtagcagtaccagctggatttatcttaggaggatgggttcctaatttagcaagcttctttaatcctctgtttacaaatttttctcaggttaatccatttactttaattccattatttataattttatttggaattggagaagcaggtaaagtaagtattattttctgggttatattatggccaatgctttttacaacaatggcaggaataaatcaaatagatccaatctttattaaaggtgcaagatcaatgggagctactggaatacaaatatttttcaatgttattcttccgggaagcataagtagaatatttactggtataaagacagcattaacagtaggatttactatgcttattggtaccgaaatggttggttccgaagcaggaataggatggattgtttctaattctcaaaaaaattatgatgtacctaaattatatgtaggaattttgactatagcaatagtgggaacattaatatcggtattagctgataatttaaaaagctcaataattgtttgggaagataatttaaaggaagaatagtgtataaataaggaaagaggtgagtaacgtgaaggaaaaaaacaaagtaatatctaaaataggaaaattgatttttagcactttatcaacagcagcattctttgtaatttggtatttagcgacttcaactggaattttagatactggaattattcctgaaccattaaaagtatttaatcaattggctacaaatatatttaagggtgatttgcttagtcatacattactgacatttaaaagagctataataggtttttttgtggcattaatagtaggattattaataggttttttcttagcttctatttcaaagaagttgagaaattacgtaattccaatcttacaatttttcgaaaaactcaatccgtttgcacttttccctttgttcatgttgttttttggaataggagaatttagcaaagtaataataattttttgggttgcagtttggccaattatttttcacactatagctggcgtagaaggtgtagataagctactaataaagtcagcaagaacaattggagcatcacctaaaacagaatttttcaaagtaattttaccagcagcattaccagatattattactggtattaaatttagcgcgcaaatagcttttatattagttatttcagcagaaatgctgagttcatcagctggattaggatggtttataagtattgcgaaaacacaatataatcttcctaacttatatggaggaacattatttgttgctgcattagggataactataaataaaatattaaccatattagagagcaaattatttgtatggagagaaaaaactttttaatatatttaaggaggggaaattataatggcaatagaaaaagaaaaaaaagtaaaaagagttattcaagcagtaatagcagttttggttataggaggtattattataggagcgcaacttggtaagacgaaatattcatctccatctgaatccttggaagctaatagtagcgcaaaaagtgatgatagtacttctactagtagtgatgatttatttccaataaaaacggcaacaagaaaagattgtacattagccccttttttggtagcagataaaaagggattttttaaagaggaaggattgaaattagtatttactggtgaactaagtagtgatgctgtcacacctgcaattttgtctggagataatgatgtagcggatacacatccgaatgcattagcgcttaaggtatatgggggatcaaaaattaaagcagtagggcgctcaataattgaacctggtcctggagtagatcctaaattgagacatatgaggttctacgtgaataaagatgcagtagctgctggagttaaaacatggaatgacttaacaaattataaaggcaatgaaaaacttaagtcagctggttatactaatacttgtgaagatttcattcctaataaaatttcagatactaaaggtgtttcaagagataaatttgaatggattacatttgaaacagatcttcaaaaaattgaagctttaaaacttggacaagttgatattataggtgttcatccgccatttttcgatgcagcgcaagaagcaggacttactcaaattgcagattcatcagaagcgggacttggtgaagcaactggagtttatttatactatttctcagatagttttatagaaaaacatccagataaagtagcagcatttgttaaagctatgactaaggcacaaaaatgggcgaatgcaaatgttgaagaaacagcaaaattaactagtgaatttataggaactgaagtaaaaggaaatcactattattctgaaactacgaaaattgatgaacagactataaatccatggattgaagacttagagaacacaggagctattcctaaaggagctattaaagtagatgatattataacacataaatttgaggcacaataatgaaaaaaatacagatgttcttttaaagcttaaagataaactaatagaaatatcaggtttgataattttgattataatctgggaatttatagctagagcaaaaattataaatagtgatgtatttccaagttttgcggtaactataggagaaataggttatctgtggggaaatgaggatctatatatgcatataatgtcaacattgtggagatttacatttggacttttatcagccgttttaataggtgtggctgtaggaagtatatttgcaaaatataatgatatttatttaatgtttgaacctttaattagaattttttcgaaagttaatcccttttctttaattcctgtatttattgcattttttggaacaggtgaaatggtaagacttgcagcaattatatgggttggcgtgtttccgatattactgggaacattaaatgggataaaacaaatcgacaaggatttaataaaaaacgttaaagctatgaatatttcgttatttgatataatattcaaagtatatattcaagcatctgcacatagcatttttgctgggatcagaataagcgttcaaatgacattttttattataatcgttggggaaatgttgggcgtcaattcaggacttggatatcttctgcacaacggagcacatcattattttgatgcacctaaagtatatgcgagctgtgtaattataataatattaggagttattataaatagatttttcagatatatacaaaatgggttgtttttatgggaaaaaccagagtcactttttaaaaatcataaaacctataaaaaaatagacaactttactttaattattttatccattattatagcgggaatattaattttaggagaagtgcaattaaagttggcagcgtataaatcagaacatcctattgaattctttaaagagtaaagtgtgattaacaagtgctttattatgatattaaaagggaggagttgaattaggtgaaactaaaaaatgtgaatataagaggttatattacaatagtaatttttatttttgcttgggaatttttttgcagacttaaaatattagatcctgtgcttattccatctttttcgaaagttataactggaataggtgaattgtttttaaagcaaaaactgttatatcatatagagctaagtttttatcggtcttttttaggatttttactttcaattataattgcagtaccattaggtattgcaattagtattttagtaaaacaaatgcaatcatcagtagaacttgttttagatgcgtgttcccagataaatccatttattatttatcatctaattataattattttaggtgttggagaatttacgcagatcgtagttattacatggacatgcatttggccaatactttttagtaccataactggaatacttaatgtagacgattcttatattaaacatggaaaatcttttgcacttaataaatggaattttataagtaaaatattattaccaggtgctttaccgcaaattatgcatggtgttaaactaagtctgaattattcattatttatgctaatagccgcagagatgatgggagggagttctggccttggatttctaattaaatcatgtcaaaatatgtacagagttgattgggtaataggaatagttattgttatagctatgataggattgttaatggattcaatagttatgtatttagaaaataaaaacgtatatttgaaatatatactccatgaaaaagaataagaagatatagttttttatagcatattatactaattcccacatatctcattttattcgaatgacaaaagtataagtttaaagagtatttgctttataaagaatctgtctaactaagtgaaaataatacggtatattatatatagattaattaatgtaatagcttcactttcagcttaatttatttttggggttctaaaatcataagggattctttaataataaagcttaatatgttatagaaatttttttgtaaaaatgaaaaagtatattgactaattattac

SEQ ID NO: 9 - DNA, 118978 bp, Clostridium beijerinckii
tcattattaacatcatcaagtgttgcatttgatacttcaactaattcggctttcttcccctctgattctattccttctagaattaagtttgccattttttctgtatttcctgtttgactaaaatatacaattttcatataacttcctccaatcacttttctcctaaaaatttattttttatctatttcttgatataagtataactttattaatttaaataaaatgtgattgaaatcaaatcaagaaaaaatctgatatacgcaagtttgatatctatataaaaataaatattcattattacattaataagcaataatgaatatttattttatatatagttcttcaagccttcttcatctataatgattattgtttttgttcctattatttttattagattttcatcttctaatttctttaatttcctgcttatggtctccctcgtcaccccaatataactcgccatatcttcccttgatatgggtagttttacagaaatattaccttcaacattttctccatacttctccataagctctataattaaataagccattcttgagtcaacatcgttagttgctaaattctgaacaagattttcaacttttgataatctctctcctactgtttctaatacctttattccaatctcaggattcttcatcattatatctttcatttcctccttagtaagagtacatattttagcatcctctatagctttagaattaaatccatatttagatggttttataagttctaattccccaaagaaatctccttctgaaagtatatgtagtatctgttccttaccatccttagtatatttatataattttatttttccttcatttataaaataaagtgtattagctatattaccttcagtaaaaataacatcgcctttactgaattctttatgattaattttatttacaatctccactaattcgtctctatttaaattttcaaatattggaaccttactagcacaaagtcctcccctacaattattgcagcaattaccacagtgaatattcataacaaatcctcctatctataagatatatctacaaatactatcttactttaagttgtgtcccgtgtatatttaattctaactaaaaccactcaagtaatattctccttagtatcattataataaaaaactcatgaaaacttaatcttaatattttgatttgaatcatatttttataattgatatggatataaaataaaatcatcgaaagacaacaacttagaaaactaattgaaatataaaaataaacacaaattatggaggttttatattatggaacaaaacattatgctaggtaaaaatatattttgggttggtaaagtagatgatagagatgtgccttttcataggttaactttaactaaaggaactacttataacagttatttattaatgacagaaaagcctacagtaattgatactgttgatatgagttttggaagagaatttgtacaaaacttaaataataagattgaacttaatagaattaaatatattgtaattaatcatacagaacctgatcattctggtgcccttggaagcttagcagccaaagcaaaaaatgctgtaattgtatgcacagagccggctgtaaatgaacttaaagagatgtacaggcttcataatagagaatttttggttgtaagtgatggtgatactttagatataggaggcaaaattcttaaatttatacaaacaccatatcttcatactgaagaaactatgataacttattgcgaagataataaaattttatttccttgtgatattttcagtactcatgtagccaattatgaatacttcaatgacttagctcaagtagacataaaggaagactttattacttattataaattgataatgcatcctcacagaagatatgttcaagaaatgattgaaaaaatcaaagatttagatataaagatgatagctccttctcatggatttattattagagatgaagtccaaagctttatagatatttatgataatatgagcaaaaatacagagctagataaaaaagcacttattctatactctactatgacaggtaatacaaaaaagattgcaggcatttttaaagaaaagtttgaagagcaaaatataacttcaaatattattgatgtaaataaagatgcaatggataatataatgaatgctattaatgaagctgacgcaatcttctttggcagctcaactaaatatggtgacatgattggaaatatggaagaggtactaaagaatcttaaaactctaaatttagaaaacaagctaggcgcagcatttggttcttatggctggagtggagaggctatagaggttatacaagactatttaaataaaactaatttaagatcattaaatacttctgatataattaaatctactggtatgactgatatagaattacctctaagaattagattttcatcaaaagaagacaacctaaagagcattgatagaatagttacctatactagtgatttattgtttagtgcaatttaaaataaggcgcatgaaaagaaataaagtgcccaaagttgccgtagatatttttcatctataatctacatcaaaaggatcttgtgagattaggcacaaaacagcctttctttcctaagatccttttgatattaaatataacatttatttgcttagtatatgtgtctcacccactatttaatcaaactattattaatatttaaaattcttctaacactttctgaccaaaattctttccaaaggctatgcactcttcaagttcgtcatcatttggcatatatttaaactttaatccatcttcaacaactttaattttagcctttgttaaatagtttgtaagaatatctgttgattctccaccccatccatagcttccaaaagctgcacctactttctcattaaacttcaatccaattaagtcttcaataagaggtaataaagacgttaaaattccactattaactgttgatgatcctagtattattccctttgatttaaaaacttcggctaatatatcacttttatctgaagttgcgacattaaatattttatattctacccctgcttctcctaggcctttgcctataaattcagccattttatgagtagccccccacattgaattatatgcaaccactacacttttatttgattttccagctgcccactcataatatttctccactatcatcattggatcttttctccaaatgatgccatgagctggagctatcatatctacaggtactccaagttttttaagttcgtctattttttttgtaaccagtttactaaaaggagtaagtatgtttgcgtaatatttaagagcttcctgattaacttctgtttcatctacttcatcattaaaaatgctcgaagatgcataatgctgtccaaatgcatcattagaaaacaatatattttctccagtaagatatgtaaacatgctatcaggccagtgaagcataggagcttctataaatacaagattatttttacctatatttatcttctcccctgtggaaacgaccttaaaattccactccttatgataatgcttctgtattgactctaaaccttttttagaaacaaaaactgttgcattaggaatatgctccattaatgcaggtaacgctcctgaatgatcaggttccccatggttcataacaacataatcaatctttgatatatcagttacctctctcaaattttcaagaaacatctcagttaaaggttcccatacagtatctataataacagttttttcatctttaataagatatgaattataagtacttcctctatgtgtagataattcatttccatgaatatgtcttactttccaatcagttgctccaacccaatatactccatctctaagtttcttcattctaattcctcccatttgttaaattccacttcatgatttctataaaatgtataatttaatccttaatatacgtagtttcctagtatattatacttagggcttgtagcacttagattttaaaatatatattccaatgccagaattataattcaaatagacttaattcctaaataatattatgttttaaacaaagcaaaatcagccagatttctagcttcttttactttatcacaaattcatctgctccctgtatcgcaactattagttccacatgccatatatctccttaaacttaaaaattatatacataattaattcctaaataggaaaagttaatatcgatattaatagacgcatgaaagaaaataatatgcttgtatttctattaattttctttcatataggaaagttgaaggagtgaaattttagtgagtgaaaaaatgctagaagaattagaaggatttaacggaagagtaagttatcatgattctgtagaggagatggtaaaaagaataagagctgataaattatcaaatgtatttgatagatatgcttctcaagaaaagataagatgttcgttttgtcttaaaggggtaagctgtcaactctgttcaaatggtccttgtagaattaacgaaaaaggtggccaagaaaaaggtgtctgcggaatagaccctaatgctatggctatgagaaactttctcctaaaaaatataatgggggctggtacatatagtcatcatgcttatgaagcttttagaaccttaaaagctactggagaaggaaaaactccatttaaaattactgatgtagataaattaaaatggatgtgtgaaaaagttggaatcgatacaaatcaagaagttaacaaaatggcaatcgacttagcagtattgcttgaagatcagcaaaagatagattcagaagataaaaatgttatggtagaagcttttgcccctaagaaaagaaaggaaatatggagaaaattagctatatacccagcaggtacagtacacgaagaacaaaactgtgtagccagctgtcttacaaacgtagatggaagtcatgtctcacttgcaatgaaagctcttagacttggaatcgctacaatttacaatactcaaatagggcttgaaatggttcaagatatactatttggaactcctactccacatgaagttaacatggatttaggaattatggacccagattatgtaaatgttgtatttaacggtcaccaaccttggcctggagttgcaacaatattaaaagcaagaacaaaagaagttcaagacatggcaaaagctgcaggtgccaaaggccttagaatagttggttccatagaaacaggtcaagaattacttcaaagatttgaaatggatgaagtttttgtaggtcacatgggtaattggcttactatagagccattacttgctactggtactgttgacgtgtttgcaatggaagaaaattgttcacctccagccatagatatgtacgctgaaaaataccaagttactttagtatctgtaagtactataattgatttacctggtattgaacataagattccttatgaaccttcagaagttgataaaatggcggataaattaattgaacttgctattgaaaactttaaaaagagaaaagaaagaaaaattgaaccattagttccaaagaaaactcaaaaagctatagctggtttttcaactgaagctgttttaggtgctcttggaaacaaacttgacccattagtagatgtaatagctgctggaaaaattaaaggagttgtagctcttgcaaattgctcaactctaagaaacggtcctcaagattctatgactataaaccttacaaaagaacttataaaacgcgatatattagtagttagtggcggatgcggaaaccatgctcttgaagtagctggactatgtactgttgaagccgcaaatgaaatggctggagaaggtttaaaagaagtgtgtaacttgctaaaaatacctccagtattaagctttggtacttgtacagatactggaagaatttcaatgttagttactgctcttgcagatcacttagatgttgatgtagccgatcttccaatagctgttactgctccagaatggatggaacaaaaagcaactatagatggaatttttgcactagcttatggtacttatactcatttatctcctactccttttatgaccggtgctcctcaattagttgaacttttgactgaaaaagcaaaagatgtaactggtggtaaaatagctttaggtgataatcctattgaagtagctgaaaatattgaagcccatattattgcaaaaagaaaaggtatgggattaagctaatatattttataaacaaattccattaatattaaattaacatgggtgtctcaagataatttctaattgttttgaggtactcgtttttctacgcactatgagtcaattttattacgtaatattcatttttttaattacactaaacataatacataaaaagaagaggctatatcaaatttattatgatataacctctagtattattaacaattagcgtttcttggaataacacgtacacttactgatagtgaatcggcaattgtactatcaggtgctatctgaacaaatactaatttttgagaagctttctctgaataaagtgctttaaatttaaatacagctgttccaggactaccaattgcattactatctggtatccattcctgacttaaaaactctatattattaggaatatcataaacaagttcccaatgatatcctgtggatccttcacttactgaacggattctaacacaaaaagtttcgcctgcctcaacagttattcttcttggagacactaatgaatttgccataatacattcacactcctgattaatattaattttattctaatattcttttagctttaatatttcattactagagagcaaatctttataatataaaatatgtctagtagtataataatgttcatatatttttattctttagcttattatattaaatttacgtttttgtataacttataaagtaagaataaaatttcagaagttactaaatgatataaaaaatactatgaaattcctttcttaactataagattctaattgcattttcatttcttctaattgcctatctacaatacttgcctcttctatgtgatttgttatagtttttgatgttactcttaaaatttcatccacatttattatttctttactcatattttcgatatgttgtttttgatttgttaaaatttctattactttccttacttcctgctcaacttttcctatagaagataagctttcttctatcttttctgccgcattcactgatgcattaacccctttagcaataacttctttagatttatctgaattatttataacaatatttgtttcatcttctatattaccaattaacactgaaatatccttagtactttgcttagtcatttctgctagatttcttatttcacccgcaactattgcaaatcctttcccttgttctccagcccttgctgcttctattgcagcatttaaagccagtaaattagtttgattggctatattcgttattaactttacaacctcattgactttactaaaccgtcttgccaattcatttatattttcagtattattcctattctcatcttctagaaatcttactactttgacaatttcctcaatagcacttttaccttcatatgatttattaaccgtatcttttgtaatttcgataagattattcccttcaagatataatttatctgtcaagtcattagtattttctgtcaaactagaaatcgcattcatatgttccttcacttcatcagcaagctttcctaaaacataatgttgatcatctactctatgatgttgttttacaatccccgctaataatccactcattttctgaagaaaattactagtattatcttgtaatatttttgcctttattattgttttttcaccatccattgattgcttattttccaaatctttaattttcttatttctaaatagattcattcagctcactcctaaattctttcaaatatatcgatttttcttaaattatatattgtattatttttataccctgcttcttcgttcatgcccttagctagatagaaacttctagtaccaattgatcaactctgtttcttaatataattttaagctaaaatattcaaaaagaatgtgatttaaatcatatttcactaaattttcagtaattgtaaatctataggttgtaagatattcttatttagttgttgtaagttttgttacaactgtttcagcttataatgcagaaaagtcatctcttgaagttagcctgttcttgttctattatccgttagtcttgatgttgctatagatattcaaagttataaaatggcctctttagttaatagttaagtgatttatatcacggcaccattatcatttatgttataaagttatataagcaaagtttttaggaggaatatagaaatggaaaaaataaatgttaactatgaaaaaatgtattacggatttcctgtaattcttataagtttttttgataaaaatgggcttccaaatgtaactactctttcatcttcctatagccttaaagatatggtagttcttggatttagtagcaaaggatatgcaattaatcaaattaaagaagttcgtgattttgtaattaatatccctgacagttcacttaggaaagaaattagcttttgcggaactaaatctggtcatgaagttcaaaagtttgacgctaccaaattaacttattctaaatctaaaattgtaaacgcgccaatcattgaagaatgcccaattactatagaatgtactttaacagatgttatcgaaaaggatgcctatgcaggtattactaatattcttggaattataaagggcaggattatttcaaaggaatatttagatgatgaaaacagattaaatatttcaaaatttgataaccttttatattttggagatggaataaacaaaggatatagatatattaaaaatgagcaataagataaggagggagctatatgtcttaccaagctatttgggctaaaaatcaaagactaaatgacgtagaaattataaaacttgaaaaggatggcttagatgtaattgaaactataattgacaaatactcgaaggaaggttatgattcaataacgcctaaagatatgaatagatttaaatgggctggcgtttacgaacaaaagccaagagagggatactttatgatgagagttcgtattaattctggaataatgacttcagagcaagcaaaagttttagcagggattgctaaagattatgggcatggaattgcaaacgtctctacaagaggagctatacaatttcactgggttcaggtagaagatttaccttctatttatgaaagattagaagcttgtggcctaagtccttttgaggcttgtggcgattgccctagaacgatagttggaaatcctcttgctggaattgataaagatgaacttatggatacaactgaacttgtagaacaagttaataatttcttcttattaaacaaggatttttctaatctaccaagaaaatttaaaatatcaatatcagctagtatacataatgcagctcatgcacaaattaatgatcttgcctttactccagcaacaaaaaaattgataatcaaggcgtaattggtttccacgtatgggttggaggaggactttcagcaagccctcatttagcacaaaaactagatatatttgttaaaccagaagatgtactaaaagttgctgaaggtgtatgtactatttttagagattatggatatagggaaaaacgtactcgtgcccgcttaaaatttttagtagctgactggggagcagaaaaattcaagaataaattattagaattcactggggatatgccaagctcaggtgatgataaattagcttcatggaatgcatcttattattttggagtacattcccaaaatgaagatggcaaaagctatattggtgttagtttaccacttggagaaatcacttgtgatcaacttttagaacttgccgatatttcagaaaaatacggagatagaaaaattagaactacactatcacaaaatttaattattacaggtataagtgatgaagagataccttctctattaaaaaaagatgtatttaaacaactttctccaaatccaagtatttttacaggatatacagtttcttgtacgggtaaagaattctgcaatttagctattgttgaaacaaaaaaacgtgctaaagaagtgatcgaatatcttgattctaaaattaaactagatacaccgttgcgtatccattttacaggttgtcctaattcttgtggacaaaaacatatagctgatatcagcctccaaggtgcattaataaaaactgaagatagctgtgaggaagcctttaccatatggcttggtggtacattaaacaatggcgggcagtttgcagaaaatctaaactaccgtgtaaaatctactgaggttcatatagttcttgagaaaatagtaactttctttgaaaaaagcaagttggagaatgagacttttaatgaatttatcgcaagagtaggaattagtaaaatcacagaaaacatataaaaacctaattaaaacaaaaccagtgagatatatcatttatgtctcactggtttaactttttattctttcttttttccaacagctgcaagatatataataaattcttcatctccatctagccccaaaagtgtatctatcatcttttgatcataaatacctatagcacatgctcccgctttaatcgattcacttgctaaataaagattttggcatacatggccaacatctattaaaatctttttatgtgccgtaatatcaaacttccattctgaacgatatggagtcgtgctccaagcaaataatacagccgctttctttgcaaagttaggtacaaaaggctggtctaaagtaatttcatctattttattgtcaatttcatctaattcaaacatgaataaaagtttatgctctactggtagatatctataaatacctttttgtatcccatcaacattcataataaataaatatgtttcaaaagaatgcgttgccccactacaaggaactgttcttaaagttaaaccggctttattagtttctgtaattccttgagtagaccataataaatacgacaattcatcaagattcatagacttttcagcataaagccttgtacttcttctattacctatgcacttataaatattagaattcgttacagtttcttcacttacccttggtaagacaacaattttagattgcgaatcataagattttatactatctggctgaggtatacctttcattttatcagtttttatatttttgaattcgttaaaattagatttcaaaaaatttctctgcttttcatatcttgtcataaaaattctcctatcctatcttttggaaaatataatatcataatactgaaaaatagtatgtatcatcagttacgtttattgttctataagacgcaattatttctatattgtaattttatttatcaatcattttacgagaactagtgcttcaaataaattcatctaccatattgtacctatcttatttcaagtttttatatcaaaaaagcacctacatttctgtaagtgttctatattaaatattaacttgtcccattaccttaagacaaactttactaattattaattttcatctatgtattttgcactgtatcctgccttacttattgcacctttgagtatttcttcacttatatctactttcattctaacatttgctaagttcttctttaaatcaacctttgcatatacattctccaaactgttaatagcattttcaacatgattagcacaatttccacatgtcataccttcaatatatatagtctttgatatctgatactctgataactcctttttgtttatcttctttctctttgtactcttttctatagttcccccacagcatccaaatcttaatttttctataaagctcctaactgaaaaaactataatcaaaagtattattccacttaatatatatgttgccataaaaacaccttcctttaattaatgtaaatttatttattttaagtatatcactgcaaattgtatttgacaatgattatcattaccttgtattgaataacaaaaacacattatctattgcttaaatagtattaatatcctactaaacaactccaaaatttcatttttcaataattttttctgatttcaaaagttttttatacaaataacttgcaatatatatcttttagatatatatttgatatatctaaaagatatattggaggaaataaaaataatgaatgaactttttattttaggtgaattaatggaagaaccacaaagtggttatgatctacgtaatgccttacaagcttctttaggacgtcatcgtaaagtcagctatggagtaatttatccattgcttgaaaaattagagaatgatggttttttagatataactaacgtagaatcacacggaaaaaataagaaaatggctacaattacggaaaaaggaaaagaacgtttttttgtgctaatgaacatgcctgttccaagtggagcccatactgctgatatatatttaattaaacttgatgtaatgcagcaccttacactagacgaacaaatgcaactattggatcaattcgatcaagaacaaagagagataattgaagatacgcaatttgcactaaaaaaattagctgaggaaaattcaaaagatcactggtatgcaagtaaaaggtttgaattgcgactacagcaggcaaatgttgcaattgattggattaaagagtttaaacatgaactgaagaaagaatggtgatgagaatgacaaaagaaataaaaatagccttattaatggctgctagtctctttatggagattttagatggaacaattgtaacaactgcactacctaaaatgggccaatattttcatacgggttcatcaacaattgctttactcgttagtgtgtatttgatcacagttgcgatttttattcccttaagtggatggatggctaatcaatttgggaaaaagaaaatttggattattgctgtcatcctctttaccattagttccttaagcagtgcactagcgcctaatttctctttccttttgataatgagaattatacaaggaatttctggtgcattgatgacacctaccgcaagactgattgtgttagaaaaaacaccagcttcacagctattaaaaatgattagttacttgatttggccagcactcatcgcaccagcaatagcacctttagttggtggatttattgttacctactggaactggcaatggatttttttaattaatgtaccaataggtttaattacagcattaataggagcaaaattaattgatattgataaagtaaagaataaaacttcatttgatcttataggatttatagaaattgcactttcatctggcataattttagttggagcagaaatagccactcacggaaaagattattggtttagcgcgctaggattagtaattttaggaataatacttggatttatagttttcgagcacttaaaaaaatcagataatccactattttcacttgattcgctaaaaataacttcttttagaatattccagacaagtggatctgttctatggctatgtgttggagcattaccgtacatattaacaatttttttacaaacagtctttcaatggtcagcagtaaaagcaggtagttatgtgctatttatttttgttggaaacattggaattaaaccttttacaaatataattattcgtaaattaggctatcgcggtgcactattatcatcatttggaatggtgtttgttacatcaattggtttagcattcattcaaattaatacttttcctgcttggataatgtttcttgcgctagtttcaggtgtaggacgttcattagccttaactgcttacaatggactaagcttttctgaaatagcccctcaagataggaatagtgcaaatactttgaatgctgtagtttcaacattagcacaaggaatgggtatatcaattattacagttgttgttaatttactacagattttcttttcaattactatctcttataaattaggctttgttttccttggtctattgatgttatatccagtaatcgaagtaatatttttacctaaaaacattggacatgctacaatcagctagttttatttatagtcttccattcaaaaaaactcaaactttaattaagattgctatcataaaataggcttttacaatgtatgtttttcaaaaattgtgtcaataattaaaatacgatttcctattttcaataaataaagagatagcattattatcattaacctgatatgtctgctatctctttcaattttactaaaagaactaattaaattaatttacatatatctttatttggaaagttcattttgaaaatcacaggaagcaactaccttgtatcctgatgatcttagattttccagcaagattattactcctgtaatatactgttcttcctttataccttctccaggctcaataccaagataatattttgagtatagaaaaccgtcttcttctttaacacttttttcttcactaaaatcttcattgtttatcaattctattttcattaaatccgagatgattgtccatctttttttactacccattgttattttttcaattaaattcaatataacttctttttcttcatctgtgttgatgaaaattttacagtacgaacttctatatttactcatattatcactccctcataacaaaatattatctaatatgtactcaatacaagtatacattaatagatagaatacgtaaatattttgaaataaggctctaattatccataaaaatcttatcattattcaacgtttgataacactatcatatttcgataatatttctgtcaaatttcaatcctaatattattaacattacaaataattacattgaaataaactcagaaaatgctaaaatacaaataaatacttagcatatatgactacaaaatcggatatttatcttattggcttcaatataaattcctagagaataaaaagatttttgtatatttccaatatgaatatggggaaatatatatatataataaattacaagtttattaatcttaaggaggtacacatgacagaagctttaatgaaaaagccaaaacttagtgctgttcaaatactcgcaataggcttcgtgctagttatttcaattggtgcgatcctacttagtttaccaatttcatcagcaaataacgaatatactaattttctagattcactatttacatcaacttcagctgtatgcgttacaggacttgtaactttagatacaggcacttattggagtattttcggcaaaatagtaataatgcttttaattgaaactggtggccttggattcatgtcttttactgtttttatagcaataattttaggaaaaaagattactcttaaagatagacttataatgcaggaatcaatgaatacttttagcatacaggggcttgtaaagatggttaaatatattttggggttcacaataattatacaaagcctaggtgcagtattattatcaacacaatttatacaacagtttggattaaaagtcggaatattctacagcatattccattcaatatctgcattttgcaatgctggctttgatttatttggaaattatactagtttagttagttattctagcaaccctattgttttattaactataagtgcacttataattattggcgggcttggatttaccgtttcacttgaaatatataattataaaaaaaacagaaaactttcgattcattcaaaaattgtactttacataacagtagctttaattatttttggttttttacttatattttttattgagtatgaaaatcaaaaaactcttggagccatgaattttagagataaagttcttaatgctttttttgcttctgttaccccaagaactgcaggattcaatagtatttcaactgatggaatgactatggctggtaaatttataactattatattaatgtttattggcggcgcgtctggttcaacagctggaggacttaaggtaactacttttggtgtacttctatttactttagtgtcagtgctaaatggaagagaagacactgaagtatttggcagaagattttccaagggaactgtatataaagcttttactctattatctattgctacgatattagtgttaatagtaactataattcttactattacggaaccaaaggaacttttcataaatttactgtatgaagctacatcagcttttgcaactgttggactgactactggagtcactcaaaatataggttctatttctaaagtaactcttattataactatgtatcttggcagagttggtcctttaacagtcctattagctgttattaataaaaagaaaaaaaataaacttaaatatcctgaaggaaaaatattaattggataggaggtcataacttgaaaaataagcattttgttataattggacttggaagatttggcacttcaatagctacaacattatataatttaggtcaacatgtattggctattgatattaatgaagatagaattcaagaaatcgcagataatgttactcatgctattcaattggatgcaaccgatgaaaatgtattaaaaactttaggtcttagaaactttgatgtagcaatagtaacaattggaactaatattcaagctagtactatggtaaccctattagttaaagaaatgggagttaaatatatagtaggaaaagctactagtgacttacatgctaaaattctatataagattggagcagacagagtcattttacctgaacaagatatgggaattagagtagctcatcatttggtatcttctaatatactagactatatagagctgccttcagactatagcatgatagagcttgaaccactggatgaatggcttaacaaatctataagagatattgagataagaggtaaatatggtataaatatagttgcaataaaaaatgacaaaagcatagatgtttctccttctgcaaattatattattaaacgtacagatattttagtagctcttggctccaataaagacctaaataagtttgaaaccttgattggtaaaaaaaattaatttttatgtttatttaaaatagaaacaatttaagtgaaacaatagcttcaattttgtaataaagaatcttatctgaagcttaagtttcactttattttaatgtaatttaatttgtaatcttctcctctttatagttatcctttaagtttattaatttaaaaattattgcaccaaatatagcagataagattgaaacaatcataacactcatcttagccaaagataatgtcccttcatcagtaaatgataaagaagatataaataacgacatcgtgaatccaatgcctgcaagaatactcgcaccatataaatgtcttttagtcacattagatggtaactcagcccactttaattttactaaaatatacgaaatcccaaatattccaacttgtttaccaacaaaaagcccagctataattcctagactaactggtgaaaatattatatttgataaactatccacactaatcaccacgccagaatttgcaatggagaatatcggcataataataaagctggatacaggtgttaacgcatgttcaaatttatataaaactgatgttttaaactcgttaacattttttcccgtaggtaatgctatcccaagtaaaactccagcaattgttgcatgtatacctgatttcaaaataaaaatccataagactaaccccataataatgtaaaatgatttatatttaacttgtaatttattagctattagaagtattacaaaaattatcaagcctatggcaagtgaaagccatgaaatttgattgctatagaatatcgctattactataatagctcctagatcatcaactattgctaacgctgtaagaaaaactactattccttttggtgcatttttagctactaacgaaagaatgcctaacgcaaatgcaatgtctgttgccattggtattccccatccggaaattgtcactgctttataattaactaaagcgtatataattgctggtacaatcatccctcctactgccgctgatattggaagtattgtcttattaaaagatttaagttctccaaacacaacttccctctttatctccataccaacaactaagaagaatatagccattaatccatcattgatccaatgaagaactgacatcgacaaagaaagattcatatatcctatggctatataagtatgtaatgtattctcatatattgacgcaaatttagaatttgcgattatcattgccaaaagtgcagaaattaataatattatgccacttgaagattcatttttaaaaaagtatataaatggatttaaaattttattcttcatacttgcttttccacctttctatcttatatataacctaaaacgaaaacttaatgcattaatatttaatgcatcaatatgcaaggcatattcctaattataaaaaagatgagaatactctaaattagagcttcccaccacctaaactaattgattgaatataaataataatatcttagatatccaaaacagttaaactataaatttaacatttttatgctttatctctaacaaataataatttataaatttgaactataataagtgggataactgataatccataaatataactaaattccattgaatttaatgcactaacttcaaagattccacttaaaggtctaaaagtcagaactaatagtaatagcaaatagccaattattgctgcaatccatatagttttgtttgtaaataatcctattttaaaaatcgattctttagatctacaattaaatccatgaagcagccttgataaacataaagttgcaaaagccattgtacttgcaacctcagcaccacctgtatataatcctatgtgaaaagccgccatagtaactattgcaataagcaacccttccattataacttcaattgcaaaagatttattaagtattggaacatttatatttcttggtttttctttcattatgttctcattatgaggctcaagtcctattgctattgctggtaagctatctgtaaccaaattaataaacaataggtgaactgctgcaaaaggtattggtaatgctcctattgacgcatacaatactgataatattcctgcagtattacctgataagagaaatttaattgaatttttaatatttgcatatatgcttctcccatttgagatagattttactatagttgaaaaattgtcatcagcaagtacaattgaagcagcatctttagcaacttctgtccccgttattcccattgcaattcctatatccgcctgctttaaagctggggcatcatttacaccatctccggtcattgcaacaatatttcctttttcctgccatgctcttactattctgattttatgttctggagatactctagcataaactgaaatcttatctactttgttttttaactcttcatcactaattttctccaattcaaagccttccattgcctctgattcatctttaagtattcctatttgcttagctatagcagatgcagtaattttatgatcaccagttatcattacaggttttattcctgctttaatgcatttttcaacagcttctttcgattcatttcttggtgggtccatcatagctataagaccaacaaatattaaatcatattcatcttcaaaagtaatttcttttccttctgaaatctccttataagcaaaagacaaaactctaagcccatccattgaaaattttctatttatctcttcaatttcttttttgtgctcttctgtaaaatccattattccttctgaagtttcaacttttactgttcttgataaaagtacatctaatgcacctttagttaacattatgtatttatcattaaactggtgaatagtactcattaattttctatctgaatcaaaaggtacttctccaagtcttggatattgatctcttatgatcaattcatctagttcatatacttcacctagattaactaatgcaacttcagttggatcaccaatttccttattttctactgtaacagcatcattacacaataatgccattaaaactaaatttttctctaaagtcttatcatgatccaaactatcatgatcaagtactttaccatcaacaaaaactttctgtactgtcattttgttttgtgttaaagtccctgttttatctgaacatataaccgatatacttccaagactttcaacagcatgaagttttcttacaattgcatttttcttagccatcttttgagttccaagtgcaagaacaattgttactattgaacttagcgcttctggtatagctgccaccgctaaagatactgcaaacataaaagaatctataatattacgccctctaaatatatctaaaccaaaaataattgctgaaattattaaaatgacaaaagcaagttttttaccgaagttatctaaaccaacttgaagcggtgttttcttttcctttgcactttctaacaagttcgctattttcccaatttcggtattcatccctatacttgtaactaaaacaactcctcttccgtaagttacaaagcttccggaaaataccatgttttttctgtcaccaatagatacatcatctttatttattacatctataaattttaaaacactttctgactcacctgttaaagaactctcattcacttgaagactaaaactttcaagaattctaccatctgcactaacataatctccagcatcaagatataaaatatctcctactaaaagttctcttgaaggaatctcaatcttttgaccatttctaaaaacctttgctacaggtgatgaaagggccttaagtccctttaatgattgttctgctttaatatgttgtattgtgccaagtattgaattgataataactacaaccattataacaatggtactttcaagctttccaagaaaagctgaaatgattgctgctcctaataatataattactaaaaagtccttaaactgctcaagaaaaacccgaaatggacttttccttgctgcttcctctaattcattaaaaccatatttctctcgtctttttgtaatttcttcatcatttaagccatttctagtaactcctaacatttccagtgactcttctggcgttttctcataataccctctcataaactgtcctccttaaaccttaaatatttttcgttttttcattacttatatagactcccttctaattatttgattttctatttattaatttattataaattaataaaaatatacttaaaaaaatgataataaaaacaaaaaatattacattatttattcatcatatgaacttactctaattataacttataaaatatcatgttaaaacaattataaagttacaaattactacacgtgcaataaagtaaaggcatttactttcaaagtttgccacttactttattctataagcaacccatcttgataaccttcctataacttcaaatgaaactatgttacataccaactcagttagctttccaaacttcctataaagcaaattaaaagctaaaaatggaatccattgttttttagatttaggaagtctcttaattatattcttaagcgtatacacttctttatatatccatagatagccgtcatataattcttctgctgtcatattctttggtttgtatacaacatgggaagtattataattagataaattatgatctactattctattttcctttaataatgatgcgtataactttgtgcctggataaggagtcattatatgagacgttactgtctctattttatttttaactatccactctaatgtactcttaaatatttctgcatcatcttcatctaatccaaaaacaaagcttgcatttatcattatccctcttttatgaatttcatcaacaagcttctcatatctacttacactgttttgagttttatgtacgctctctattgacttactatttatactttcaaaccctataaaaaggctttgacatcctgattctttcatctcatctaatacatcaggcatgtccactatattagacgtaactgctgcattccatttcaactttagaggtttcatttcttttaataattccttagtccatttgggatttccaataaaattatcatcaataaacataatatgttttgtttttagtactttaatgtcttcaattacatcctctataggcctattaatataagttttaatggaattagtgcagctattatagcaaaaatcacatttaaaagggcatcctctgcttgtactgattatattagtatataaatatttcttattatctatcatgccataatcaggagatactatttcatttccattaatattttccatatcataatatatttttttaattgaattattttctatatccttaagaaccttcttccaaaccctctcagccattcctataattattgcatcaaagctgtttgcagctccttctggatctgctgttatatgtatacctcctgcaattacttttactccacgtttttggaattcctttgatatttctgccgccctattcataacatctacagtaacagttattgcaactaaatcaacatcttcatcaaaatctatcttatcaacattttcattttcaataataatctcatgttctttaggcgtaagatttgctattgtgagtagagctaatgaaggagacattcttgtctttaattttgtatccataggccttggaagcattgcaggttgaattaacttaatcttcatagtatttcccctcaaattattattttgaaattattaatttcaaagtattatgcttattggctaaaattatcattcttaacatattgaacataaactattattagaataaaatatgtaatcttactcatactctatagaactctgctaaaaaagaatctacaaattataaattatctttcttttacaagatgaaaacctagttatatttatcttatttttaagtatccacatcacttctatactctaatatatcgcctggctgacaatctagggctttgcatattgcctctaaagttgaaaatctaatagcttttgccttgccatttttgagtatagaaagattagccattgttattccaactctctcagtaagctccgtcacactcatttttcttttagctagcataacatcaatattaattataatcgccatattattttcctcctgcattcttcattctgtacattaagattattaatctttacgccttacactgttaaatcattttctgattttatgtctatggcttcttttaagagcctttgaagaacagcagagaaaactgcgattaccaatgaagcaaaaataggtgtcattccaattattattaaacctggagcatcgtctttctctgctaacaagtaaacaaatggaattactaccacatataatgcagatattataactgcagagtattttatattctttaaagcctttacagataactcagaaaacgctacatttttatcaatataccttaaaagttttaaggcctgatataatgcagcaaagaacggcacaactgatacaagcacacctgctaaaattggatatatcatatttgcatagtctggatttattggattattagtcaatcgaaatgccccaaatatacataaagcaagaactggaactccgataagaataacagctatctttaaaaaaatcgttgaatatcgtttcataaaaagcacctcacttttaaattctatatataagatatcacatcttttatcgtttatcaataaatttttattatatttcatatattatttatttttagacaagaatatattgattaattgtgttagtttaaaaacgagataaaaaatcctgatagcagatttggacacaaaaaagaactaaatactttgtgaatgctttgccttcctgtgcaatcataaaaaaagtgctatatctcatgatatttagcactttttctataacattttctcatttatatataaattatttctactcccgaaaaactaacatctccaactaatgttaatgtatttgtcgatctctcattgttcctatttttttcatcaacagaacctaaaaatacattagtcttattatcaaccttccaagttcttggtatatataactctactcctgaaaaagaagcattaactcttactatagcattttcgctactcataactgcattatcaaaatacaccttcatagctccaaatgagcagttaagatcagcttgttcaaattcatttgtatttatatatttaatacaagctccaaatgaatttctaaatataatattaccttcatcttctatgtcaattttttcaaatttataatcctcatgaacatgactatgatgaatccagttaacatgtttatgaaaaatcatggaaaggccgatactaccaaatagtgctgccataagcacggtccaaggggtaatagctgtaattcctaattgtctagcatagattatacaaataaatgcaattgggaatagaatacctgaaaagttaagatgaggtatactttttgctatgatcactactaagaaaactgttaatattaaactaaatgcatttatatctgggaagtatccaagtttacttataaccataaagatacctgctagtataaataaaattccccagaagactctttcttttttcatcattatttcctcttttctaataatttaatttttaatggcttgtaataatatcttgagacatacacctgtttgtgagtattttgaaattcaactctgcttgatgatgatatactttttgttatggagtaaatatgatttgtatttagtattgttgattttgaaactctcataaaatatcctggcaataattcctcgagttcatatagcttatactttacgttatatatattattaatggtatgtgcacaaataccgctttcttcagtttcaaaaaacaaaatttcttccagtgaaagataatactctgtttctcctttgtaaaaggttatatgctttttttgcgatagcagctcaccaagcacaatttgaatatttctaacctcttcatttaattcattacatttaataataacttcattttctttaatttcattatcaagttcaacccgtattttcatattttcactccccacatctttattatatttgctgacttttacgttgtaaacacgatagcagtaagtggttagttatcacttgtaagtggtacatttttatatactttttgcatgatctttgatttttctaaatcttcacgtattttttatctataataatctttagaaaaaataactcttttatactttttcttcttaattttcataaaaactatcgtttagggaattctatattaagagaatttaaagagaaaggaagataaaagtttacccatcagaacaacttccagatataaatgaagttttacaggttttatctaataaccaataacatattaatggaatgattaaatgacttgcttatgatttaataattttgtaattgcatttataattcatgcttagcatattttctaagcatgaattataaaattgcacatactaaaaaatccaaggccaatgaaccttggattttcataatataaatatatctataaactttttaatgaaaaaatcaactttacttaaaattatttatctttgtctaaattacgccaattaccatcatatccattgctatcaagccacttataagtttttactatttcattattctttatttgatatattgaaagtcctccttgatgtggcacgcaatatacatttttacttgtcttaccaaccatgtatccacagtattcatcattataagagcctgtaaggctaaacacatatacatcctctactggtagattccatttatcgttagctatgaacttattaatattcccttcaaaatatctttttgtcagcttagcgccatatgcagcattcatttttgaaatataattactgtcttcttttaatattaaatttcttgcttcttcagcttccttggatggtttaatccaagttccatcttcatctagttcatatccatcaattacagtaccatgtgccatagctccatcttgataaaaataatgccaagtctcataataattatcttgcacccatccagttttcatatatccatttgaatcaaaataatacgtctttccattaatgtctctccatcccttagcatatgaatttccttctgagtaccaccatccactattatcttgtctccattcagcactagctccagttggacttaaaactaatactgaaattaccactaaagcgccagatattaactttctcattttatttcccccatattttttcataacatgattttatgttatttattatatttataaaatattactaatcatatcttatgaatattgaatgaaatttatgagcttaaactggttattaaataattatcatcaccttgctttaatttcacatacctttctctaagattggcattattccagcatattcttaagaatatatatggtttagaatatatattctagtattcttcagaataaatattctaatattctgaagaatatttattttttgcaacataatatatgttccaattcacaatgcacatttcacaattacggctaaaattcttgcaatatttttaagatcatgataaagaattatttttgtaatatatattataaaaatttttatcaagaaactttcttagctttaaacgttaaccggctcgtctatttggattgagttcagaattttcataaattcatcacccattatggtttccttgaaaattagatgcgatgatattttgcccaaagcttccatattagcctttaggagattttttgccttttcgtaggattcattgattatattcataacctcacggtcaacttcagcagatatttcatctgaacaattccttactggtctgccgtcaagatatctgttttgaattgattcaagtcctatcataccaaatttttctgacattccatacattgttaccatttgtcttgcaatactagtagctctttcaatatcatttgaagcacctgtagttatttcattaaacacaagatcttcagctgctcttcctgcaagaagaacaactatctgttctagcaattcatctttagacataaggtacttttcttcttccggcatctgcatagtatatccaagtgctcccattgttcttggaacaattgtaatcttatgaactggctgagtctttttctgaagcgctgaagctaatgcatgtccaacttcgtgaaatgcaacaagacttttctcattctcagtcattactctatcctttttctctttacctgcaattacagtttcgactgcctcaaataaatcatcctgcctaaccgtatctctccccattcttacagctcttaaagcagcttcattaaccatgtttgcaagatcagcaccaacagcaccagcagtagcaagtgctatctcttttaaattaacgctttcatccattattatattcttagaatgaacctttaatatattttctcttcccttaagatctggtttatctactataactctacgatcaaaacgtccaggtcttaatagcgctttatcaaggacttctggtctattagtggctgcaagaataacaactccctttgaagaatcgaagccatccatttcagcaagtaactggtttaaggtctgttctctttcatcatttccacttatattaccttctctactcttacctattgcatcaatttcatcaataaaaataatacatggtgcttgcttttcagcttgagcaaacaaatctcttactcttgaagctccaacacctacaaacatctctacaaaacctgacccagaaagtgagaaaaatggtacctttgcttctcctgctacagcttttgcaagtaatgtctttcctgtacctggaggtcctactaaaagtgcgcctttaggaagcttagctcctatctttgtatatctttcaggtttgtgaagaaaatcaactatctccttaagagattctttagcttcttcctgacctgctacatctttaaaagatactcctgtagtcttttcaacatataccttcgcattactttttccgacggacataaatcctcctccgccgcctccaattttattacttaaagacttcatgaaccaattacctaacatatagaatatagcaaaaggtataatccaagaaagtataaaaccgataattggagactgagtattttttacaggggtagtaaactttacatctgcattatatagtttatctacaagttgaggataatctaagttgccagtataatataattttttatttacaactgaagcatcctcatcactttttggtgttataacaagcttgtcactatagatctcaactgattctacttgtttattatttaccattgtaagaaattcactataatcaatttgtttatgatttgactgagaaatcaaatttataactatgtttattactaatgtaattataagcgctgctataatgtatttcggtaactcctttttattgggtaatccattttttttaggcgactcttttctattttgaaacataaactttcctcctttaatattagcaaattacaaccttaaccaaataatctgtattgtatggactttaacacgctccatgcatgataatttattattctctatcactacttcccatgaataaaaatataaggtgaagcaaacttgcaacagcagttattgcagaagcaacataagtcatagctgctgcatttagcactttttttgcaggagccatttcattaaaactaagtattccttgggattctaactctgatattgctcttttacttgcattaaattctactggtaaagttacaaaataaaatgctaccgccccagtaaaaaacactatgcctagttgtgcaagcaaaggaatttgaaatattaatccaaaaatcgccatatatgggcctgccatagaacctatatttgcaatttgtacaagcccacttcttatagaaagtggtgcatattgtactttatgttgtattgcatgtccagtttcatgagctgcaacacctatggctgcaacagaattgctgtaatatactgattcagataatctcactaccttttttccaggatcatagtgatcagttaagctgcctgctgtgggaactacagctacatcataaagtccatttctatcaagaattctccttgcaacatctgcaccagtaaatcctctagcattgccataattgctatacttgtcaaaagttccttttactttaaattgacaataaagcgaaaaagccaatgccggtaaaactaaaataatataataaatgtccatgtttatccctccactatcttgattttatagttttaatttaacaaaaaagacctttgatctgattcagtaacaactaaatcgtatcaaaggtcttgctttccatttggagtatagaaccaggcagttttaattgccggttgttggctctatagcttataagctactcccctaagttatatgaagtatatcataccttattatatggtgtcaatacatattaattcacaaatttctattttgttttaattttcactacattccgacattttataaatataggtaattatttaagactatgaaaagtgtccaaacctcaataaatattcacctagcttacgacattgattaatcataatgcaataataataaattatttcactgatgcttcatagatttctttaattgattttaatattgttgcattaaattcttcttcagtttgctgagcagtgagcccttgagataaagctcttgaaaaactggcaattaatccattattgcgtccgagtctttcgtttgcttctgcttgactataaccacctgacagagctactactctgacaacatgtggctcatctattaaatcaatgtagaaattatcttgagttggtattgaaagtttaagcatcacttttgtttctttatcaagttttgataattgctctaaaatttcaagttttaaaagtttttcagattcttccttatcggtgctatggatgtcaacttctggttcaataataggaacaagacctgcttctacaatctgtttaccaatttcaaattgctgatcaactaccattttaattcctttagcatttgcttccttaataactgagcgcatttttgttccaaaaatgtttttttctactgcctgctttaaaagatcatctaaattacttattggtttcataagctgaacaccattttcaatttcagttaagcctttatcaacctttaagaaaggtacaatatttttttccttccaaagataatcaggtgtatattgattgtcaatagtacgatacattgtgtcttcaaatagtatagcacccaaaatatattctgaagtaaatgctggactctttattatgcgcttcctcatttcatgtacttgatcaaacatttcctcctcattagaataactattttctttaatcccatactcaagtaacgcttttggagtactgccaccactttgatctaaagctgcaataaatcctttacctgtatgtattcggttcatttgattttcattcatctaattctcctccttctctttatcttagattagaatcatgtcttactttttattatagtgtctttctctattaattatgcgtttgctaatattataaatttaacacaatctgcaatcactataaataaagctcaaagaaataatataagtcctttgagctttatttataaattcacatatagttgattaattattatccaaactaatgagtaattgaatacttttttatgaattacgcataactaatgttggaatatattaaaatgattaattctattaagtaaattacttaattcagctccttcaaaggaacttatttcactagtaaattttgctttaaatatactatggaaggggaaatatattatgaaaaaatctactatagtgttttttatatttttattattgtcatttactaatttagctcaaaataccagtgctgctcccataagtttaagtcaaggtatttataatgtacgagatattaatctaccaataggttctactgtgacggctagaattaatgaccctaacggtagagttattatcttcgtcattgataataaccaatacatgagagaacttacaaggctagattctcaatcaaacgaacaaactcttaaaccttttaactatggctattcagttataatttttgggaatactcctgttactttctcctaaaaaactttctcaattcatatacttttaattttttctgcaatagcagcaatataatttcaaaaccaaaagcatcagttaaactttctaatctactgcttttaaatgtatttactcaacagtgaattttatatttattttacatactcttcttataagtgcaatagagcataaaaaatgcagtcaagttaatgactgcacttaatgggatctaaagtaaaaattgaaaatagctcaactttcacaactatattttatcacatttatttataaattttaagcaataaataaagcagtagaaaaatttcttctaactactgcttttagttttactttattgggcaattgccttcattaatgttacaacatcatcttcacccggtaaccaagcaccgccttttttagttaatgttattgttactgtctgtggttcttcttttaatataccagacgccatactgccccctataagcttaaaagcttctgtatatatttgttgttcagtcattgaaggattttcagtaacttttttcattatttcactctggccattttcagtgattttcttcatatcaaacccttttattttaacttgaacttttgctgtgtccttttctgttgacgcagaaaccacttcatattccactttagttaatcctgtaataatatctttcttaaaagaattttttatatcatctgttagaatgctttcatctaaacctgaatttccaaaggccatcatcatgccatcatcaaagctacttctaaattcagtataatcttcttccttcatccctatcttgtccatattagttttatcatcttttaaaagtagatctaaaaatattttagcactttcttctggagttgcttttgttccgcaacctactagcattattgttaccatcataacagctaacaatatggtagaaattcttttgatttttttcattattattccccctaaaatatagtatttaatttcatatagcaatacattaattaccacatggttaatattttattatattttccaattaatttcaacatttatttcatattaattcaatacttgggcatatatgtaaccagttaagttaaataataaagaggcaaactagaaattcttaactagagcgcctcaattgctttattcacatttcgctataagcatatattacaaactataatataagttgttggaaaatacaggactcgaacctgtggagcttttacactcactagcttagtaagccagcccattaaaccactctgacaattttccatataagagaatattatttaattgttctccttagcaattcattgtactcattcagtgcaaagtttaatcttctacacacactaatcacctccctatctaatgaatttccttcatcgcccataattttgcataaggcttgtctcattctactaatcatcatctctttttcttttaaatattccaaatatttaccctccttactttttttattagtataacccctaaatagtaaaatttatgtatcacttgttacataaataggttgcggccaaaatattcatattatttacatatattctatgtataacctcagaacttcaaatgtaattacttaatatgatgaacgcatgaaaattatatatttctggattaataattccacatctgttttataacctaattttctattgttctctgtgtatattgtttaacatttcttaagtgtatctaatatattaaaagtaaatgaggtgtttatgatgccaaataatgaaaatgaaatattttatatagttggcgccatacttactatattagtaaacgtgccagagattataagacaaataaatattaatttaaagttcaatgaatctataaagcaccataaaatactatgattaggatgcaaaaaaagcgcttagaataattctaaacgctttttccttccaaaaattaattcctctataattgtaattttgtcttagttgaatacagaaacatttatttcactagttatatttaataataaaaagcattccctctaatttaatataatactacaaaggtatattttcttattcacaattaatagatatcctatattttaaacttagctataatccatcttaactcttcagacatttgagatagaagtttactagatgaagctatctcctcaacagatgctaattgttcctcagccgctgccgatattgtttgagtctcatcagctatattactacttatgtttttaatattatttactgaatcaacagattctttagttcctacagttacttcagtgatagaatatgatatttcatgaatctgactagatatttctattatcatttgaaggatttccttaaaacttattcctgcaacatcaacgacatctgctcctgttttaacttcttttgagttttcattcataacagcaactgcactattggttttgttttgtacatcattaataattccagctatttctttagttgcctcttgtgattgttctgctaactttctaatttcttccgctactacactaaaacctttcccggcttccccagcccttgcagattctattgccgcatttaatgctagaagatttgtttgctctgatataccttggattgtatcaagtatttgtccaattttcactgatttctcttcaagctcgcttataatatgcgatgtttcactagtctttttctctattatttccatttggttcattgccttcactacagcctcttcgccagcatttgctgatatttttgccttatctgttaacgatgaaacagattttgtattttcagatactacatttatcttattagatatgttttcaaccactttgtttgtactattagcaaaagaaaattgctcatctgctccatgtgccattgttgttactgcggatgcaactagatttgatgcatctgctgattgctcagcacttgctgtaagctcttcagatgataatactaactgctcagatgtatttcctaattgttttattagttcaataatgtttttggtcatcttatctatcgcattacttacaacaccaaattcactcttatcattaagactttcttcttttatctttacagaaaaatcaccttgtgataaagaacccatgtatactacaaagtcatttaatctctttgtgatacgttttgttattagtattcctaataaaattgctaatattgaagctataataacaatacttataaatgttgctgttgcaatttttaaatttgctttatcctgagcgtttattttttcagcaatttgtctattatgttctccaagttcaactaaatcagctaagaaagtatcagcatatgattcaacgtttttctcatagtattcgtacgcttcttgatttttgttttcaatggctaaatctagtgcgacttttcttccttccctatatttagctaaattactatcaatcttactgatcttatcagcctcaaaatcatctaatttcatttttttataaagagccatatagttgttaaattcttcagcacgagtatttatatcttttgttaaattactattttcatttttatcagtagttaccataattctaaaaatgtcagctgatatagcccttgcatgcactctagactcactaagccattcactagatagcagtctttcactatacatgacctccatacttttactagacgtttgtaaaaaatagtaaccggttattccaactgcaaataatcctactaaagagcaaattataagcatcgctaattttctacctacctttaaattattaagccacgtcattttattgtcccccttatcttaatactaggatcttaaatataatttcattattacaatatatttattaaaatgattaataaaaaataaaaaaccaacaaaaacttaatatgtttatggattactaagttttaattggtcggttgcacaactagctccaaattctcaaagtgcccagatatagagaatttttcatcgcttccaattgttctattttttataaatacacttacctaatatatagaaatattatcatattcatgcaaaaaaatcaataatgcttaatataaattgtcgaaatttattccattagcttccgattatactattcttatttacagtagaaaatttttaattatacgaaacttccctgtacaaccatatcaattcactagttctccttaaattaatgcatctcaactaataagtacttttctaagattcaagaatgaaaaaaactacgcagaatcaaaattaattcgacttaggattttttcataattttatttaccaataaatcacaaataaatgctatatataaataggacgaaccttaaaaatagatactaaacgctctatttttaaggtttctttttatacattcttatagaattacatccgcaatgtaatattattttctaaagcacccccattcttcacagttccatatatctgtagcaatatctttataaaattccgattcatgacatactaaaatcatgcttccttcatattcttttaacgcacgctttagttcatttttagcattaatatctaggtgatttgttggttcatctaatactaatacatttgtatattcattaataagtttgcataacctgactttggcttgctctcctccgcttaatatattaatggggctatctatatgctgccttgttaatccacacctagccaattctcttcttacctccgtttgagttaggtgaggaaactcactccaaacatcatataaaactgaattagtgctattccatgcaatttcctgctcaaaatatcctatttttctatgctcacttaaagtaatttcaccatttataggttttagcattccaagtaaggtttttagcagagtagtctttcctaatccattagctcctgttactgcaattttttgtcctcttttcatttttaagtttaaaggtttgcttaaaggtctgttatatccgataatcaagttgcttacttcaaggattatactttctggcatttttacagttttaaaattaaaatgaggttttataatttctttttttatttctattctttcaatcttattaagtttcttttctcttgatttagcttactttgaagttgaggctcttgctttattttttcttatataatcttcaagcttttctatttcattttgttgttctttatattcaatcaatctctgttcttttcgtatttcgtatagtttaataaaataatcataattcccttcatatcttgttaatactttgtgctcaagatgataaactacgtttactacattatttaaaaaagcattatcatgtgatattaatataaatgcattttcataatttgctagataattcttaagccattcaatatgctcttcatccaaatgattagtcggctcatccagtaataaaatatctggcttttgcaaaagtaatttagcgagtaaaatcttagttctttgcccgccacttaaagttgaaacatctttatccaaaagttccttaattccaagacctactgcagttgcctgtattttagaattaatgctatagaaatcatctttatctaatatttcttgcataatagcaattttatttaaagatttttccatatccttctcactcatattttgaatatcaatatataaactattaattttactttctatattaaataaattagcaaatgcttcttttaagaaatttaacgcatcaattccttctttcaaatcaaccaattgatccatataaccaatgctgaatttattattccactcaatagtacctttatctggtaatatctgatcagtaatgattttcatcaaagtcgattttccttctccattagcaccaataagtccaatatgctctccttttaataacctaaaagatacatcattaaataatattctatcgccaaatgaatgactcatgttttcaattgttaaaatactcatattctacatctccttgtgtcctcataataaatgatatcatcatgtaatatgaagaccaagtttaagaataaatctgtaatgtttataatcatactgaaaaaaggcatattctccatagtaatgactgtgaaaaatatgccttttctcttatatttaagtagaatttttttgtttccttattattcttctaatactaccttcagttaaaaaatactgttcagctaaaattttaacggacattccagatgaatacttatcaaaaatttctttatctcttgcactaagatatcttttagtctcagtattttctccccatgattttttgttttcattttttcttggtatatagatatatccaccatctgtatatttttgaattagttcaattatattatatggcaatatattttgtgctttttcatatttcataatttcttcgctccactctacatttaatatctaaatgaagatgcaaagacctattataatatgaaaaacttaatgttgatatattggctccaggcaaaagtttttcacatattataatctttgcatggagctaactactattactagaaacataatgaattcacttcctttttattctataatattatatcacaataacttgtgtcaattttgacgctttgagcctcaaatttaattcttatttctaaatcctaagaagatacttcattataatttaactcaacttactaaaaacataatcaatatctctagttattttagtatctataaatccattgtccatcatactttttagtatttccattgccttttcgtgggctaatccctctctatatggtctttcctctgtaagtgcctgatagatatcaagacaagtcataagacgcgaattaaaatctaattctttatctgtcatcccaataggatatccttttccatttaacttttcatgatgatttgaagcccactcagttatatcctcaaatccttttatttcttgaagtgctaatctagtgtactctggatgtttcattataattttaaattcctcattagaaagtttatcaggcttgtctaacacatcatttggcactgctagtttaccaatatcatgaagatctgcagcaataattagcttcatcttttcttccttctctaagttatagaaatctgccataatagccgccttctctgataaaccctgagaatgcctttgagtatagctagatttagagtcaataatctttgacaacacattagttataccatgaatctcttcaaatgataattccagactatgctttggaattcttttttctaattctatactaataaaactattttctaaattcatccagaactttttctcttcagtaactttaaaaaacgcttttacaattcttgaagaaaatgatatattttcttgatttcttacaaattcacaaactttgttttgcatatcttgattattattctgcaaatcaaaggtcttttctaaagcatctgcgattgctataatttgcgacattagaggaatttcttctcctcttaaactaaagaatcctgtgccatcatacctttcatgatggtactttattatatttttcacattagtaagcaatggatagtttttaatattactttctccaattgtacaatgttcttttacaccttctaataatgctgcattttttaattcttttgtagctaatttttcatgcaggctatattcacttaacccattgtcatgaagcattgcaagtgcagctacatcatggagctcttctgaattcagccccagttctttagcaatactaattgaaatatatgcagttctttttccatggttagatgccatcccgagaatatccatctccacaaagtctaaagcaaatgaaacagccattagaaattcatttaacctaaataacataatcctcctccttgttacatcaaacttatcttttgtataaaaaaacgaaaatagtataaaaatattttatactattttcggtacttttaccacaaaattagttcatttaccaattatgctatctgctgttatattttcaccgaatttttactatgtctttaaaaagtataagactactgtataaatatgcattaaacaacttatacagtagtcttatattatatatagtattttctacttctaatgtgttatatatggttatgaaattctattttcctaataattcatcaactaatgctttattgttttctacgcaatgcccacagccagttcctacttcagttttttcttgaacttcttcaaatgattttgcgccattagcaatagcattctttatgtcttttactttaacatttttacatccgcatattactttatcatcatccattatattgcctccttagttattgttagattaaatataaagctttttacactgaatagttttaacacttttatttttattatgtatactaatagtgaaattcaaagcttttacaccctaaatccaatattaatatttggggtgtaaaagctctgatcaataaaatttcacaaattcagcagcaggctttctatatcctctaattttattactactcttgtccattttccccatagtaatcattaaaactggaacttcgttctctggaatatttaataacttaccaattttctccttctcaaaataaatcattgggcatgtgtcccagcctttatttttagctaataacataaatagcattgctgacaatgaggcatttcttatagcttcatcatgtttaaattcttctccccagccttcataaagactattaatagtattaagcatgatttcataatcagttttatcgatcattccaagcatcattgagccttcataaattttatctgctgataagtatgcgtttttatcacctgttacaattatggttgctgaagcagtttttattttgtattgtttaaatgatgcatcataaactttctccataagctccttatcttctacaacatagtacctagcatgttgcaaattaaaagcagaaggcgccagtgaaagttctctaaatatatcattaaaatcttctctaggtattttaatattttcaataaatttattagctgatcttctttctcttacaatttttaaaaaatcattcattattaaccctctttttattcttattttgtttaagaaattcaaccaacctccctctgaagattagttgaacttatacaattcttaattttctttcttcatttctaaaatcaaaatatgagatgtctttttagctttgattaaaatatcttcctcaactatttccattccatctctattatttaattcaatgtcatttattatagcgccaccttctatttgaaccaaataggcctgtctcccttcattaacttgaaaattaatttcttttcccttatcaagttccaaagaataaacatttatatcttgatttatttttattggcgcatttccatttttacttgaaaccatatgaagccatttattttgtctatcgctccagtcaaatctataatctccataattaggcttataatcttccttatctgggaatatccatatctgtaaaaatctcaactcatcttttcctaaattatgctcgctatgatatacgcctgtgccagcactcatgtattgaacatgaccacgagttattgtatttttatttcccatgctgtctccatgtgtaagttcaccgttaactacatatgatattatttccatgtttctatgtggatgagtatcgaatccagtgttagattcaactaaatcatcatttataactcttaaaactccaaactttatattatgtggattatagtattctgcaaatgaaaaatgaaatttacttcttaaccatcctaaattactactgcccatatttccgctatcaattactcttaacattttttatcctcctccattttatctaactctatcaaattttagatcatattcgcaaaatataatttataaataagtaatagataatagtaaatatttaaaaagtattactaataaactcaaagagtttttctactactcctactttttcactcttgctttttgctctattttaaaatatggttaacacttcagtactaattagttaattactaattagtactatttgtttaaaaactaaggtgtaagtttcactttatacacctgataatttctttaacatatttattagatcctttttttcttcaacacttaaagcgctaaaaatttcacttaaattatctacatgtttagggaagagttcactcataagctttcttcctttttcagatatgcttattaaacttgcacgtctatccttaggatcaggacgcctatcgatcaaatcatctttagccaagttatctataacaacagtcatattgccaccagttgaaagagttttttctaatatttcactgactcttaaatctcccttatgatacagtacttcaagcaccccaaattgtgaataagtcaatcctccttctttaatgatcttaagttctcttttattaacactttgtatgcatcggcttaatgctataatagcctttaaatttaaatcatttaattctccataagtaactttattcttattcatggatataatattattactaattagtaataatgtcaaggtatcatatcaaaatagttttcccaaaaacaaaaaccacacaaaagcttcattggttttacccaaatcaaaaaaagctatctaaaactcaaatattttaagacagcttcttcaacgtatagattatgtatgttaaataatatacttatgctattatctataacatattactacacttcatgaaggcatttattagtaggactttcaatccagattccctcataattgtatcttgaaccatggcaaggacagtcccaagtcaaatcatcagcattccatttaagttcgcagcctaaatgagcgcactttgttgatactgtatatactttgccttcattatccttgtagacaccagccttttcacctttatattctataatacctccatgaccatttccaatactatttaaggtttcctctggaatatttatcctctctgctataaaattttttgcagttatgacaagatcctttgcagcatttttcatggatgctgacatgtcaaatcttcttggcgagaatatttcagagaagtcattttccttttcaagaatcatatcacttattatcattgctgcaaccattgaagttgtcattccccattttttaaatcctgtttcaacataaatatcaggagttttagatgagtagtgacctatataaggtatattgtctaatgttatacaatcttgagttgaccaatgatatttctctgttgcatttggataaaattctttagcaacctttcttaattcctcgtatgctcccccttcttcattttccccagttcttctggctgcaccatcaagtattaatagattcttataatttctaaatgaatatgtattttgatcaatacctttatacattcccttaacatcttgcgcattttctaaagctatagcatattctctttcttgatgcattctcataaaatagtaacctggagtatttaagaatggataatgcgatgctacaactattttattcgctttaattttcatatcattctttgtaactacagtattatcttcagtaatatcaagagctactgtattttcataaatagttaattgttctgaaattggtcttaggaattttagtggatgaaactgcgcttgattcttaaatttcaatgcttttttagcttttataggaatatttacttcatctacaagctccgcatcaattcctaatcttttcgctgcattatattcgttctcaatatctttaatgttgtcggaagtatacaagtatgcatctttatgctcaaaatcacaagcaattttttctgcatcaattatttccttgtatctccttatagcaagttcattggctcttgcatattgactagctccatcttctccaaattctttaattaatttatcataaattaattcatgctgagatgttattttagcagttgtatttttagtaactcctcctgctatacttctagcatcaattacaacaacatctcttccacttttacttagcatatatgctgtgagcagtcctgccattccagcacctattacaagaatgtcacattgaatgtcttgatttaaagtttctctttttctaaaattcacttcatagctccatacactttccatgtaaatcacctcatgcttagtattccatttttttagatactatacacgaatttctattagttcctacaaataatatcaaaacctcagaattgcgaaaaaagaggcataaaaccttctgaatcggcctttttcataatttatatcaacaggtagcaacatgtcaacatgtttcactctaacataataaaaggcttctaacataacaataagtattatgctaaaagtcttaccacaaataatttgttattctaactccccaacccttttaaatatttttagtaatcgcaaataatgatttgcttcacgcaaaatatggtcacctaatagtggtactattatgaatttaattttacactctaataaccctactgtaccttgttctttaaatttacctattgctaaagtcgctttataactatcatctgtaactttagaaagtggaactgattggttcatagcttcccttgcttccattgttaacttatcaaactcacgtccaaagttatttgacatatttattaattcatcttctgttggatcaagaagtcctcgaaggaattttgcatgttcagccataattctattccagaaatattcctgctcataagcttctctctctaaatcaatatctttgcgttcctgcaatctagttccattgactgtcaataaatccataatgtaattggattgctcattttataaaagtaattaatatttttggaacatatgcagccaaggtattccaattcttactaaatttattacaaatagtaattgacaaaaatgattatcattattaatatatacctataccccctagggtataatatcaagaaaattaattaaggaggatgctaatatgcgtcaatgtatggatgttccaaaaattcaaactagaataaaaaaaattgagggtcaacttagagctatttcagaaatgataaataaagatgttccttgtgaagatattttaatacaaattaatgctgcaaaaagtgcattacataaagttggtcaggtagttttagaaggacatttacaacactgtgtccgtgatggcattgaacatggcgatgctgataaaacaattgctgaatttgctaaagcagtagagcatttttcaaggatgggataggtgataacatgagtaaaataaaagaattctttgaaaatgaagaaaaacgtacttttctatttttatttttatctgcttttgcattgcttattagtttcttacatattgtaaatttcaaaattgatatagcttgggtggctattattttatgtggcttccctattgtaaaaggcgccattgaaggacttataactgaatttgatattaaggcagacgtcttagttgccattgcacttgttgcatctattttaattggagaaacttttgctgcaggtgaagttgcttttattatgacattgggcgcgttattagaggaacatactgttgctaaagcccgtgcaggtattgaaaagttagtaaatcttactccaaggacagctagaattgtacgtgatggaattgaaagtataatccctgctgaagaagttaaggttttagatattctccgtgtgcttcctggcgaaactattgctgttgatggtctcattatttctggacaaacgtctatcaatcaagccgtaatgacaggtgaatctatgccagttgataaaggtgtaggtgacgaagtcttcagtggaacagttaaccaatttggtgcatttgatatgaagtccacaaaggttgacgaagatagttccctaaaaagaatgatcaaacttgttgagtctgctgatgcaagcaaagctaaaattgttggaatggcagataaatgggctacttggatagttgtaattgcccttgtatcagcagctggcacttggtttgttacaggagaaattattcgtgctgttacaatacttgttgtattctgcccttgtgctttagttcttgcaactcctacggccataatggctggcataggaaatgctacaaagcatggtattcttgttcgtgaaggtgacgcacttgaaagattagcaagtgtaaaaagaattgcattcgataaaactggtactttgacatatggaaagcctgatgttgtagcaattgaaagttttaatgaaaatattaattcagaaaaactacttgaagtaacagcttctgctgaacttcgttccgagcatcctctgggtaaatcaatagtttcacactttaaaaccacgtcaaaatctatccctgaagatcctcaacgattcgaacttatagctggccgtggtgttaaatcaattatcaatgatgatacaatctttgctggaaatgctgaactactagctgaaagttctatagaaataccaaataaaatatcggacaaggcattaagttatataaaagaaggttgtaccgttatctatgtagctgttaactcacaaacttctggttttatagttttatctgatactttacgaaaagattctaagtcaatgattaaaaagctaagctcaatcaatgtagaaagtatcttattaacaggagataatcctaaagctgcttctcatattgctaaaaacgtaggtattattaatgttcactctgaatgtttgccagaagataaattatctgtaattgaagaatatcaaaataacaatgaaatgatatgtatgataggcgatggaattaatgatgctcctgcactaaaaaaagcatatgtaggtatcgcaatgggcggtgttggaagtgatattgctgttgatgcagcagatattgctcttgttagtgatgatataaaagctcttccacatttactcagtctatcacaaaagaccatgaatacaatcaaatggaatttatctctttctatgctactaaactttacagctataatacttgcaatgacaggtatcttaaatccgatacttggagcactagttcataacttaggctcagttgcagttattataaattcagcattactattaaacttcaaaagtgaataaaagatttatgcattttattatcatagtattatttcccatattaattcactaccacaacatacatgaattaatatctgtataagtgatttttacacaaatatacagctttataaagtcaaataggccgaaaataatactttcgacttatttgactttttcactcatttcctaatttgtagtcctcatcatcataaaaaagtaactaagctataattctactaattataaattagcattgttatatgatactactcacctcccgtggcgcttgtctccattatttacagaaagaataggactatttataagattatagtatcctctcaaatgctattcttttatttccgtcttctaaatagattatcccacaatactggaatttgtttttcttaagcaacttttgcatagatatattttcttcatgtgtatctatttttatgctatgtacccctttacttaaacaaagttcttccacatttttaataattttagatgataagcctaatcctttataagtgttatctacagctatcctatgaataactgcatattggctattagtaatccattcgccttcataaatagaatcatatgttttttctccgtcaaaagaaaccgctgccgtagcaacaatattattgtcttttaataaaatatagctatgtttattagcaatatcatttcttattgtttcagagttaggataattgttctgccattgattaattccttgttctttaaagtaagattgtgcctgcttaataatgttcattatatcatttatatctgtttcaaatgcttttctaaattccatttctattctcctctatgcgaataaatttatatatttcaataaataatctatcctctaattaagtttatacgttctagtcctaattgagcaacttatcaaactttcaattaccactagtgtataccaatttagtttaaacctcaattatattttcataaggcttagctaaatactgcgctattcttaaataactctataaaatcacggaataaaaaataagcgtaaatactaccaaaaatcatttagtaatatttgcacttagataatactaaagtacattaaattattgtttattaatatccattaccactcatttgctttagacaaacttataatgccacttatacaatcttttaaagagaatatattttctctaccttcacataataaatctgagataagattaatgaaaggggttcttaaattgaagaaatttatttcaatattttctatttttttatttctatcatttagcattactactgctacagtagctgatataaatcaaccacgaacttttaaagaaggattttataacatacgagatttaggccttatggaaaatgtttcttacagtgtacagaatttatctgaatatagaggatttatggttgtatttgattctgaacagaaaatacaacaagctatttccttagatccacgctctcaaaagtttccacttaaacccattcgaaatagtgatagaattgtaatattgggtcaaggcgcgttaactttttcttaaataaaattacatttctcaattatcgtttataattaagagtatattttctttaaatactgtacataattaaaatgcaatttcatagaacaaaaaagagatagctttattattatctacctagtttaaatgctatctctatttctttttattttttagttccaaattattatcttaaatatactcaaagttcaataatcatatcattcatctcatcagattgtgttattatcctgcttaaatagttatcaattctaactttatcagaagctatcattcctaattgaactaatcctctaattactgataatgattttttaaaatcatgaacggctgttgtaattaattcacttattgattttaaattaacttaaaatattatgggaatatatatttaatagaaataaaattctattgacattaatttattaaaatgttaatctggttttgttcaatttaattatgttatatattattttaatcaattttaatatggaggttcgttatgagtttaattggtctaactaaaggtacagatttagaagaaaaaattaatgaaatgtggaaagcagaagcaataggtgctgcaacttatcaagcttttgcaatagtcgctcaggaaaaaggtctacctgaattagcagatgaactaaaaaagatttctgctgatgaggctcgtcatggcggattatatgcatcactaaatggccatacaaatgaaaatttacgtgatgctttgagttcaatgtctattggggaaatctctgcaggagaaaaaataaaagaattatctaatattcttgataaattaggtcttaaagaagcagctcaagctgtacatactgctggcgaagatgagtgtagacatggtgagattttaaaagagttgattgaaaaatatttatagtggatgaactaatataaatctaacctataattaatttatctataataagctctataaaaatataagtttaattcaaaatgcaaaaaatataataacactaaacttgagattttgatttgaagcttaagtttagtgttattgcacacaattattttttaatttttataactcatctctaacaagtctttttgatctcatccttctatcaattccttttttctgaaattcatatgaattaggcttttccttaatgactatctaaaattcttaaaaattatttcaaaaatcttattcttattattcatatctacaattatagtcttatatagttttcgcactgaaaatttaaagtttcaagttaatgcttattatttttattaagtcactttaatctttctaaagtttaactacaagcatgattataaattttattccatatgcacaggttcgaataaattttataaataaagaaagcctatgagtatatagttaaattaaaacatatggaggattaaaatgaatttattaaaaaaatcgaaattgattattatagttattctattattatcaaatataattccatataatacatatgctttacaaaacactaccgctcaacctcaactcaaagtagctgtatttataaataatttcgaagatttatttctttatgaagtaaagaaaaatttagaagatattcaaattgaaaatgcaggtaaagttgaatttaccttttttgatgcaaaagaaaatcaaagtattcaaaatgagagcattgaaaatgcacttaatgaggattttaacctttttgtaatacgtcctgttagtaaaagcctaaacgatattgaaggtacttttaataaaatacaacaaaagaatattccattaattatcttatacgaaaaaactccaccgatagtaaacttacttagaccttaccgcaatagatctataatccttaatacagatcttgctcaatctggtattcttgaaggtaaaattctagccaatgcttggaatgcaaataaagatgctctagataaaaataaagataatataatgcaatatattctcataaaaggtccatctgatagcaatataacagctctaagaaacaaatattcaattcaggcaataaatgaatctggaataaaaactcaggaaatttcatcagtcacctgtgattttctagaggaatgcgcaagaacttctgtagcgtcgctgtttttaaattacagtaataaaattgaagccataatagctaatagtgattccatggcaataggtgctgttaagggacttcaaaaatatggatacaataaaggagattcctctaagtatattccagttgttggagttgatgccttaccagaggcacaagaactaattgcaaaaggatttatgacaggtactgttaagcaagatccacgcgaacatgcaaatgcaatttattctataggaatgaatttagtttctggtgctcctcctctcagcggtactaattataaatttgatgaaactggagtcgcaattgagctgccttattctgaatatgttaaataataataagttccttaattgtaaatttatacatctttatcatttatgcatatacttgttctaaaataatatttttataagtcccttatctttaggggcttatttttcataaaattttactagtacacactagcttgtaactcgttaataaacttatctaaaaagatatttactttatttttattgcactttttattttataatcttagaataaattttatatttataccaaacctaatgatgagtattatgatttaaaacagttacatgagttggaggattatttgatgaagacatttcaaaaaataatagtattcattcaaattgtgttaattatattcatactaataaatatatctcaagttaatacatttgctagttcaagtttaaatgttagcaatagtaaagtagctaatgttgcagtattactatatagttttgatgatccctatatgttagaaattaaaaagagtttggagaatattgaaaatcaaaataaagataaagtccactttactttttatgatggaaaaaataatatggctgtacaaaacgaaacaatagattctcttcgcaagagtagtattgatttatttatattgaaactagctgatacaaaagaagaaaccataaaaaacatcatgcttaatctaaaaaatgttccaattatttttatggaagttattcccgaagttgtatcaaaagtttccaaactttacagtaaagctgtttttctgtattcaacttcaagccacgaaggtgttttgcaaggtaaaattcttgtagataaatggaatactgataagaaatttttagacaagaataatgataatattttgcaatacattttgctaaaaggtgaagctaataacccatatgctattgaaagaacaaatgatgttatttcaacaattaatggagccgggatacaaacagaacagcttgctctagtaaatgccaattggtttagagaattagctaaaacttcagttgataatctatttctcaaatatgatggtagaattgaagcaataattgctaataatgatgcaatggctttaggcgctattgaagcactacaaaaatatggatataacaaagggaacaaaaataagaatatagccgttgttggaattgatggtctggaagaagccaaaaatttaatagacaaaggattaatgactggcacccttattcaagatacgaaaatggtagctgaagccttttataatattggaatgaatttaattaacaatgaaccccctatagcaaatacaccttacaaactagataatggagtaattacgattccagagtcttataagccatatacaggtccagttattagctcataaacagtctaaagaatttaaaaatagcgagtatactttataagtagactcactattttcttaacttaaatacgttgcctaaacagcattctacgaactactatatataaaacttaccattagatttaaaattcattttttcctatctcttttgcttatagcaaccaaagcacatgcaatagcagcacctactgcaattaaaatagaattactcattaaaatactccttcaaactcctatttataattgactataacatatttaaaaatatatcacgatttactcatcgaaatcaatgttttcattaatcgctgattaaattataaatcgaatgtcattatttctctttcataaatattatataaatcttaagataacattctttaatttattcatatcaaatggtttagaaatatagtcatccattccaacctcgatacatctttctctatctccattcatagaataagctgtcatagctattatattaacatgttcctttgtctttatttctttttctctaattattctagtggtatcatatccatttaattctggcatttgaatatccatgagtattaaatcaaatgtattttcttttagcttttctaacgcctgcttcccatcatatacatactcatattcatatcccaatctatttagcatttcacaagttatcttaatatttatttcgttatcctcaactaataatatccttttatttttgcttgagactatctcatcatctcctgcatttaaattatcattatttatattttctgcataattcactaaaaattctgctgtaaaataaaaggtgcttcctttattttcaatactttcaaaccatatgtccccattcattagctttgcaatatcttttgaaatagcaagtcctagccccgttccatcatattttttagtgtaagtcatatcttgttggataaattttttaaagatatcatttttaaattcttctttaatcccaatacctgtatccttcactgaaaattctaatgttagcttattatttgtagtatttaatttccttaccttaaacattatttgacccatttcagtgaatttaatagcattattaataatatttataagtacttgatttaatctaatttcatctcctattaaatcaaagtttatatatggatcaatatagtaaaatacttctaagttttttttactgcatgctatagataactctttagtaatcctatctagagtttttttcatattaaacggctttaatataagttcaaatttccctgactctattttagaaatatctaaaatggtatttaatattcctagtaacaatcttgatgaattactgagcatgtctaaatattctttttgattattattaagttcagttaccttcaataagtctataattcctattattccattcataggagttcttatttcatggctaatatttgcaagaaattcacttttagctttgtttgctttatccgcttcttcctttgctttttctaattcctgataattacttcttagctcttcttctattgctataagttcttcatatagagctgatatctcttcatatttatctcttaactctttttccacctttttattttctgttatatctctagtgatattagatgctccaattaaatttccttcaaagtcgtaaataggtgaaactgttattgaaacatcaattaactgaccatttttctttcttctcttagattcgaatcccctaactctttctccattttttatctttttaattatttcataaaaatcattaattttctcatcaggaattatgatagatatgtgctttccaatcacctcttcttttttgtatccataaatattttcagcacctatattccaacttgttataattccatctaaagtttttcctataattgcatcctcagtattttcaactaaagaagctaatcccctaatttctgcttcacttttcattcggtttgatatatctcttattatacttaaaacaaatctatcattactaatttctattcctattgatttgacttctactggaaaactagtaccatcacttttaaagtgaatagtttcaaactcaacatcacccgatttagctttttcaaactgcatgattgcaagttcgattctttctctatttcttaattcaaatatattcttagaaagtagttctgcttcagtatagccataagtatccactgcctttctattaacttccaatatattaccttgacttgaaaacaaaattattatgtcattagcattacgtatagcagcttcatatatttgcaaataattatacttttttttattaatattttcattggtttcactactcatctatcacccctccttaaattccgtaaattaaataacaaacgaataagatagcataaaatataattgtcgttagtatagcataagcaggcctaatagttcatttaatcattttttagcattttctcaagttcctcttcacaaactggtttactgaaataatatccctgaattatattacatcctaaattcattaattcattaagttgctctttaacttcaaccccttctgctataaccttatactttaaacttttcgataagctcaaaatacactctattactgctctgttcttatcattcccaatattatcgataaaagatttatctattttcaaagtatttataggtaggattgttaaataacttagagatgaatatccagttccaaagtcatcaattgaaatatttatacctttttttattagttcatgtaaatcagcaattttctcatcatctaattcaattaaagtactttcggttatttctatttcaattaaacttagaggaattttgttttcttcacaagtttttattattttgtctttaaaatctctttcttttatttgaacaggtgaaacatttatacaaatattattaaattcatatttcctctccttaagctctctaattttacggcatgctttctcaaatacccaatctcctatatctacaattattccaatcctttcagctattggtataaattcagctggagatacaaaaccgagctttttactattccatctcaataacgcttcaaatgcaactaccttattatctaatgcatcaatttgcggttgatacacaatggaaaattcatttttcttaattgcttcttttaattcattttcaattattattcttcttgtatataacctacttagagcttgttcgaaaaaggtgtatgtgttttttccatctgctttagacttatacattgctagatctgcaaattttagtagatcattcatattattgctgtctcttgggaaaattgatattcccatgcttgttgtaatatacagatggttttcattaagttcgaatggattcttgcaatattttaaaattgtattacacatatcttttactttttctatagaattaactttttctataattacaataaactcatcaccgccgactctgtacaacttcccatagtcctttatacacacatgtaataattgtgagaatacttttaacataagatcaccatagtcgtgtcctaaggtatcattaatcgatttaaaattatctaggtctatgaaaattatggctccttcctgactcagttgaatatttttatctaagatattttttatatccattagaaacatatccctatttggaaggtttgtaagagaatcatgatacaaattatctgcaattcctttttctctttccttttcttcagttatatcatttaccaatccaaatatacgagttacaccttcatctttctcttttatgccatttcctttaaacaatacccacttcaatttattatctttagtaataattctaaactcgctcacatataaggtcactttatctgcaacaaaaaaatttaaatcagtcaatgcatcctctctatctttacttatagctactttttcaatacaatcaattaaactgctaaaatcttttgagttataaccagtaatttcttcccatgcatcagaaataaagaaactgtcctcctttatattccattcccaaactgctatattagcttcatctattgcttgtttatatttttttaatatttcttcataatccaaatcacttttttctatctccataacagatttctttgctctccttaaaaataagttcatttgattatctttcatgattataaccttctttatggttgttcaattctttcatatactctactatcagatcatctaaatgctggcttatagttaatccattatctatatctacgtttccatcaagtgtgcagcaaacttcattcaaaatttctcttacagcacttatattttgatttaactctgataatttgattgttttttctttaatattcgttgaatcaaattcatacatactttcttgatttacaattgtcctatttcttccactagctttagctttatagagattcttatctacttttgataataaatcataaatattcacatcttcatcagaagcttcgtacacgccaaaacttgctgttatttttatctcaatactatcataattgaaagatgtattttctaatacttttcgtatcttctcggcaactttatacgcatttttagcctcagtataatttaatattataataaattcttctccaccaaatctacctacccagtctgacttacctcggaccgatttcaatattagatctgaaaaatcaatcagtattttatcccctataatgtgaccatattgatcatttacttttttaaagaaatctatatctgccataattatcgataaaggcattttactaattttcatgtagttaatatctacagggagtctctcatttatataccttctattatataatcctgtcaattcatctttaattaccttttcattcattgagataattaattcttccacaaagtcagaatcctcagtcatcttatgaaatacgcttccgatattggtaatatcctttaatatttccacaatatatgtcctgccatttaattctactggtgttgctgtgattaagacaattttttctttatcatactctatttttacaaatgtatcattgttgttatatgctcgcatagaaatacagttttcacaaaatgtatgtttcttccacaacaaatagcatgtgccatttagcccttgtagctcattgtccttaacaagagccgcttttttatttattggatccactattcttataacatcatataattttttaaaaatagatagcctttcttttacttggtctattacttccataagattccctcccttttaaattcaaaatcctctcaattcccataaaacttgcttattaaattcatatgtacttcttaaaacctcttttagaattgttcttcttgttacattaattcaaaaaatatatcccatagctttgaaacaactttatcgtttattcttatatttgatgttatcatttcataaagtaaataatcctcaagctttttacatttaatcaaataactatttatatttttagttataaatttatcattatattgaggattacccatgatatcaagaatgattttgttttcttcagctatatagaatttatatttttctcgtattacatttgctatctcttctggtggaaacatgtggcatctaagaataaactttctcttggatatatctgatacatagtactctatcttcttttttaatagagtatacagcttttccttaagagggatattcttgtccattgtctcaatactctccatgtaatcaatataatctttataaatataatcataaatatagaaaaacagatcctgctttgacttatagtaaaaatatattgttgatgctttaactccaacttccttgcaaatatctctaatattagtagcctcatatccgttctccagaaaaagtctaaaagaagtataaaatattttatctcttgttgaattttccaaaatacttacctccatttacaaatttactgaaagttttttaataactttgttattattctcataaattacaaaattatatatataacgttcgttacataaatcatatcactgtatttttccccattcaatttattttgtactctatttttactcataattcgactcattttgaatgaaaactatttctttaggaatgtaatcatatcactattcaaatacatatatctaacaattatattttctttatagatctcaaccttcttaattaattttttccttgatttattcacggcccagattaaatataaatttataaagaataaaaaaagcagcaccaattattagtgctgccttataagcctctatgttcttaagttgaattctataatatttaacaagttttcaatttcaaatggtttagatatgtaatcatccatttttgcctttatgcatttttctttatcttcccgcatagcatatgcggttattgcaattattggtatatgtttcccttctaattcttcaactcttatagcctgtgttgtttcaaaaccatttagttctggcatctgtatatccattaatattaaatcgactttattgttttttaatatatttatagcctcatttccattatatgctgaaatatatttatacccgttactcctaattatgttttccattacttcttggcttattaagttatcttcaacatataagataactttatcctctcgatcattatgttgattaagcttatcactttcaatgttttttctttccataacttgttttttatcatttgtttttttaaattcacatgtaaaaataaatgttgagcccttaccaaaagagctttcaaaacttatttctccattcatcaaattagcaaactgttttgaaattgataaccccaatcctgttcccatatactttttcattgatgatatatttccttgagtaaaattattaaatatcttatctttgaactcatcatctataccaatccctgagtctttgatcgtaaattggattttttcactatcactatcttctgaaatcatacttactctaaatgatatatatccgtcatctgtaaactttactgcattgctaattagattggataatatctcttttaacctcagctcatcaccgataatttcaaaatctatgttatggtctaaataataacttacttctaatcccttagaatttccagtgactaaaaggctattataaatattatttatagtctcttttaaattaaacggttccctattaattctaaatgtacctgactctatttttgacatatctaataagttattaataagtctaagcacagtatttgctgaatcatttaatattctaatatattttttttgcttttcattaatatcttctaactttaataactgtatagccgccgtaattccattcattggagttcttatttcatggcttatattagccaaaaaaattgatttcgctttattggcttcttctgctttctgttttaacaattctaattgttcacacttttctcgcagatccttttctattagtttcctgtctgtaatatctttatacattgctactactccgaaaaagagattattatcatcataaatcggagatgctgacattaagacattaaccaggtttccctccttgtctattctgacagtttcataatctttaattacatttcctttggtaatcatatctattaatttttgtgattcatttaatttatcttttggaattagccgtctcatatcatttcctattatgtccgcttccttaaatccaaactttgtctcagcacctttactccaacgagatatgttcatttctttgtcaaaaatcacaaatggatcatcaagtatatctaaagatattgaaaatatctttgaatctttaaataacctttccatatccgaaatatctcttataatactgactgccacatctcttgatttcttattactacaaacggatcttacttcaaccggaaatcttgtcccatcttttttgtgatgataacttttaaactttattcccctatctaaagctttatttaattgatcttgggtgaattccctgctatcctcatttctaagggtaaagatatttaaatttacaagttcatcaaaagaatacccgtacatttcaatagcctttttatttccataaagtatttccccacttctgcttactacaagaatactctctaatgcattatctataaaatctcttccttctataaacaacttttcatttgataatatgcctttactttttatgaatgtacaaaatatatacttttcagcaaatttactgaaactaacttcataaacagtatctctaatgactaatgtataaatattgttatcaattctttttaaataactaaataaatactctcttaaatatattttaatttcatcaacacagttatgggttaagttttcacagtcaaattcctttctgaaactttcatttataaatttaacactgaaatcataaataacttgatttgaatcagttaatggttcgtatatagatattatgttattaatattatttaaatatgatattccctctaatactgagctaaccataatttacaccatccccttattatttttataacacactctttcattctcataaatagatttcgaagatattataaatttcttcaacattaaatggttttgatatgcaatgatcaattcctagattcataagtatctctctattttccataatggtatatgaagacattccgattataggaatattttttccttttactcttgatattctcatttccttaattttttcaaaatcttctaatttatttaatttcatatctagcaatattaagtctacatagttacaatttaggattttcaaggcctcgcttatattatgcgcatggatatatttgcagccttttctctccactatactctccataacttctttatcaattgaattagtttcaatgcaaagtatgactttattcatccataaattatttatattatcatcttcgctaattttattatcgttcattacctctatattcttttcataataatcactttttttaaaactacatgtaaacgtaaatgtagacccttctcctagtgtgctttcaaagcttatattcccattcatcatcatagcaagttgcttagatatagataatcctagaccagttcctgtatattttttatttacagatatatcaccttgactaaatatgccaaaaattttactcttaaatctttcgtctattcctatccccgtatctgctattgtaaatttaatttttacatagtcattatctgacgatacttttgttaccctaaaggatatatatcctttttcagtaaattttaccgcattactaattaaattatctaatatttgttttaactttagttcatctccaattgctataaattctgcatttgggtcaaaataatatcttatctctaatcctttagaatttcctgattccaagagatttgtataaatatcatctgttatctttttcaaagcaaatttaccatcatttaatttatgtataccggcctctatttttgaaatatctaaaatattatttataattgttaatagtttatttccagagttttttagcagtgttatatacttactttgctcctcactcataggtgttttttcaagaagctgaattgttccaaaaatgccattcatcggagtccgtatttcatggctcatattgtctaagaataacgactttattttattagcaatttcagcttcttcctttaatacttccaattgcctatatttttcaacaatgattttttctttttcagctagatctgtaatatcatgataacaagctaaagccataattaaatttccacttgtgtcatatataggagtagaatttactctaatagttagttctttatctgaacgcttaattatgattgttctattttttattttttcgcctcgtaatgcgcattttaaagacaaattctctacatggatttcattccctgatgtatcaaaagcttgcttagttatgttaaaatcatctgcattctttacagcataataatcagaaagaagacctcttccttctgcattcatcaaaattattttaccttccttatctgcaatataaattgcatcagaaatattttcaatgacagcttctaattgctttttttgcatctttataattgtattactattaacctgttcagtaacatttcgggtgcacaatagcgcctttactatatctccatcttcatcatatagaggactgccacttacattaaagtgatattctaatccctttctcttaagcgtcattctatattcattaatcttttcaccttttagtactcgatagctaggcaaattttctggtttgattatattatcattggaatcgtagaatttcacttttaagaaattttcactgattttgtttgctaaatcaatattataaaaaaagtcttttgcactggaatttagaatattaatattaccttctttgtcaattgtaaacaatccctcggacatatttctaattatagcttctaatttattcttttgctcttctataatttttgcttgtaccttttccgttatatcgtcaattattaaaacatatctttcaaaatttccttttctatcaaatataggcttgccactaataacaacatgtttctctaaatttctagttcctattatcactctataattatttatttcctttcctttttctatataactaaacttactctcttcaaattcaattttatttttatttacatcaaaaattattatttcatcttttatatcatttatattgcttattttatttgcttgaaataattccaaaataactttgcttattttaattaaccttccacttttatcaaagatgcttatctgctcatctgctaaatccattattgcctcgatttttttatcccttctctcaatttcagcagcttgagctttaataaccattttatttcttattctatctgttacatcaatacgattctcaatataatattttactttcccatcttcatatattggtactattgctgaatcaaaatatgttgctcccgttccatgtctatcactcataaaatcttttacatagcccgtcttacctgtttttataacacttatccatttttcccttattttatcttccttaaaatctttagctatttcttctattgatttaccaatgcaattctctttcctattaaatggttcatccatataataaatgtatttttcattagcttttaataaagttaaatctggcgctgaataaattccaatcccatatctattatccaaacataactgttctgcatataaaaatttattttcaatacgggaattctctttttcatagaagaaatataatatattcattttctcgtgatctatcttcttagaaataatcacttctcttggctcaagtgacttagtgaatatgtagatatctatttcatcactaacacttccaaattcatcacaaaaatcagatttcaatattttactcagttctttatatgattttcctaatagttcctctttgtaataccctgttaaatcaacaaattcttcgcttactttaattactatcttatttgaaatagtaatagatgcttcttgatttcttttactattaagtggcattgattcttcctccgtaaatataaactcttataacatgtatggaatttccataatgcatataaaatataaattcttcaaatagaatacatttaatttattatatcatctatactattattaataaaataataaacagaagtctttgatatattaataactttaaaatcacaaaaaagccagtagaacaattaattatataaatagttctactagcttttcgtaatcttattaaatttctaaagagttattttcacgaccttagtcttatagttattacttaagaccttgttcgtaatcttgaatcatatgttttaccatataaccgccaacatatccattttgtcttgaagaaaggcttcctttatcgatgttttcataatcgcttaatccaacttctgaagcaacctcagtttttaatctgtttaatcctgcctttgcttctggtactaatgttctatttcttccactattatttgatgacatatacatcaacctcccttaattaatataaattttgtttggcattaatatattaaccattatgacaaattataatctattaaaatactagcaaaaatagtactgatagcttgtattaaatatttttccctattgaagaattatattgatatttataacttagacttatgcaataatccaccgaaatcataaatattttgattccgaaaagctataaaaatatcgctgaaatgctaaattgcaggttgcaccactaatgcttgctcccattttcattgtgacaagcattagtgtaacaatctacaatatctatccaatatatataacaaaatccataaataaggttttactattaacatattgatatatatatgctaacataatatacgttgtagtattaaatactttaatacaatatacttttgagacacgacaatattggaggcataataatggaattaaaacataaaacaaatacctataaaactttatttcattggcatagttttagattaagacttgttgttgaaggtattgggataggtattactgctggcctattgattgaaaaacaattaatttccaaatctttatttagacgaaattcttacttatttaaatattttgttttctgccttattaactaaatacttgaaccaataagtatatgcttctggcctttctataatgtccttcttaacttcattaatatcaacccacttaaaatcatctacttcatctttgtttacaattatttctccatcatatttcccaatgaatacatgatcatattcattttcaaaaagattatcttcaagttttactttataaataaaactaaatacttcttcaagttcacatgtaaaacccatttcttccttaagccttctataaatcgcatcctgtaaattttcaccgtatttagggtgactacaacatgtattggtccagaggccaggcgaatgatatttttttacatttcttttctgtaataacaattgatttttagaattaaatactaatatagaaaaagctctatgtaatgttcctttacggtgagcctccattttttcaattgaacctatttcgttatcaaattcatctacagctattatatattctgccatttaatttccccttccatttaaactaatataatcaaaatttgcatcattaaaataattgtattcgatatatgagtaaaaaagcatcttccattaaccaatatatgaatttgctataataagctaacactattgtcttcatttattaattttttatagccttttccccagtcacacattgcacttaaaataggcttcatgctttctccaatgcttgtaagtccatattctacccttggtggtgattctggataaacttctctataaattatcccatctctttctaattctcttaactgcattgtcaatgttttctgagtaatattagttaataatcgttgtaattcattgaatctaatagttcctcttgacaaatgccaaagaattgctatcttccacttcccgctaagtatatttatagttaaattcatcgggcaattcgattctaaatcaattgattttgacattaatttattctcctaacacatttttgtaacaatctatcttctatttaattaccttaatggtatcatttttgatatcacatatcaaatttgtgcgtacttttatgataattctattaatgctattattttataaaaccaataaggaaggaagatattatatgaatgaagttttgaaagctataagaaataggagaagtgtaagaacatatttacctacacaaataaaacaagaagatttagatctaatcattgaatctgggatatatgcaccttctggtcataatgatcagccatggcattttactgttattcaaaacaaagaaatattaaaacatatcaatgataaatcaaaagagttaatggctcaatcagaaatcagttggatcaaaaatatgggatcaaaccccaaagtaaatttaatatatgatgctccaaccttaataattgtatctggtaataaaaatgcactttcccctaaagttgattgctccgcagcgatacaaaatatgcttttagcagcagaaagcttaaacattggctctgtttggattggcctcataacgtttttcttaaaattagaagatgaagctaaaaaactcggtattccagaaggatatgaagcctattatggtgttgctctaggatataagtcattaaacaaagaattaattgctcctaagagaaaattaaatgtagtgaattatatacgataatggttaaatgattccataaatatctgtaactatagataactcaactaatacctgaacttatgcaatactttacagaaagaagaaacattgttatttcacaggactatgaaaatttcgttgaaagttctaaattgcaggtttaccaactaaagcttgctcccaatttcattgtgacaagcattagttgaacaacctacaattaagagcttttaacaactcattttcaatgcctgctgcataaaaatgtttcttctttctaataaggtatattctatgtgccaattaatttcttaatctcacttaacaaaacaggaaatttagtatacccatcacgcgcgataaaatgctttcctgattcaagaataataagatttgcgtctaactcttctgctaatttttgtgttgcctctgttggcacaatgtcatcgtctattgcagtaatagctattctctttggaattagactttttattcttgcaatatcaagtggactatctacaaattcttgaataccttctgtttgttccttcataggatttttatttatgaacccggagacaagtattgcaccttttatttttatgtttttctctagaatatagcgtagtgctgtaatacatccaaggctgtgaccaattaatatcgtattttcatcaatatccataatacatttatgaagatgtttacgccaaggttcaagatgtggatctcctgaatcaggcatatccggaacattaaccttaatagagctatctttaaactgttctttcaaccatggaaaccactctgatttactggaagatgtataaccatggataacatatatattagtggatttcattttataatttctccttgtaaaaaatatttacaccttatttaattcattcttctaatagtttcatcaatcgaaatatattctgcatatcttccattccatataaattcattgtagtattcatatgtttgttctcctgacatgaatttattgtcaacagttgtgtttgcataagcagggactatcatattgaagccatgctcaaatccacattttatagtggcgtcaacacataaatctgtttgaattcctacaattattatatctttttcgtctttatccattaaatattctagtaagcctgtccctttaaacgcgctgtttacttttttatcaaatatcttttcgtcattaactggttgaaatttttcatatacttcaaatccgtcagttccttttgttaattcactttcaggaccatcatcatgacgtatatatattattttaatatcgtttttccttgcttcactaattattttctctacattcgatacaaatgcattaaagttatataatttatcgtttgttattaatttttgtgtatcaactactaataaaaccatttttttattctcctcttataaattactactttcctttattccaattataaaaatcttttaaatcttctttacgtttctgtgatagctctgttttcttaataccatgaattgcaccttccagtgccagcaacctatggatacatgcagaaggatcaatttcttgtatcttgagccatgcctgctctgctccaattgcttttaattcatcataggtaaatatccctacttgattcaattgcctttccacttctttgccgatattaggtagatttgataattctcccatgataaaacttcctctcaaatctgattaataaaaatcaaatacattttaaagaaacctagataattttttctatttttaagtatatcaaaaagcttaacatatttcatctgattttataaccggcctagcatattttttgaatctacttttttgaaccatatgagaagaattttgaattcaaatatattttctcttgagatgtaaccatctagttccttctttttcataatttatactcgttacaatatctattgatttcacttcaatatagactcctagaaaataaaaaagaaagagaatcttacctgttacagctcgattccccttgattacttaagtaaattattaatttatcatctagtcgagaatatacattctaaaattcttaagaatatttattcttcagaatatgctctatttaactatgttctgcaatgattctcattaaatctaatattgactataaaattaaatcatctaaaaattatattccttttaaaaatacatttgtcctatgctatatagataaactaatcatgaacatatttacaaagttgctgaaaccttaagtttatatcttcactagaaatcataaatatatttatgatttcggtaaactatcatggatatccatattaatgactaccttaaaagaattttattttatcttccactttgaactttcctgctgcaattctaccatctttgcataaattctattttgttttaataattctgatggggttccttgctctgctacatacccatcgtttaatacaactatcttatctgcgcctgatattgttcgcattctatgagcaataacaagtactgttttatctttaataaggtttgaaagtgcctcttgtatctttgtctcattttcaacatcaagagaggctgttgcttcatctaataaaattacaggagcattttttaacaaagctcttgcaatggaaattctttgacgctctcctcctgataaagttgagccattttctcctatcaccgtattatatccatccggcatcctttttataaactcatcacagcatgccgccttagctgccgctattacttctttgtctgttgcattacgtttccccaaacgaatattattcataattgtatcattaaatagtatgacatcttgaaatactatagaataatttttaagaagtacttctggatccacagaatttatatttactccaccaagagttatgcttccttcattgacatcccaaaatcttgctgctaactttgctgctgtactttttccgcctcctgataaacctactaaagcagttatttgtccctgctttgcagtaaaagatacgtcttttaaaacattttcgttatttttcttatcatacgaaaatgctacatgattgaaaattatatcatatccatttgttttgcatatctctgatccaagttgaactggatgatcttgcatcttcttcattcttcctattttaaggcttgatgaaaatatatctgcaagattcattaatgaatcacaaattgggtcataaaatcttgaagctgcaatcaaaaatactaaatatataaataaatccgtctttccttttgcaagaagagttccacctattaaaatcactgtggcaaagccaacttttagaagcatctgtccgctaactaccataattcctgtagtaagctcatttctaacttgtatcttttcagcattatctataatatcatctaactttaaaagatattctttttcttgattataagcttttaaatcctttatagtctctagacattcctgtattccatcagccacttttcgtttcgcagcgatgttttttatgctaaatttattttgcagtttcttagagcaaatgacgattaaaaacgatataggagctacccacaaaagtgcaattccaatacgccaatcaaaaatcaacattccaattccaacaagtattgtagatacaatggcaccaataaactgcggtattgcatgcgaaaatacatgttctaaatctgtacaatctaccataattgaatttgttaaatcagataaatctctcctcccaaaaaaagataaaggaagctttcttaatctttcagctaagtttattcttctgttagcactttcaccataaactgcaataaatgaagatttgtattgcatccaatttacagcaaacagtataactaatgttataagaatcattataatatatttggacagttgtaaattaatatttataccatctgtaattggagctaacatatctctaataaccataacaactagtcccactggaatcattaaagcaatatctgccagtgtactaaaaattattccttgtagcaaatcttttgcgccttgcttggtcaatgcaaatttatcacatagcatattaatcatataagaacctccttatcattacctttccctaacctcttgcttttcttaaaagagctatcgttattctcatctaatttctttgttactttccatgaaatagatctgccgtactctttccacatatgagcatatatgccatcctcttttaataattcttcatgctttccttgctcttttatccttccgtctgccataactaagattttatccgctccacatatagtagataatctatgagctatcataagcactgtttttcctttagtaagtttttcgaaagctttttgtatttgactctcattctcaggatctgcaaacgctgttgcctcgtctaatattacaatcggtgaatcttttaatatagccctagccaaagctattctctgacactctccaccagataaatatattccttttccaccaattaccgtattaatgccttctggaaacttttctataatatctgagcattgtgcttctctaactgcttcaagtacctcatctattgttgcttttggttttgctattctaatattttctaagatacttgcttttaagagccttgtattttgaaatacgaaagaaactttgtccattaaatccttttttaaaacatcccgaacatcaacatcatctattttaacattccccttattaacatcgaaaaatcgtggtattaagcctgctaccgtactttttccactacctgatgcccctactaatgctatagtttcaccttcactaatagaaaaacttatatcatctactgtaggcgacgtatttcctggataagtgaacgtaacatgttcaaaagaaactcttcttccatttattttttgtggatcttctggctcttttaaaggcttttcatccaaaatagcatcaatccttttaactgcctccttagccaccataatgttttctattatcttcattatcttagttaacatattaacgcttactggtgtaaataatacataaaatataaaatcaagtaaaaaacctttataatctgatgtatttttaataacgagaatgccaactggtatcaaaaatgcaaaagctccattgacagctactgtgaagatagtcataggaatttggcactcagcagcataactagatgcaaatttactatatttattaattgaatcgtggaaactcttaaaagaaaatacagtttgttgaaatacttttactactggaattcctctgatatattccacagctccattggacatttcctcaagagcattttgatatttttctatagaatctgctttctctccccccatcaattttttcaagcaaagaacacctattactgtaggaattaagcacactgctccaagtctccaatcaaaaataaacagtaaaacaaatattgcaattggtgatactattgctcctgctaaatctggaagctgatgtgctaaaaatgtctctgttaaacctgcattatcatcaataacctttcgaagcttccctgtattgttacttgaaaaaaaacccaatggaagttttactatatgatgaatagccttaattctcatgttccttgcaatcctaaatgcagaaatatgtgaacacataagtgctataaaatatataagcatacttattacagctagaaatacagcgcaccatccataaaatgaaagttccataacattaggtgctttcggaagtgacgtaataagctctcttgctacaaaccataaacagacaaatggtcctaatgctaaaactgcacttatagcggacagaacaaatgccagcaaagttaaaaatttatactttccagcaaactccatcattctggaaagcccttctttcttttcaatcattcaaattcctcttttctactatataatttctttaaaataacatgattataatacataccattttacaatttactgtaaatcaacactcctttataaaatagtgatttagattattatttctgtgccatttaaatctataaaattcaattttcaaatgtagtcatatctccttttctatattctgttggattcaccccaattgcttccttaaaagccgctgcaaatttgctttggttttcatatccaactgttgctgatatattcataacagtttcatcagtttttctaagcaaagatgcagcatattctattcggtactcctttatatattttgcaatgcttttaccataaatagctttaaagcaactgctaagccctgattgacttatattatatttttctgccaactgcttaagtgtaagattattcgatagatttttaataagctcatcatgaacatttttcacaatttcagtttgtgcttttaaatagtatttatttttagcttcattttcattggcacaggtttcatttaaaagcaaaataagttctaacactttaatctttaaatagctttctatagctgcttctggcaaatcaggtaaactaaataaatcaagaaaaattctttctatcttccctcctacccaattaatgcaatttccaacctttgcaaaatgtttttctgaagaaaacaacctcttctgaaaagtctttatgtcaatcaaggagccttttaaaatttcaggtaaacacttagaaagttcatcaatataaatgtatatagaaattcctttatactctgccatcggaaaagtgttaactggaggatattttcccataagccctgcatacaaatctccacttcccatataaacacatacacctccctcaaattcgcactgaatacgcccttcatggcaataaccaatttcaatcatttccccacttatttgaggtaggatttgttcatttgcgaatattgacaactctttacacttaaattcttcatagttaagtacaattcctggaaatatttcatgtatgcaaatactaccacaccctagaatatctattctctccaaactaattcacctcttatcttcattatcaaaatactccagcatagttagtcgcgactaactatactgaattatactatattccatttttttcttacaagcccaaaacattatatttagctccaaaacataattgaattttataaacataaaaaagaaatatcgtacggctacttaaaatagttgtacaatatttctcaattcctttaaacaaatttcaaactttaattattactattaatattagaacacttgtattctaatattttttttaaggcagttccactgctctgatgacatcgtattaattcagcttcatttgtatcagtattagataacacgcattgtatcattttatgtgatacagtatttgtgaacaatacaagtaggtcaggctttccaatttgcttttttaaattactttgcatttgagtaaagacctttgctttacaattataattcttacatatttttttgtattcacaaaccattcgatcatggccaccaattataacaatactcatttctcttttccacctctctcatctaactatagaataatatttttaagcgaatttactttttagaaattcacatatataatttcatttaactattatgttttatctaatgatatatattgcaattcacaatgcacatttcacaattacggttaaaattcttgcaatatttttagaattatgatgaagaattatttttgcaacgtatatattaaaaaatcttaaagttcatatattttataattacttaatattatttttttagttagtcttaactaacccaatattatatttatatagtgcccctatttcacaataacatgcatgataaaatcatcacaaaaattcaaatcaattgcactattggataataaagcaactttagttagtcttaactaactaatattagtttaatatattctagtaagattgtccagtgcattaattacttttctcataaaattacagatgagatatatgctgttatgcatcttacaacttgaaaattagacttattagatgactatatttacaaagttacaaagaacttaagtttgtatcttcattagaaatcataaatatatttgtggagaaaacatttgaaaatgagctgttaaaggttcttagctgtaggttgttccattttagcttgttacactgaaagtgggagcatgctaaagtggatacaacctgctgcttagaaccttcagcgatattttcatagcttttcggaacaaaatatttatgatttcggtacgttaccacataaatttagttttagagttggatatctataatttgatgttaaatatgcattatgatatacttacttcattaaaatttaaatttcattacatagattttattgaaagagggtctttatatggctataaatgaatcagtcgaaaactatttagaaacaattttaattttaagccaaaaatcacatgcagttcgttctattgatgttgctacagaacttaattttaaaaaatccagtgtaagcgttgctatgaaaaatcttcgcgaaaaagaatatatatctatagcagatgatggaaatatagttctcactgacgcgggtaaagaaatagcaaatatggtctatgaaaagcacacttttctttctaactggttaaaatctattggtgtagatgagaaagttgctgttgaagatgcatgtagaattgaacatgttataagcaatgagagttttgaggctatgaagaaatatgtgaataaaaatacttaagtaatagataaccaaaagtggagagcccttgctccccactttaataaatttaaattgatttaactaaagctccacaaactttgttgcaacatttttgcaaaactcactgtcatgttctacaaataatagtgttggcgaatattcaagcaacaactcttctatctgcatacgagagataacatcaatgaaattaaggggttcatcccaaatatacaagtgagctttttcacaaagactttttgcaatcagtacttttttcttttgcccaccactaaaggatgatatatccttctcaaattgctctcttgaaaaatcgagttttctcaaaattgctttaaaaagactttcatcaatgctgttttcaaaagcatagttagtcaaatttcccttaagataagaggtatcctgtgacacgtatgatatttttagtccgctgccttttctaaaagtacctgtatattttatattctcatcacaaataagcttgataatacttgattttccacttccatttttacctttaagtgatattctttcaccttgttcaatactaaagctgatatctttacaaaccattgtatgtccataaaatatcgacacattttcaagttccaaaagcttatttttatgataagcaagctgagagattttcaagctgtctgagctttcaatattttttaaaagcttagatttttcttcaattgaagcctcccgtctattttcaattgatttggaacgcttcatcattttagcagatttatgaccaacatagcctttatcaatcttagagccagagttagttgttcctttttttgatttttccacttcacttgaccaactactagttcgcttagcagattctgataaacgattaatgtctctcctaagtttttcgttttctgctaactcatatccatcctgtctctttttattttcccaccaacttgagaaatcacctttctgtatttctatatttgtcttatttattgagagaatatgatcaatacaattgtctagaaaggccctatcatgcgaaattaaaataaatcctttcttttttcttaaataattactaagtttttttctagcttcagcatccagatgatttgtaggttcatcaataagtagaaatgaattttccttcaaaaacatagctgctaacaatgccttagtctgctctccttttgatagagtgtaaaattgtctatatagaacatcgtcgtctatatctagcattgatagttctttcattatttcccaatccattgaatttgggctaatttcctttataatatctattgtaaaattttcttgttcttctacctcatatggaaagtattcaaaatttacattggttgatatatttccagtatattcatattttccaagtaaaagattaaaaaaagtagtctttcctcgtccattccttcccgtaaatcccaatttccaatcagtatcaatctggaaactaacattttcaaaaatagtatcgtaatttccatcataagagaaggtaaggtttgtaacatttattaaagacatgcatttgtcctcctttgtaattagtttattattaatctaaaataacaaagtcggaaaattaggcgactgcttctacttcatataaatataaacgtcgcttgaagtatccggctttatatgaagattgtcatgtgttaggtttgtatctttattttccatgatacttttcacctccttatatcgtattttagaaaaaaataagagctgcaagaaattattatccttacagctcataaatatacgtagttcagctaattagtatagcgtaacatagaaatatatattaagagaaaatagaataactttcttgcatatgtacaacaaaataaacagagtccactcgttcactcctctattatattgcactttaaaaattagcaagaaaatttaatcatcatttcacctcaaatttcaaatttaatgatattgtaccaccatgaataaaaaaaatcaatataagatattcctatatattttttataagttcaaggacttctcaaaaatacaaagtaaatttcttgttctattatcgctttaaattaactgatttttggaaagtagctttttagggattaaccacttaagaaccctcacattataaaaacctctatagcaaaaattcattactataaactttaaaatgtagcaactattttatcatttttctcacctgtttttttatatattttgatattttcagactatgcgttttttcttcttcaaaaagttaccctcagatttaattataattttctaagaaaataaatctattttcattatacttttatgagtacttctgctttcatgggaacttcctaatgaacaaaaaagagttataagaaaatcttataactcctaaaataatcaaaactatcttctattattttgttgctttctagctcttctacaatcaggacatctaactggttcgttgtcaaatcctttttctttgtagaattcttgttctccagttgtgaaaacaaattcatttccacaatctttacatactaaagttttatcttgcatattcaattcctccttctaaaattaaagattaatatcgattcatataattctctaaaaggagaaatccatactatctataaaaaacctttttctttttcttacaaaatttattataacagcttttattttaaatagcaaccttttatttcattaattgcttatttttttatatttgtaatttatgaatggttaaattataaaaaaagattgtaagataactcttaatataaacatcaaaactagcactttaaacattcataaatctactgtagtatacactacatttcatttaaagtatagtgtttttatatggaaacagtgcggaagattaaatttatttatcactgtctaaatcctctcaatttgcttttttattttttgaaagaagttttcctatttttcataagctatacaaaagttacagtctctcaatatcaactattttttcttcaccactaatcatatcttttattttaacttgtttgcttattacttcatcttcacctattaatattactttctgtatccccaatttattagcatagttaagttttttctttaatttatcaccttcaagatatatttctacatatttttctttatcaattaattttttatatatctcagtgcaatattcaagtgtatcaccaattggtattattaaatattccattgatttctctatcttgtagctattaataaatcctatttcttttaatacaaaaaataatctcgtaagaccgatggatatacctactccaggtaatactttatctgtgtaattttgtgctaagttatcatatcttccacctgaacatatagagccatatttttcattctccattaaaaatgtttcaaatactgtccctgtataataatcaagtcctcttattatttttaagttaattgcatattcattatcttctacaccaaaaagcttaagcatttttttaactgcctcaagttcttccaaacctttttgaaactcctctgaattgaaatttaacttctttagttgatctaatatactttcattgcttccacttatatttataattttattaataacatctgccttttccactccaattaattcatttaatgatttcttaaattcctcctcacctatcttatcgtatttatcaattaatattagaacttcagttgcattaacaatctctaaattatttaaaatcgctgataatatctttctattgcttatttgaaatttatatttttttaaaccgatagccttaaatcctttagaaaccatactgattacaaatgaatcattattaatactaagcttgttattacctataatatcaatgtcacactgatagaattccctgtatcttcctctctgatttctttcacctctatatacctttccaatttgataccttttaaatgggaaggttaattcattaaaatactgcgctgaatatcttgcaaaaggcactgttaaatcaaatctcaaagataaatcgttacttcccttattgaatctataaacttgtttttctgtctctcctgcacttttagctaataatacttcagacttttcgatgactggagtatcaatttccaaaaatccattttcttcatatactttagttatttttcttactatgtctttaaatatttgttgctccttaggcaatagctccataaatcctggtaatatacttggttgtattttattgttcttcataatcttaatctccttttaaatattaatttttatatttgataagtaaattgttttatattttgatttaaatgacaaaaagccatgcaggcatatatcctacatggcttaacaaattattactgacatttaatttatcatcaccagcagatacaagcctacgaattatagacttgtatctgccgctttaacagaccaagtcttactggtgatgatgtatgaaatttattttttttatattaaatgctttcataatattttctcctaaattttaatttttatcattatacaatatgctattcttattttcaatagtaatttgacctcttccaactgatttttaatactataataatcattcaaagtgataaacttcctgtcataaactaaagaaatcaagacaaaatatatttgttagctaaattaagtttatctaaattttactagtttataaaaagtgaaaggggaacataaattatggttagaaatgcatacgacgttaaaggtctaaagatactaaattcagatgattcagtgcaaaattctgttagcagcgtttactctggcagtgctaaaaagtctgcttctaaaaaaggtaatatgacaagttcttcagattcatcagatagttaaaagtaaaactaaatttatgtggtaacttaccgaaatcataaatattttgattccgaaaagctatgaaaatatcgctgaaggttctaagcagcaggttgtatccactttagcatgctccaactttcagtttgacaagctaaaatagaacaacctacagctaagaatctttaacagctcattttcaatgttttctccacaaatatatttatgatttctagtgaagatataactttaaagttttagcagctttgtaaatttatctaataagttgaattcttaagttgtttatctataataattcaaataaaattccaatacataaaaataacccatataaacttcattaagataatatatagattatcaaatgaagtttatatggaattatatacaatataatttagttttttctcaccattcataggcttccaaatgttaatttgaactagcctaataactttttattccctttaccctctacttccaccttactttgataagcttttccaattctcttgtattcgctaatcatcataataatagttacaataaatacaattccatcagttatgggaacagctgcccatacaccttcgattcccattaacattggtaatataataataagtggaacaattaatgcaatttgtcttaatataactaatacacttgcattttttccttttcctactgattggaatgctgttactgacataatccaaaagcctaaaaccggaaaaataatatacatcaatctaaaattatttattccttcataaacaattgaaccatcttttataaataatgaaaggatttctttgggaaaaagctgaattggtatccagaaacataaggctagaattgttgcaccagctacaaatacgtttatacttttctttactctgtcatactgttttgctccataatttgtaccaacaactggttgtaatccctgtcccattccccatagtggaataaacgaaaatgctaatacacgtaatgcagctcctattaaaataatttctgaatttcctccataagtagaagccattttataaatcactacttgttgtataaacatcattatttgcattaacatagctgaaaatccaattgaaaatatttctggaagcaaatcaaattcaattttaaagccatgaaagcgaatattttcactttcttttataaaataaatcatcgtaataacagcttgtataatttgcgacaataaagttgcaactgctgctccttctacttggtgattaaataatataatcataataggtgcaaggataatgttagttattgctccaatcgccataaaaatcatggcttttttcattcgtccctcagcacgcatgatcatattagcactttgcgcaaagtttataaaaaatgagcctataaatactattcgcatatatcgcactgctaaatccaatatttctccatttgcaccactaattaagagcatttctcgtgcaaataccactcctattacagttacaattgctgaaaaaataagtataagcaccaataaatttcccattattttatttataatatcactatcttttttcccaatagccctagacaaaacagacgcagatcccataccaattaaagttgaaatcccactatttattaaagtgaaaggataagctacagacactgcccccatagcatttgtaccaatcatttgtcctgcataaatagcatccacaaatgaatataagccaattacaagcattccaagtactgcaggaacgcaaagctttatcataagtgcaactggctcctttgttaataattcttctctcatatccttcaattataattcctccattcattactacaataatatatcttagaaatcctttagggatttcatcctctcatccaataattcttaagtccaattcattaatttctaattccataattcataatttttaattcccaattcataattctaattctataattcccaattctaaatgtgagcttatgcaatttattgtgccaagctccacccttctgctttttttctaatatttatgaatctattataaagcccctcttgattaattaactgcttatgtgttcctttttgaattacttttccatcactaattactaaaatctgatctgcattttgaattgttgcaagacgatgagcaataattataattgtttttccattagttaaagcattaatagcttcttgaatataatgctcattttctggatcaacacttgctgtagcttcatcaagaataataataggtgcatcctttaaaattgctcttgcaattgaaatactttgtttttgacctcctgataaagatgccccgccttctccaactacagtattatatttatctgaaaattccattataaaatcatggcagcgtgattttttagctgctattataacttcttcaattgatgcagatggatttccaaaccggatattattcaaaatagtatcttgaaataaatatactttttgaaataccatacttatattagataataagctatcgcaggtaatatcccttacgttcactcctcctatgcttatagctcctcgctgtacatcataaaatcttgcaattaaactgcatattgtggatttcccacctccagatgtaccgacaattgcagttgtggtattttcaggaataaaaaacgacacatcttgaagaacattttttttatcatatgcaaagctaactttatcaaaacatatatcataggaatctaataatacaggcttactatttttatcaataggttctacatttttaacagcatctacacgatcaagagatgcatcaatcattcgtatcatatttgaagaatttccaatctgctcaacatgaccatagattataaatgaaaaagtaatcatcataagcatagtagatacttccatagatccatttatagcaaatattcccgatgcaaaaattatacctacagatgcaagtttaaagataaatatataaacggatgtcactggcacaaattcctgctctattccataatttgttttacggcttttctcaaatgcattttctatgctctctttagcaattccatcctgtttaaaagcttttacaattgatatacctctgatatattcaattatggccgttactaatccagcttgatttgcttgacgtattggcgctacaattctgctccttttgcttatataaatcattactaaagatgttactattattccgccaagagtgattaagccaattctaaaatcaaaaaacattaaacataatgagattgtaattgaactaatatacccatttacgactttgttaatcaatttcattgcattattttcaacaaatgaaagatctgttgttacagaagaagtaatttctcccatatctttctcaccaaaaaatcccattggaacacgctttaaggtatcaccaattttaaggcgctgctctgcaaacacttcataccctatgctttcttgtgaagtagctactaaatatgaaaacaacattctgcctaagactgcaaaaatcatatatcctaagcaaaaccatacttgattaattgttataaccgttataccttcaatgttttcaataattaatttcaaaacatatgaagctccaagaactggcaaagtcgagaataatgcctgcattaatgcataaacaaagctgatatacatacgtttagaattatcaccagataaatcaatgatccttttaactacctttaacatccaactacccccttattcaaattctgatttttagttaattcttttcctactgcccactttttagaattaatatgagcattccacatatcgcaatataatgtacactctttaagaaggtttttatgggtcccattcattacaacttttccgttttccaaaaccacaatattatctgcatcttttactgttgaaagacgatgagctattacaagaagtgttttacccttagttaattcagaaattgacctctgtaacttatcttcattttctgggtcagtaaacgcagttgcttcatctaatataacaataggtgcattttttaaaatagcccttgcaatagcaatacgctgacgttctcctcctgataattttccgcctgcatcaccaacatttgttttatacccgtagtctaattttctgataaactcatcgcagcaagctagtttggctgcttcaaaaacttcttcatctgatgctgatggatttccaagacgtatattttctaatattgaataattaaacaaaaaattatcttgagttacaaaactaactatatccatgagctgttctaaaggtatagcacataaattaataccgccaatagtaatttctcctgctttaacatcccaaaatctagcgataagtcttgctaccgtggattttccaccacctgatggacctacaagcgcagtaaactttccttgtggcagagttaaacttacatcatctaaaacattattttctttactctcatcataagaaaaagatacatttttcatctcgacatcataatctttaaatgttacctctttagctgttgattctaattcttttaatcctaaaagatcatttgttgcctgtactgcataattaataatctgcatttcatttataaaatctgataattttaaaataggttcaatgattccaagtgaaagaattatacaaatcgcaaaagatgcagctgttatttccttttccatgtaaagatataaacctataggcagcactcctagcaaggttgacggcaaaattgctgctgcagaagatgtgtatttccaagtactcttaaaccaatccaatgtgtaatccctaaacgatataacagcatttttatatttttcatatgaacttgtagattgattaaatgctttaattacctctattccttctatatactctacaatagtagaattcatataattattggcttccatgtacttatcatattttttcttataactcttcatcaccattagatatggtatcattccaagaggaattgttataagtgctgctaatgccatacgccaatcaatataagttatatagataaaaattcctattggaattaacatatttgaagtaaattcaggaatcatatgagcaagcggtgtttccattttttcaatttcatctaccataacatttttcagctttccaactgtctctcccataacactcccaagaggtgcatacataagcttggttgcgactttccttctcatattttttaatatatgaaacgcagaattatgagataataatgttgatattgtgaacaaaaagattttcataaaatatcctaagagacatattgctgaccaaaataaaatattttcaaatgtcttagtatcgttgaagaacataacgattatattagcaactccaaaatacggcaccattcctgcagcaacacttgctattccacaaacaacagataatatcattaagtgtttatgttcctttgctaaggataaaataattgaaatccatgatttttctttcatttaaactcctcttttctttaataccttaaaacctatttcgtagtattaacttttaattaataattttttatatcctaaattcacatatataattttcataaaagcatatccattttagacgcacatacttgttaaacaaaattatttttgatatcatttaagtataatatattactttctatccaataattatgatatattactaagttataaccggtcaatcaatttggagtcattcgtctcttcatgatacaactttgtctgatcgtgctattgctataaaggagaatttatatgaaaaatattttaaaggaattacatgaaccatgcctcaatcaatatggttttgaaagagttgaaaatgtagaaggctttaatgatataggaatgtgttataaagtctcgtctgatataggcaaaggttattattgggtttatgcaaaagaaaatcttttttctatatcaatccatgatcttgttttatatgaagattattttatgaaataccagcagccaagatatctcagtataagttattatgattccgtctctggagaagagttaaaaccttataaaagaattaatgctaattgtatacgcagccgcatttctgaaaatgatttatatcaggctatataccataaaagcatccctattaattctatagatatcgatatttcgcctgattattatgaagaatatttaaataataaatatccaaaaggcttccaaaattcgaaaaatgcatttttaaatattgatggtctaacagattttccagaattaatattttctcttaggcaaataagaaattttaaaggctgcggagatgttgccgccctttattatgaaggtaaagtagccgaaatcatctcattaattgccgaaaaaagcaaatctttaaatgacctaaaaatggaaaaaaccttatcaaagcaggatattgaaagattagaatctgtacgtgcatatattgatgaccattttgcctttgaaatttatttggaagacttggccaaaattgcttatatgggcacaactaaattaaaatattcgtttaaaaaagcataccattgtacaattacagaatatattcaaaacaaaagaatggcacaagctgaacatttactcagcaacaccgattttacaataagtcagattgcacaaattgtcggctataaccattttggacggttttctaatttatttaagcgctctaccggtttactgccttctgaatacagaaaactggtaacaaaaagttaaaaacataatgctgctgcttaaaatattctctttaagggtgcagcatttttgttatagatagacaaccggtatttctttgtctataaaatttatgaaaatagacacacttaaacaagccttataaaaaggctctgtattttatattattgttaaaaaaagctatggtatgtatgcaaaagatgttggtaaaatttattggaaatatgtattaaaaaaatgttggtaaaatatattaaaaattgacaacatctttttaatacatctaagaggcttttgggatgatacaaagatgaatgaggcactgtgaataaagcaccatgactaagaattatgaataaatcattcgtaattaatatttaatggaagttttaattaacaaaatttttgatcaattacaggtctgaattactctgtcacatgtgatttctaaaaactcttcatcatgagttactatgaatataatatgcccctcttttgataaacttttaataagcctactgaccgtacacatattttcataatccaagccgcttgtaggttcatcaaaaatcaaaatcttcttatctgctaatatacccgtaacaatagcaagccgctgtttttgcccgcctgataatgccatagggtgattttctttatacatctccaaattaaattcttttaataaacttaatactctattatcttctactttcttttttgataacttacattcatcccacacactttctgcaaaaagctgatgatttacatcctgcataatcatataacaaactttgtttcttttctttggagataaaaagatttcattgagctttatctttccatcaccttctttaattaaacctgctaaacacctcatcaatgttgtttttccaactccattattgcccaataccccaataacttcgccttccgctgctgaaaaattcatatctttaaaaatatactttttatcatttttatatgataatcctgatacgattaaattcggtttagctgtttttaaatgatttgaaagtttggttactatgggttttattgttctaaggcccatttttatcctctgattttcatctaactttaaaaattcttctcttttaaatacttgagatacctcaccatcttccatataaataaccttatctattaagtcagctaaataataaatccgatgttctgctataactactgtttttccactttcttttatttttttaagctgcgatttcaatatttttatagcatttatatcaagattagctgatggttcatccaaaacataaacctcaggattcattgcatatattgctgcaaaagcaagtgcttgtttttcaccgcctgacattttgaaaatatttcttcctaataacctgtttatttttaaatcactaatcgtgtcagaaatcctatttttaatgtattctggattcattccttcattttctaatccaaaagccaattcactatcagaatctatattaaaaaactgagatttaggattttgaaaaacagatcctatctttgaagataattcatacatttttgaatctgcaatatccattccagctgaaataacctttccttctaacacgccttctataaagtgtggaattagcccattaataacttttgttaatgttgtttttccacatccacttttaccacataacaagacacattcccctgattcaatatggagatttatgttttttagattgtatcggcttttttctgaatacttaaatgaaacattgttaatatctatcataaaatacctcccaaatggagcattgaacctgtgataaaaataacccctatcccaatgcataaataatcttgcagatgaaaactcatatcaacagaacttgtttttggttttggattttcaattcctctagtgattgcagcagcacttaattcttctaccgtattaaccgctgaaattaaaattggtacgtaaatacattctacttttcttcttaatcctcttactcctctcattttcattgcatcccttatatgcagaatctcctcttttatagctggaaaataacgtattgtgatggataatggaataatgaccttttgaggaatattccattttcttagcgataaaataatcaatcgtactggtactgtttttattattaattctcctatcatcatacacggaagaagttttctagcataaacagctaaaatcgaaaacatgattgctaaaaaagtcggcatgatttctattaaataatattgaatagctaataatattataaaaaatacgcaccactttatggctgattttatgcacccacaaaaacatagtaatattgcaattgctattatttcagatgcctctatatacacaaaagaatttgtaaatgcgactatatttgcaataaatataagtaatatttccgtccttggatcaatactcaaacattttttctttagtctagacatatttaaataatccctgcctttataaaatgtttttttagcatgcttctgccaattatcccacctgctaaggctaatataaatgttgaaattatcattccaattaacattccaaaagaagtgagattcctcaatccatctacgtaactactagacattccctgctcaattatagattcaaagaaactatttccaaataaccaaattggaagtggtgaacctaccatcccaagagaaaacaccgcatatgctattaaatttcctgtaaaacttttatacccaaacatatatcgaattaattctgcaataatacttgaacttgcaaaagttactaataataccactgtaaattgtcctgttgcaaaataaatgattgctgtgattgctgccataatcactacaggtccaaatttttgaactttttctatcatcaacataaaaataactccactaagcagtgcaatcaatgcaggcataaatatccatataatcggtgaaatcccaccacaaatcataataataagattaacaacaaaataaattgcagaaaatacaccaatagtaactaagtctttaacttgtaatttactcttatctttttttaacatttttctttcctccctataccgtagaccattctaattctttaatattaaattaacttcatttaataacttaataaatcctaaacatttttgtaaacatcatataaaatcgccttattttaatcctaactgctcaatatctttaataacaatttttttagattcatataaagattaaactccttgcaactactttttataattatgtattaaattctctataagtttgaatttacatgaaataaatgttaaaatatacaaatgattcatttgatttcttatttcaaatgataatgataattaattgttttgtcaaaatgtcttacaaaaggttatattcttaaggcatttgaatgaatcacttataaaataagcttttttaatactatccacatataccagcgtgatattgagggataattataaataaaaaaaagatatattgggactttaatgtaatatttatatacttttagaatggagtgattaacttgaagaacaagaaccaaatagacacaatatatagaaaaggttatggcaatttagctgaacaactttcgtttaaaaagactactcaaaatgaggaacaaatttatgaagtaccaataaaaaatggaacaggttatatttatcaaataaatcctgctcctggggtttttatttctatgtgtgattgggtagcatataaaaaaatcgaatatcattaccaagtaaatcaaacattcactgaaatctatttgctagaatcaggtaatatctctttagtaatgaacggtaaaaaaacatattcaataccgtctggtgtgaatgtttatataaataatacatctcaagggcgtatatgctacaaacctaatatcccaataaaatgcatatgcatattactttttgatgatttcataagaaataatattgggaataaatttatcgataattatataaatttcgagaaaacttttagttcaaaatctattaactataatactcctgaaataactctgctctttttacaaataaaacagaaactcttatgccgcgaaaaatcacgtttatattatgagagtaagattggtgagctattatctataattagaagcaactttaataaagaagaagaacgactaaaatctattcacagtaaatttcctttaaatgaattaaaaagattggaactagtaaaattggcactcgatcaaaatgtagccaatcctcctgaaattgatcaattatgtaaaatagctgctatgggtaaaacaaagttaagggaatcatttaaattattttttaatataacaatcgggggatatattcgtcaggttaaaatgaaacattcattaacactaatgtcaaacaatcagctatctattcaaaaaattgctgctagcttagggtattctagcacaagtaagttttctataagctttaaaaagatttatgggcaatctccttctgaatatcgtaaaaatattctcttaacttcttaaaaataattcttgtagttaaatctaatgaaaataacccacgaaagctaaaattgacatgatacctttataataatagtattcaaggtacattccaaattagattttcgtgggtctttttgttgtaagagaaagatatcaaaacctgctagcaggatttctcattacttacctacatctattaatcaattaatctaaatgagtgtaatttttaatatatcaatctataattgtatacataagctttttaagctcacctttatctctgccattcctttgagcataatcatcaaactgatcatgatttattttattaatgtcaaagtatttagcatctttatttccaaagtaaagaccacaggtacttgcagtaggtgacatcatatagctttcagtaagttttacattaagttctccttctttatcaagcaagttaaataatttaactttttctgaatgatctctaagtgaaggatatcctattgcaggccttattcctctatatttacctttaaatatttcttcgatggataaattttcatctggcgaatatgcccaagattcttttctcactttttcatgaacatattctgcaaaggcttctgcaagtctatctgcaagtaaaataaccattgttgcaccataatcatcaccagaggctttaagcttatctgcgtattcttttgcacctatcccacctgttgttatgaaagcacctatataatcctttattccagtatctttaggagctatgaaatcagataagcacatatatgtattatcttttttcacttcttgctgccttaaaagattaaagttaatcatttcagaatcattatagacttcaatattatcgcctacagaattagcttcgaagagaccaaaggctgcatttgcttttaaaatattttcactctccattttatcaagcattttttcagcatcagctaataatttcttagcctcttcaccgtattttgcatcttcaaggatttgtggatatgtcattcccatatcccaagcgatgaagaaaaagctccaatctatatattttcttaatttccctataggaaaatcaataaatttctttatacctaacattttaggcttctcgatttgctctttatcccattctttcttgaaattattttcccttgcataatctaaagtgacaaattttctaggtactttgttaaatgtttctcttaaagtttcatattctgattctatcttattaagatattctgcttttttatccttatttaaaagaagtttagcagcttcaacagcttttgacgcatcagttgtatgaattactccaccagaatacttaggtgcaattttaattgctgtgtgagcctttgatgttgtagctccgccaaccataagtggaattttaaatccttgcttttccatttcttctgccacatttgacatttcttctaaagatggagttataaggccgcttaaagcaataatatctgcattttctttcttagctgtctctaaaataatttcagtaggaaccattaccccaagatctataacttcaaagttattacaagaaagcactactgacacaatatttttacctatatcatgaacatcaccttttacagttgcaaaaactacttttccagcactaatgcttccactgctacttttttcctcttctaaatatggtcttaaaacttctacagcctttttcataactctagcactttttacaacctgaggtaagaacatcttaccatcaccaaaaagcttaccaacttcattcattccatccataagaggtccttctattacttctaaggatttactatattctgttcttacctcttctacgtcttctttaatatatttatctataccttttacaagggcagtctttaatctctctttgacattttcatttctccaagcttccttattttcttcagctttattatctactttattataggttgctgcaaattctaaaagctcatctgctgcattttcgcttttattaaaaataaccgcctctactttttcaagtaagcctttatcaatttcatcataaatttgtatcattccagggtttacgatccccatatccattccattttttattgcatgatataaaaatactgagtgcatagcttctcttattacattattacctctaaatgcaaatgaaagattacttacaccaccacttacttttgcataaggtaaattctcttttatccatttagttgcattaataaaatctaccgcataattattatgctcttctattcctgtagcaattgttaagatattagggtcaaatactatattttgtggagggaaattaacttcatttactaaaatatcataagctcttttacaaatacttatcttcttttcataagaatctgcctgcccattttcatcaaaagccataactacaacagctgctccaaaatctcttataatggacgcctgtctcttaaattcttcttctcctaccttaagacttatggaatttacaattggttttccttgaatggctttaagtccagttacaagaacatcaaacttagaagaatcaatcattactggaacctttgaaatttcaggctcacttgctaaaagctttaagaatttatccatctcttcttttgcatctaagagagcatcgtcaaagttaatatcaactatttgtgctccattttcaacttgatctttagctatagataaagcttcttcataattcttttctctaattaatcttgcaaattttgctgaacctgctacgtttgttctttcaccaatattaataaagttattttccttatttgctctaagagcttctaaaccacaataaactgtttcagtttcaatgtctggtatctttctaggtgaaatatcttttatagcttcacttactgcttttatatgatctggtgttgtaccacaacatccacctacaatattaagacatccgtcctctgctaaactttttattaaagctgcagtttcttctggcttttcatcatattccccaaaggaatttggaagtcctgcattagggtaaacacttatgtatctattttgagttcttgaaagatattttacaaatggtatcaaatcttttgctccaaaggaacaattaagacctattgcaattatactttcatctaccatagtatttgcaaaagcttctaaagtctgacctgaaagaattcttccacttttatctgcaatagttccagaaattattacaggtaagttcttgcctttttcttgaaatccttgctttgctcccataagagcagctcttgcatttaatgcatcaaaaattgtttctatgagaattaaatctactcctccatctataagccctaaaacttgttctttataagcctcaactaattcatcaaaacttatatttctataacctggattttcaacatcaggtgataaagatgcagttttatttgtaggtccaagtgatcctgctacaaaacgcggtttatttggattttctgctgtaaatttatctgcagcttcttttgcaagctttgcaccttcaaaattaagttcatatattttatcttccatttcgtagtctttttgagatatactcgtactattaaatgtgttagtttcaattatatctgcaccagactccaaataagcttcatgaatttctcttattatattaggattagtgagatttaaaatatcattatttcccttttgattacaagagatgtttagattgcccctataatctttttcctctaatttataattttgaatacaagtccccatagccccatctagtactagtattcttttttctaatagctctttaatttgtaaattcatcaagtttcctccccaaattgttttatataaatagtctaataggtttttattagtatcaaaaatttatgtaattttcttctatacttaagtaagccctaaaataaacactaataaaaataaacctatattttcttatatcaattttaaatgatttactataaagagtccaattattttaatattttattaaaataaaataggtattatctatcgtaatcctaaatgctttatctaaaaaaaaatggaggtgcctcttctataaacttaagagacaccttcaaaaatatggtttcaatgcacaattcacaatgcacaattcacaatgcgcatttcgaaatttactattacatctaaaattctagaaatatttttagaattatcataaagaattatttttccaatatatataatctactatttaatttttattgtgaatttttcatcaccataaacttcaatagattttgatttatctatagttttaacagaatagtctccatctttaatttctttatcacaagtaattgcatactcatcagtatctgcattataagtagtagcttctttttgttcttcaaaattataatcatcactaaatgaaattatattttcaccagttttattatctactatttcaatcggggctgcattaactccatatcttgatttataataaatctttgtttttccatcttcaatattcactttagtaatagtcatatattcttttccatcactggaatataactttgtttctccttttaaatttagtttttcagtaatattattctcagtttcatggctatcattatttttatatttccatggtataaatgttaggtaatcagtatcatcatagatttctttaaaaccattactgaaatacattatataatttccatctttatcacctactgcctcttctgacttgtttttaatatatcttcctttattatcaaatacagcaaaagataatctatcagcattttctttatcatccatacgtgttccttgtatcactgtatttagtggtgttgtaataattttgtttatatgatatccactaactatattacttaaatctatatcacactccttttcattcactttcccattaaccttttcactacttacaggaatattaaagttccaagttcctttaataggattctctagtcctatttcatctatatctaaatttaatataaatttatctggtatctctacatatccacccaagaaatgttcattttgaaactccttagacattgaattatgttttaacacattgtactctatagaaccaacaaaggttttattatcattcataaactttcctgttccacctgcactaaaagtcgtttcctttccatttattcttaattttgctcctggaaatcttggagtatcttgtatttccttttcactttcaatagtatagaatattgataattgaacttcatcgtataccactttatcaatagtcatctttaagccgctactttccttagttatgtttaaatcagaagcatattcatcataattttcataggttttgttgctaaacattttaaatatattccctataataggaatattgcttgcatatgttggcatggccattccaagtaatagtgttacccctatacagcttaccaatatgcagcaagctttctttatagtaaatcttttcttatttattttgctaagtgtactatcaatctttttattaatatcatttggtacataattaatttcatcctttagctttttccttattttatcatcaaataaatcatcatttaattctatcatatctccacctcgcccattatttctctaagttttgttcttgcccttgtgagtctagatctaactgttccatctgaaattttcagcaattttgcaatatctttagtactcatatcctcaaaataaaatagtactgttgtcactcttaactcttcgcttaatgaatttatagcctttgtcaaatcaatattttcataactatcattatagatctctgtatcgctattttcagataaataagtaactctcttaccttttcttaatatttgtgtacattcattaattaaaattttaatcaaccaagttctaaagtactcatcttgtttcagagaatttatcttttgaaatgattttattattgtattttgaatcgcatcttcaatatccactgtatcctttaaaatccctctggctactctgtaaatatttaatctattttcatctataagagctaaaaaagcttctttgtcgcctttcttggctttagatactgttgactttttcctataatcaaaaaatgatatcaactccatctttttcctccttaatttatactacctagctaagtattacaatcattagatggggtagaaaacaaaaatgttcccatgaattttaaaaaaccgctaaatcttttccataatactctcttgctcttccgttcctgtaacttttccataaattctaataatatgatactacatttttctattgtaaatggtaagaaatctttacataaaaaatagccactctatagatgaacaacattaaatttagacttattatgtgaacatatttccatattcactatatataattggttatcttaattagaaatcataaatatatttgtgtagaaaacatttgaaaatgagctgctaagattcttagttgtagattgttccactttagcttgtcacgctgaaagcgggagcatgctaaagtggtgaaatctgcaacttagaatcttcagtgatattttcatagcttttcggaacaaaatatttatgatttcggtaagttaccacataaatctaattttatatttggatatctatacgaacggctatttttttaaagttattctgttttattatttagcttgcttcaaaacatagtaccaaggagttgctcctctttctatataatcaccatttttccattcaaagaacatatactttgaaccgtttatttcttttattatatatttagaagcagttttatcactagtatttaagactaggtcttttgtccaagttatatttttattctctattttaccattttcatcaaagattaaattatttaaatataaatctccattccatgactttttctctggattaaagttatttatatcttccacaaagtcaacgctatcccattttccaattacttcaggatcattaataaaaggatagtcaactttatcagctctcgtttcaacttcattaccagacatattagtattgagtgatggtgtagaactaacttttttcaatacgtaatagcaaggtttctctcctctaattgtataatccccgctcttccattgaaagaacatataagttgaaccatcaatatctttgattacataactactgtcagttttgtcagcatcattaagaatgtgatccttagtccatgtaaatacagttcttgctaccttcccatcttctgtaaaatttaattctttaacatatagatcacctttgaatttcttatcatttacattgaaatcttctatgttttcaacaaaatctacaccttgccactcacctattatattaggatcattaacaaaagcataatcaattttatctacatttactgcattacttgctccatttatatttgcagatgcttttgcatcagtaagtgcaataccgctaattacaagtagagatgcaactgccattgcagaaaatctataggcctttttattaaaaacttttatcataacaattctcctttttacttcagatttattatttactatggaagttgccccaactaaatgaactgactttgaaaaatgttctattaaatttatgattgtaaatccatattccgcaacttcttcatcttccgtataagaaagtgcaagtgaatcacagcatatttccatatcctctttcatctttctaagaccataatgaataattggattaaaccaataaatagtctttaaaaaaattattatccagtttatagctatatctttacgtttaaagtgagataattcatgaagaaatacatatcttaatttatcaacagatattatcttatgaatatcctttggaattagaatcattggattaaagtaacccagtagtgctggcgtctttacgctagaagtctcaactagcagtatatctcttttaattttcattttattttggcaatattttaaaacatctaaaaattctatgttattttgtatggactcgctacttattttatttcttagttttttatatgcaaataggatatatgtgaatataaacactgctcccataagccatataaaactcaatatagttaaacttgataaactatacccattaatttcgttattgctaaaatcaatggaatttatagttcctaggataacatcatgattagacatagaactagattggccgctacccttttctaacatacttccaaaatgtacttccttattaggaattaatagcaatatattttttcctaatttatttataagattaaacatgcttaaagtgctctcaggaagcttaaatatggttaaacgcagtattactaaaaaccataatgcatactgaaactttatacctattctctctttgtaaaatcttctaaaaattaaaattaaacaaatcaatatgctaccagtaatagatgtttgaaatattattttaaatagctgatcaagataattaaaatactcgtacatacactacttattcctctcgtctaatatccttttaagatcatctatatcttctttgcttaaatcactttcttttataaaacttactagcatatttttaatagctccattataaactttacttaagaacgtttgattctctgcacgtatgcattcattttcatttacaattggataatataagtattttctaccttcttctttaaatccaagtgcatttttgctaactagtctgcttattaatgtctttattgttttaggcttccaatcttttgtatcttctaatgcctcaataatttgatttgatgtgcgtggtgaatctgtccagacaattttcataacttcccattctgcctcagatatcttaggtatttctcccataactttcactcctcttttttgtattacaattgtaatctacaattagaatacaactgtaatccttaattgtcaatatatgttttgaataaatttcagattaaatatcaatactatatacgtatctattttagaatatcttttaattttctgcccaattaaatagacctgatttcaatattactattaaaatcaggtcttattttttattgcttattataaaacaatccagcttcttttataatttcttgctctgtaaataaactttgcacagcttcagtataatcgcttaacttttgtgcacttcttatttttttagcgtattctttattatctgaaaatatgtaaatcatatatccaaatagttctttcattctatttattgcatatacatcttctggaaacacctctatatatctatttaaaatttcatcatggaaatcttttaatatatttttgcttgtattaatatcattttttattatgctaatcaaccctggattagcaagtatgcctcttcctagcattactgtatttacctcaggaaaatccgctactaatttattataatcattaattgtgaaaatatctccattgtagcatactgggttattacttagtgataaggcatctctaaatacatttaaattaggtttatttccataaaaatctttttgtgttctaggatgaataattaactcttccaaaggatatttattgtaaatttttattagctcataaaattcttctggattatcttttcctattctagtttttatagaaatcttaatatcatccatcttgaatatttcctctagaaatgaatctagttctttcctttttgccaaaaatcctgagcccctgctctttgaaacaacagccttagcaggacatcctaaatttaagttaacttcgctataccctaattgttgcaactttctagaagtattaatgaagccttctgcatcgttagtaagtatttgaggtactatattcatgcctttattattttcaggcaagacatctacaagctccttagtcttaagacttctactttcatttggaacaataaaaggtgtaaagtatttatccacatttccaaaaaacttttcataagaatttctatatatatattcagtaattccctccatgggcgctaaatagtatttcatttaataactcctttatgtatcctaaaaaacaaagccttttaatacatcatttatggtttgtaaaacttttaataataactttaagatgtatggtaagaaaaatgatgctaataatactgcaccagccaaaattaatatattataatttatcgcttgtcccattttaacctgatataagtgtatggctcccacagatatagatccaacgattaatactttagttgctatccatgaaattatgtttataacctgtaatactgctattattactgataatacaactataaatggaaacgctaatatcttaaatggcagcataatcaaattaaatgcctttttactatcattttgcgatttcttttcggctgctctttgttttcttcctttttcctctttatcatcgtttaagctattttttctctctttatttcttgaagtttcttttctctttagattattacttttccctccagaaccctttgccttacttctagaattacgcctacttttagaatcttcatcttcattactataatctttttctttttgtatttcttttggatttatagctactgttaaattttctttaaccgattgattttcctctaagctgattaaagcttcataagcctcatcaaatatctttaagaattgattaagtcttttttcattaaccacttcttttctcattttctctacttgcatttcataggctttttttatctcttccttcgatgcattcttttctacgcctaataacttatggtaatctgtcattacttctctccatttctttaaattaggataatcctattttaaccttagtactccttaaagtattatacttaaaattataatcaatttaaagcactgactttatacaattctattacaattatctatttcaattaggatttattaatacttttatgtaattatagccaaactacttaatatataatgattaatttatttgacatgcgctaatcataactgcttacttggaggttttttattatggagcaaaataaagtagatagacgtacacgaaaaactaagaaagttttaatagaagccttaacaaaacttatgtctgaaaagaaaataaataagattactgttaaagaacttactgacttggctgatgttaacagatcaactttctatctttattacaatgatatatatgatatgttagaaaaaatcgaaacaggattattcaatgattttactgaggcttatgacaaattttcagaagaaacagcctcctatgataatttattatcatttttaacttatttacttgaattcataaaaaccaatgcagatatgtttaaaatattacttggccatgatggagattatgcttttatagaaaaattcaagaactttataaaatatgctaatttaccagtaaacagttcattttctaagacaaaagcctattattacatcccttatacaatctcagggtttattggagttgtacaacagtggcttaatgatgatatgaatgttccacctaaagatttagctgctaccataatagaaatgttctaacttaatattatctttataatctctctattccaatcatcaaattatacctatatctatatagtatatacttgttgtaatgcaaaaaataaaggtgccacaattttttcggcacctttattttgattaaatctatatttcttctatataattattatttttcattgcttgtgcaatttctttcattttagtattcgatttttttgaaatatcttctgatagtgacataagcgctggtattgctattggaagtaaaacaaaagctaataggaataatcctataacaacagctattgcaagttccattaatataacaatattcgaaggatataaagtagcgaaagttccagctaaaataatagctgctgacattactactgcacctatttttcttgatgctaaaactatagcttcttttgcagaaatatttggatattccttaaaacgcatcatcaagaatatactataatcaacaccaagtgcagctatcattataaatgagaagaaaggaacattccaagacaacccttctgctgcactgctaaataacatttttgatataaacgctgttgatgataaagctgcataataagccactccaagtgaacctactatataaactggaatccaaaatgaccttattacaataactagtaatataaatatagctcctaatactattatttgagtaaaagttatatcatgtgttgcaacattacttaaatcattagaattagctgttgcccctgcaactccatattttacattagaaagctttgtaccactgaggttattttgaactacagtacttatattatctataagattaattgaagaatcagaatatggctctgaatctaaagttatagttaacttcgctatttttctatctttagacatatatgcatcaaacattttacttatatctgaattactaaaagcttcatctggtatataaaaactttttgtattagtaagctgatttaaaaaatcgttactcttatcaattccatttgatatactagacaatccattactgcttccgtttaatccatcctttagttttgtcattcctccactaagattatttaatccattgtataaggaatcttgtcctgttttaattttatcagcaccattttttagttgcgacatacttgaaataacttgttcttgtccagcactaccttgctttaatccattagaaagtgctttggcaccattctcaagttcattaataccttttgcaaactctgaatctgaacttgtactagcaataactgtttttaaaccatcattgacctgattcaagcctgaagtaagtttatcgtagttattattagcagtattcattgctgaagtaatgctatctagtgaagaacctaatttgttaatcatctctttaagtgctgctacatctggatcatttggtaatttttcatcaacttttgcgatacttccttgcatcattgatgacatctgctttaattgacttatagatgtctctagggacttatatccttctccaagtgtattatatccattgtttatttctgtgattttgcttgaaatattattaagtccaccatttatttgagctaagcctgatttaagctgccctatacctgatgctaggttatctgcaccatttgctccttgtgcaattccatcattgatttttactaatccattagttattgcatccattccaccttcaagattaccagtaccttcagatagatttttaactgatgaaaaatctggagctgatagactgttatccatcttgtttaatccatccttaacctttccaatcccatcatttgcactagataatccattcactacagtatctgtctgcttatttgtataaaaattatctattatagttcccataggctgagttggtcctgatacttcttttattccctttactcctttaagcttttcagtaatattatctataactgctaaatcttcattattgtccaaaggttcatcgctttctaaaacaacagtagtctgcataacctttcctgcactgaacttgtctgtaataatattaaagccttttacagattcatttgaatcacttaaatccttaatattatcaaaagataatttatttgcattaagtgctattacaggagtaagtattgctgcaacaactaacaatgaaactactggatgcttaactgacattgaagttattcttccccataaaccactttctttatgaccacttgcttgtttagaaggccaaaataacttactacctaataatttcatagctataggagtaaaagtaaacatttctactaaaagaatagctatgcctatagcaacagcattagctgatctatatatagaaaattgtacaaaagttaaacttgcaaaagccattaaaactgttaagccgctatataatattgtcttacctgaagttttataactgtttataatagcttcatctatagttaatccattagataactcttctttaaatctattaagtaagagtatatgataatctgttccaattccaaaaagtactaaacatatgaacatttgagtgaaacttgtaataggaaaattaaatttattaactagcacacctataatacccattgatgatacatatgatacccctactgctagaagcgttactaaaggtgtaacaactgaacggaacataagcactagtacaactaatataaaccctatagttattaaagcacttttatcaacactctttgctacttcattttgataatcattatttatggcaagcgaacctgtgatataatgatttaccttaacatctttgatttcattattaaaatcttgtattacagcattactatctctttcacctttatcaaaggaaattgatacaagtacagttgtattatcttttgatatcatttgatcttttgcttcaggcttactgaatggatctataatatcatttattttcaatttttctttattttcatttaatttatctataccttgttcaatatcattcagatcatcatctgagagttccttatcgctattaaatactaataacaatgaatctcctttagaatcacccattttatttatcatttcttgagcaactacagatggtgagttttcacttatagtagctccacccttctgacttagtaccgcattaaaatttggttgattaattacgaatactattgtggctataatccatataagcaatatactaaaacgatgctttaatatttttctcataaattcatcctccgttaatagtcattgttttgtcgacatgtgtatattatattttgatggatttctcatttcaatcatcaatattataaaagcttgttggatataagacacattaataaaaactgtcgaataacttacgaaatactgtgtataataatttaagtaatttatgaaaagaatagaatgaataatattcaatatcctgttcaggaaaatttatatgataaatttctacttaaaacttaatatgattttttcaagatgtgaatgcattttctcttttattttatcttaatctgcattatttataatttatgtaagcagaccgtacttgactttaatgcaactttctacgaaataaaaaaatgaacaacgccattaaatgacatcattcattttctaatgttataacctttgtaaactacatatatctagtaatacgacattaattatttattgatttcaattgtagggaactttaattccttatactttgcaaatttttccttaacaactgccaaattctcgtctgtatagaaaccaccctgtgtatgcataatctcctttacatgatgtcctctgccttcaacagatgtacgatcacgaatcaatccatcttcttggataacaaatttccattttccgtcttctgtcttctctaagtttccaccagcaccacaaacttgacattcaactgggtaatgtagcccgtcccattgcacttctccaagaattaatgcatttgaatggcaatgtggacaccatcccataccttcatctccaagccatgttctttcccctactggagtatttaatgatttcattatattttcacccattttatgagcacgttctatcatatcatcgtataataagcactgttttggtgctggaactcttgttgctaaatacatatcaactactttaaaatcatttgtaaaacatgtagcctgcatgctttcaagtgccattgactgccaagaacgagtagatcccccaactgcaattaaacctgcaactctatccttatgctcaattgcaccaataaattctaagaatgctgattcatatgctagatttctatgcataaattttgaaaatgttgctgttggcattaagtcatatgttggtgcagttgcaattatagcatctacatttagcatcactttcataatttcttccttatcatcttttttgcttaatgtacaaccaacattttttccattactcatcccatgtgtacaagctgtacaccctgaacattccataatattataatctcttaaattaatcatcttaacatctgcaccttgttcttgacatgcaagtaatgcttcctttaataagatttctgaatttgaatcttttcttcctgctgtaatacctaatactgtaaaactcattaatacttctccttcaatagctcaatattttgttaaaattagtttatacttttgcattttctaattataatctaatatagatacctaattaagacctgaacttatgcatatgactcgccgaaatgaataacatacttttgttccattttagcttgtcaaactgaaagttggagcatgctaaagtggatacaacctgctgcttagaagcttcagcgatattttcatagcttttcggaacaaaatatttatgatttcggtaagttactacataaatttagaaattgcaaaaacaaacgatttaccataattttagcattatagaaaatgtcattcatcaaaaataagtcttaaaataatgcccttaagtttataatgtttagacattttttcaatttaaacgaaataaggagaatttaatgaaaaaggaatacgatttatataagaaaagatatgaactttatgatagtttatttgttcaaaataatattgatgatattcttagcatagctgagaactttttaggaaatcctatttttattttagatacaagctatcgactcatcactcgttctaatctagctaagtgtgaaaattcaagtattgaaacccataatggtgaagattatttattatcaggtattattagtttaatgaaagaaaataaatgcatggatactatttataaaacaaataattcattttttcattattccgatgaaaatttaatattttgctctattaaagttaatggaatttcaataggatatataagtgttcttcaacgtaatcgtgattttgaagatgaagatttagaacttacaaatatattatccaatttactttctattcaaatacaaaaagaaaatctatttataagtaattcaggtttagatgaggaatattatttgatggatttattggtaaatgacatagataatttggaatatgccagtgaacgcttaaaatatagtagctttactttaagtaaatgcaatctaatcctttcaatccccttcaaacagaaatatgaggattatagacataactttggattaagagaattaattcaaagacttaaaggtatacttggaaattgtatctcaacttattataaggatacaattatttttcttattagcagtgataatgaacaaattatcagtgaatacataaaagagaatctattagaatttttaaaactaaataatttaagatgtggagctagtattaattttaataatttattggatataaaagattactttaagcaatcaatatgcgctttaaagctatcatcatatatgaaaatccatagtaatataagttattttgaagattacattgaatattatcttattcatatatctgcaagttcaaaagaaaataatgatttacctagaattgatataacaaccttagttaaccctctaataaaaaagcttattaaatacgatgagaagaataaaactgaattatttataaccctaaaaacttacttagaatgtaatagaaatgccaatcatacatcaaataaattaaatatacatagaagcacattattttatcgttttaataagattcaaagtttacttgatatttctttggaagacagtaataatttatttaaattagaattatcaattaaaattttaaattacaatgaattttcttaagctttacctaaatattatgtaacaacttttaatactgcctaatatattgttagtataacaaatgattttgattaacaaaggataaatgggctatgaaaaagtgttgcaaaaaattttgcaagacttgctctaatgtatattcaatttaaattctgtattaatttaaataaaggcaagtatattatattaaaaaaatagacctaaaagatttgttaattcaatcttttaggtcttgttgtttaagatataaaatttcgctttatatcttaaacaactattttcatgctcttagtcttatgcttattacttaagaccttgttcgtaatcttcgatcatatgttttaccatatatccgccaacatatccattttgtcttgaagaaaggtttcctttatccatgctttcataattgcttaatccaacttctgaagcaacctcagtttttaatctgtttaatccttgttttgcttctggtactaatgttctatttcttccactattatttgatgacatatacatctacctcccttaattaatataaattttgcttggcagtaatatattaaccagtatgataatttataacctataaaaatactagtaaaagtagcacctatagcttgtattacatacttttccttgtttaagaattatatttcatttaagtccataatctcctattagttcaccttgtaaatattaattttttaatagatgtttacgatcatattttttatcctaatatagaaatatttccataccaattagaattttcagggatattttcatagctttttggaacaaagtatttatgatttcttcggtaagttaccaaataaatttgaaacttatatagataaacaatttaagaatttcatttaaactttgcaataaataccatactagaaagcagaaacatttttatgaaacaggcattgaaaatgagctgttaaaagcccttaattgtaggttattcccaattcttgtcacaatgaaatttggagcaagcattagcggtaaaacctgcaatttagttctttcagtgaaattttcatagtcctgtgaaataaaaatatctcttcttttggtggatgattgaataagcctaagtatagtttataaaatatcttccaaccagaaatgagtgatatacttttgtggaatgtttcattggtaattttgatggatgtgattctttggctataagttgttccaaatgtgctagttcaaaaagtgagaatcgaaattttatatttcgttcttcgaactttctctgtgagcgcttgttctttgagactagcactttgggcgcaactttatagccttagaatcacccatcataatttccttagaaactggagcaacagcataattcctatttcggcgagttgtatgcataagttcaagttatatactgtttatctatataggtctcaaatttcaagataattgtatattttttatatataatgcagaaaattaatatataaaattggttatttatattctaactactaaatattcggaggctcatatggaaaaagaaatcctttctcagtattatatatttttaatcttaataccaatactatgtggtactgttgctagatatattaccctagtagttgattacaggcagtatcccagctatccaaatggatatttaattcatttagtagctggattcatatcttctggaataggcgctattgcaattccagccattctcgaaaggaactttgaagcaataacattcctagttcttgctactgagcagtttagagaagtacgaaaaatagagaaagaaagtcttcaagatcttgataatgtggaacatgtttttagaggagaagcttacattgatggcattgccaaaacttttgaagcgagaaattatttatcattgttagtttcttttttaactagcttaaccatgcaccttgtgcctcataacatcattctaataaatatattaagcggtattttagctggaggaataattttttatatactcaaaaatttttcaaaaggtaaatctatcggggatattgctcaagtaaagctagccaaaataactgtaaaaaattccgaactctatgtggatgatatatttgttacaaatcatttaggtacagatagggcaaggaatttagttaaagatggtggcatggcagctataatttatccaaatgaaaggcacttcaacagaataattgatcaccacggtcaaaggcaggccataatatttgaagcgtgcagaatgttaggactaaaaagatatcactatactaaatgtgactacgaaacaggaagagtcgctgttatgctagttccaataatttataatgaaggctcttttatagaaacaataaagaaaacccctcttttagagagtataaaaaagagttctagtttaatgaaatctaatcttaataaatagaaaggcaggaataccatgggtacagatttttataatactggttatgaaataatagcatatataaccctatctaaagatagggcacaaaatggaaaccccttaattttagttgcccaaactcaagaggagcaaaagcagttaactgatgatatttcaaaggctttaagggcagaagtagttcaacttacttgcggcgattatatgattattagcaaaaactaactaaataaacctagtggcatgctcaagataattgacattaaaactgatatttgaatacctaatgctgacagcagtgattatgctttaacatttagaaatatataattcacgatacacagttctattagaaacaatttttatctattggaaattttatatttaatcctgctaaataaagatttaccggtataggtgttgcataattattatttggaaaatataatcctggatcgccttctaacctatttaatgccaataatatagtataattaagttctgttatatttatttgatagtttacaaaagtcgcaatagcattgccattagatataacgaatgttaacatataattaaattctgctgcattttttgattgagactcgttatctccttcgcttttatctgacttctcacccatttcatccttttgggattccttggatttttcattcatttctgcatcagattgattttcttcattattttcttcacatatattttgaagacattcatgtattagtaaatcaatcttttcatctgggtgaattggtttagttttgtcatacttaatgacacccatttgaacttgattaataaatagaccaattataaatgttgtaatgctaatctcaacattagtttcaagagcttcacctaaactgcctgtagtaccattatttgaagcacttgtagtaataaatgtatatattttattagcatttctataaatcaactctccatctaataccaatatattttcattttctaaatattccgcacatggtggaataactgcatctgcaaatggattgggattgcattgcgatttcctttgtttatttgttttcttactacctctacattttctatctttcttacatttacacttcttcatatgtatccctaattacaattaatataataatatagtatgaatcatcattatattatgctcactaaaatcccacaaaattaattcataaaaactttatagttcaaagcaatgtagcatattcatataccaaagtaaaagatttaaaaaatagagaactaattcatgtgtgagattttgtaagttatgttataataagtattatacaggactataatctaatgaacaatggttagaaaaggcgaactaactaaaatagaaatgatatagagcaaaaaactaaaaggtggggtaaaatgaatgcatttttgacagtaataccactaatacttattaggtatgggattttaagtataatagacaaagaatcacttaaacgtgcgggtttctttgctccattaatcggaagagaaaaagtagcattctgggtttatcaaattacaaccgtacttattttactatacccactattactcaaaatcaaaactgactctgattggttttacataggtttaggagtatatagtttaggaattattttatatgccgtatctatagtaaattatgctaagcctaaaatgaatggaataaatttaaacggattataccgagtatcccgcaatcctatgtacattgcatattttatttattttttagggtgtgcattgctaacacattccttgatattacttgcgttattaatctgttttcaagtatccgcacactggattattctttcagaagaaagatggtgtattaagaaattcggagaagagtatataaaatatatgaataaagtgagacgttatatttaggccgttgtgatataactctattattcaagttatggtttgtgttcttcttatattattcaccaaagaaaatatttgtaatgtagtacatatacaatattgagcattataggtggacaatccacctataattttcaaggctatatttcaacattatcttaaaacatagcctatttattaataatgaaatcctgttttttatccatttgactagcatacaatctaaaaatcctctactatgtaaactcccctatctatttttcatagattcttctattgcataatttttatcaagtgttataactccattatccaaaacaaaacatggtatccctattctcttttcatctttaacatcatcaaatagtgaattttcatcacgaattgcaacaaattccttcaaagcttttatatcttcgcaaaaatctctataatcaaagttaatatttttttcttttagttcctctatagcctttagtgtagatggacacacattacttccataaatcttcataataaaatatcctttcatttgtatcttttgctttcttaaaaatatttttactgtggttcatgattctttatatagataaacaatatataacttagacttatgaaataatccaccgaaagtaaaaacattgttatttcacaggactatgaaaatttcgctgaaagtgctaaattgaaggttgcaccactaatgcttgctcccaatttcattgtgacaagcattagttgaacaacctacaattaaaaacttttaacagctcattttcaatgcctgctacataaaaatgtttctactttctagtatggtatttattgcaaagtgcaaatcaaattcttaagttgtttatctatataggtatctagctctaaaattaaatttatgtggtaacttaccaaaatcataaatgttttgttccattttagcttatcaaactaagaattggagtatactaaaatgaaacaaacgctagcgaaaactcgactcatattcgttcgtttagtaaacaattcttaccaaatcaaagatgcactgttacgacccttgtagttacaaatatatttatgatttctagtgaagatacgaacttaaagtcttagcaactttgtaaatatattcatctaataagaagaatctaatccccatacttcaataattatttttttcaaaataattatatttatactttttgataccataaatcaaatttgaaatatcaaaataatgtacatatagatacaattacaagatatatttatactatgaaatatatccaaactagaaataagaattatgcttttgtaaccacaagggtcataatatgaaatgtttcattagaaactggaacaacagcatgatccttatttcggttagctgcataataaacagctaatttagctttcttttaaaaatcttttttttaatttttgctgaaattgtggcatgctcttatacatgctcattagactcactacaaccaacagtgtccatcctaatagtgatgaaaatgctagtaatataactaatattataatcaacaatattattgatatttttaagatgataccatctatacatttgagactagcaataagtccaagaagtgcattacatataaaaaatgtatttgcaattcctactgtccattctacagtaatataattgtagtgaataaggacaataagtatgcaatgaaatatagttaatactaataaagctcttttaggcgatctctctgattctttctttcttaaaaaagcaggaagcatgccattttctgctcttgcagccatttgtcttgtaacagcacctaatatcatgatcaatgtggcataacacaatccagccgctacaattcccataacaatataagataagttaccgaataaaggaataagaatcaaactcacattaatgtctgtttcttttgtaataatttgatttcctaaactgttctgcaaagcaaaagtagtcaataaatatataaaaataacagctgataaacttattttcatagcacgcataagcgttttctctggattcatgacctcttcaacataacttccaattacttcccaccctataattgcccaaaataatagcagaagcgtagatccaagagttgtaattggtggcataccacttggaaaagttacattatcttgctttaaaagattaaaaacactgcctataataagaataagtccagtaagtgaagatagtactaaagtaacctttcccattgcagttattcccattaatagcacagctatattaagaaataataatataaaaattacaagagtcctgtaattatttgctccctgaaacatgttacaaataaatccagaagccgtatataaaacagctacagttccaaagcagacagctgctgttaaataattcgaagataattccctaaaattttgtccaagcttctcaccaattaccacattcaccccttcattactcaaagttaatatgctcatttttgtaaatatgtaagcaaatataatacccataagcatagttattatccaagcaataatcgctttgtctccaatcatatgaatcgcaataggtggtaaaagtacaatacctgaacctaaaattggacctatcatcagtccacttatagaaatagtatttagttttttattcatttttcccctccttggtgttgattatcttattataagagggattaatccatttgtaaaattgaaattttaaatgcagcatatcaataattttgatgattaaaaattttctatttaacaaaacaatccaaatgatcttagttatgtctaagattcacttggattgttaaacctatttatattttgaaatttaaaactaattcagttaatttttctgctgtttctgcttgatcttgagctactctagcaacctgttctattgctttattagtttcatctatacctactttaatttcctccgaactgtttttagtatctttcatattttcagcaatagtttgtacaacttcagaaatctcttctgtagatgcatttaactcctgtgacattgatgcaatattttgtgataaatcactaatatatgcagcatcattttcatatttatttcctgtctcaatcaataaatcataatcttttttaacattctcattaacaaaatgtagtacctcctttgaattacctgatagattattaaaggcagcctggacatttgaaactacattttgaatattcttaacataatctgctgattgctcagcaagtatccttacttcatttgcaaccactgcaaatccttttccttgttctccagcccttgcagcttcaatatttgcattcaaggctaataaatttgtctgttctgctattgatgctattgattgtgcaattatacctatttcactaactacttttccttgctctattgcattaagtatattattttgcttttcttcatacaattcatctgtagctttcatagagttaattccagtttcctttacttcagtagctctttctttaatttcgatagactgatgactactttcagttgaattcgaagccagctgagttattccagaattaacttcttccattgttgaagccaactcttctgtaattgaatttatgccttgtatattttctactattccagatgtgttcttatctatgctttcaaaattgcttgataattcttctaacgtagcagataattcttcactagatgctgttacaccttgagcctgaatcacaatattttcaatcactgatttaattttttcttttgcattatttaatgccctaattaataatcctaattcatcattgtttttactttctattgaatatgttaaatctccgtttcctaaagcttcagcaaataataaaccctttttaatcatcatcgatatatatattgataatcctgtccctataataagcgccaaaataatccctactattagaattgcatgcattatatgagttgttgtacgatagttttcttttgcactgctataagcttcatctgcttgtttttggtttatttcaaccaagttatcaagatgttttgatataatttctgtggtttggttaatttcagataatttaatttttgcttctgaataattcccatttttgagtaactcaaaaagattgtctttttcagttgcaaacttatctcctaaaatagaattaagatcatcaaactctttcttctcatcagtcgacatactactattaccaaaagcttcaactacagctgaatttttagttttgattttatcaagttgttgtagcgctgtttgcaccttggaattatcctgttctagaactagatcattaacaattttaatttcaattaaaaaattctctttaaccgaatgtatttcatcaatactttttaaattatcagaatatatttgttccatactactctcagtatttaatagaccaaactttccgaagaaaccagttattccaattagtataaccatactcataaagccaattaacaattttgtttttattgataaattctttatcatcagtataccatctccctcttatagtaaaattttaaagtttataataatttgcagcttatttcaaccccttac

SEQ ID NO: 10 - DNA, 113134 bp, Clostridium beijerinckii
gtgtcaagactaccaaataattatttacatataaaaatatacctaacagagaatttaaacctttctgttgggtatattttatcacttaaattgcgctatcgctacgcgtcgattctttgacgcttacgcttagttggtttcattgttgatttaaactgtccatgttagtgcctattgtccaattttagtaaaattataaattagggcttttttcttatcaaaataattttctatataaatgcacaattcaacatatacataatatatccaaagtgctatcgtacctttaggggattctcatcctttattgtactacacagcattataaagttatctatatattccgttaaatgcttgtttttatgatatgaaacatagaacttccttgtaaagttatattcttctaaatttatttttgcgatttttctgttttttaattcgtcttgtattaagtattgagataaaagtgctattcctttattatgaattacagcttcttttatagaatcaatactcttgcaaacccatgtaacattaggaatgatatgcgatccatcaaaaatatcttgaagcattttttgagttctacttccaggttcacgagctattattggttctaagcttaattggttaattttaattgtttgttcagcaaggggattttctggatggcaaacaagcattagtttatcatctaaaaaatcaacatatgttaactcactgcaaggagattccatttgaataatggctacatccaaatcatatgataatatcttttgttctatgtaggagctatttccaatttcaacttgaatatttacagaaggataaaggttctggaatttctctaatattgggtaaatcaatttatgaccaattgtggtacaaaccccaatgcgtactagtccttgataggacagatttctcatttttaggttcatttgccctaaatcatataataattgttttgcatggaaaagcaattcctttccattagaagtcaaatatagttttttagataatcgctcaaataactttgtattatattcattctccagcgctgatattgactgactaacggatgatggggatatatataatttttgagcggctttactcatactcatttgagtacaaacttctacaaatatttctaaatcacgaattgtcaattgaaatccctcattccatatagttaagtatttactaatcattatataatattattcatattttacaaagcattatagagatgataatctaaaaacaaataagtgtcttgattaaaggggatgtaaattatgcaaaaaatattgattgttgtcattgatgggtgctctccagagtattttactttggaaaatgcaccaaatatttatggtttatgtgagcaaaagggatttataaaaaatatctatggtgcagttcctacggtaaccaatgttaatcatgcctctattctgtcagggctttggccaaatgagacacaaatggtaggaaatttcttttataatcacataacaggaaagtctggatttatacaagagaaaggatttatgaaagctactacaatattacagcacattaaaagtattggtggtaaaactgctttattgacagtaaaaggaaagattcttgaagtatatggagaagatgttgatttaggaattagtgctgaaaagcctgaccttaaccttttagagcagctaggcatttctatgccgccaaaaatacaaagtgtagaaagtagcaaatggattttagattcagcctatacgtgcatacaaaaagaatctcctgaaatagtgtactgtactactaatgattatattatgcatcattatggaccaaactccgaacaggctaaaaagcaaataagcgatattgataactgcatcaaaaaaatacacgaattagagacaacccgccagatttatattactgctgatcatggaatgaataagaaaactactcttgtaaattttcaaaatttatctgaacaagcaggttttaatgttgtatgcgtacctccaatgaaagatagatatattgaaaatcatgcatatcaagaaggtggaacactttatgtgtatatgcaaaatgcagatgaaatggaaaagtatcttcaatttgtgtccgctcaaatatcagttgacaaaattttgaacaaaaaagaagcttctgaactttatcatttgccaataaatagtataggagactacgtcatttttgcctctgaagattatgcatttgccgaaattgaaggtatttatttaaatactaaagacgtacgaactcacggctccctttatgaaagggaaatacctttagcaacaattaatcctgctgcatcacaagaaaagtatcaattcagcaaagatataacttcaaatattttgcaattgttatctagatagcagtgcagtgagaatagcaatattcatagaatattaatactaaatagatcttaacttactttgacaataagaaggactatgtatattataataacgaacaaaatatgaaaaattctgagatttcgctcgcagtatatgatatagaagatgcctggcttgtaattgctaacatcaaacggattttcttcgaaatgatatagggcatgaaaggtggtttaaaaatgaaaattcttatagtcggatattttactgagacctcaaaatcaaatattataaggcattttccagaagactggcacattgtaattgtccagcccggaaaagaaatgttgcatcatattgaagattgtcaggtactcatacctgaacatattaaagtagattgcagtctgctttctatagcaaaaaaattaaagttagtacagacgggtgcaggatttgacaatgtagatatagatgcctgcacgtagtacagcatttgggctgccaatgctgcaggagtgaatgcccaggcagttgccgagcacgtaatggcgctgatattgtcttattataaaaacataccgtttcttgattctttcatgaagaataagatagatgaaaatgaattgcagtatacaggaagtgaattaaaaggcaaaaccatcgggattataggctttggctccgtcggtaaaaaagtagctgagttttgcagggtctttgatatgaatgttcttgtttatgctagaaatcccgttgtacagtctgacgattttgtgaaaatgacggatttcgatactcttgtaggctcatcagacatagtaagtgttcatgtatccttaaatcagcaaaccaaacagctaatcaacaaagatgtattcaaaaaaatgaagaatactgcactttttgtcaatacagcccgcggcggaattgtcaatgaaagagacttgatagatgcattaaaaaacaaggacatttcaggagcatgccttgatgtgtttgaatctgaacctcttccaattgaaagtgaactccgaaatctaagaaatgttatacttactcctcatacagcaggcttgcctgatggtctcaaattccataaaaaaagatatgattttttcgtgaataatataaagcgtgtagagaatggtgaagagcctgaaagcaagctcaatcagttatagtttgggcacaataaaaataggagctctttattctactttgtatataaatgttatatacaaagtagataacacctttttatcatataaattatttcctatatatcaaaacctatttgaacttcattattctcctcttcaaatgctttcatataattaaaaacttctttcactccaaaaataatattattctgctgacaggtgtctttaataattttcattaatttttcatgattcttacttaacacctcataactattcccatattctcttatatattttccttttaaacctttaaaatgattatctaaattcttataataatattccctatttccatttcttaatgttaatccaataccaaatactacaattcctttaactttagcttctatacaataatctaaaattcctcttatatttttctctgtatcatttatataaggtaaaataggacttaaccagactactgtaggaattctgttatccctcattatttttaaaacttcgaatcgttcttttgttgtagaaacattaggttcaataatcttgcataattcttcatcataagttgttaatgtcatctgcacaacacactttgcttttttatttatacttcttagcaagtctaagtctcttaatattctatttgatttagtttgtattgcgagtccaaatccatacttatcaattatctctaaacattttcttgtattttgaagattttcttctagatgaatatatggatcactcattgcaccggttccaatcatgcacttttttctttttttcttaagtgcatcctctaatagctgcagcacattagccttaacctcaatgtcttcaaaaatatgatccattccataacaatgacttctggcgtcacaatatatacatccatgagtacatcctctataaatgttcattccattactactagataatataccttttgccaccacatcatgcataaaatcgtaactcccttcaaattaacactgtacaattaacaattaaaagtgattaaccttatcggattctttccaatagtttctgaaataaattaaatccttcattccaatcatctatattggattcactgtttatatgaccctttttgcccacagatactgtttcaaggccccactgtttgcctttttctatacaaaacagagatgaggaatattgatcattctcactataaattagcattccaggtagctgcaggttatcttctggcaaatgttcaaaggaatctaaaaaattcggaaattgttccttgtttggatcaggtggagccactaagaagactgctttcaagtactttcgtatcttaggcatagcttttacagtaagcaagcagccaaggctgtgtgcaaccaatactacatcaaagctatttcctcttgaaagattttctattaaatttttttcccattctttatatacaggataatcccattcctcttggattattcttttaaatccatactttttctcccaaatagtctgccaatgttctggcccagagttattaaggccaggaactatctttatattcattattaacaccccaaatctacctaactttttctaaagaattctactttgtaccaaattctaacatacatatatgctgatgtaaatgcagttattaaaagcaaatataaattgaatattgtgctttccttttgcatttaagcatttatttttagtattatcaagctacgtttttaacttgatgattagattattataccttcaaaatgatccatttcatgttgaattatttgtgctgtaaatccattaaacacttgctttttcttattaaagtttctatcaagatacataacctctatcgtttcatatctctttgtttttctaaatccaattaaagataagcaactttcttctatttcataaggcttttccttttttaatataactggatttatcataggtacaataagattgcctacagtaaatactaatatacgcttttttactccaatcatattagcagccaatccaacacaatgctctaaatttgctcttaatgtatctattaaatcatcaattactaccatatcatttttagttgcctcttctgatttttgtcctaaaaataatatatcttttactattggttttatcatactatttacctctttttcagttatattttttataaggaatagaatgtagttttaaaatacatcttataacctaatcctactaaataaatttgcataactatatactttgtataattaattataagttctttatttaatacacatctatgactaaaaaaattataacacaaaccaatgacacttttaatatcattggtttatgttttaatacttaatcatgtcctatttgttttgattctccatatatagggttcactgtaacagatatacgtaggactttctaagttatatctaacattagaatatcaatcgctaattttagatagattaaaaatttatttaatgaaaattttcatcagtttattataaagtggattaatcatatagcctgtaggactatgagaataccttttccctgtatttagttgattaattttttccatttcttcacttgataattcaaagtcaaacaactgaatgttctctttgattcttttgggatttgacgatttggggataataataattcccctttgtatatgccaacgtaaaattacttgagccactgttttttcatgatgatttgcaatttttttcaatactgtattttccagcaaagctttatttccttgacctaagggtgcccaagcttcatgcagaatcttatgtttagtaagatattgatgtagctcattttgtggaaactctggatgagtctcaatctgattaatcatcggtgtaatctttgagtttttcattaattcttcaagatgttgtatctcaaaatttgcaactccaatcactttgattttaccctgtaaatataaatcttccatagcatgccacgtttctaaataataaagtgaagcaaaatgaattaggtacatatcaaggtactctacgttcagatttttacaagttttttcaaaggctttcttagtagcttcataaccatgatccgtattccaaaccttcgaagtaataaaaaattcatcccttggtatctgacttttttcaattgctaatcctaaatctttttcattgccataaattttagcagtatcaaaatgacgatatccaattttaatagcttcacccacagcagtttcaaaatcttcccctttatttagtttatataccccgaaaccaacctgaggtattttaatgccatttactgcttttatttctttatttattagattcatctcttataccctccagaacaaattattttaaaccaaatcaactaaatatcgcctttagattctgccattattctagttgtccttccagcaatcacacataaattcttcaacatgagaaaataacctcttcatcagaatcaaatcgcttttagctggatttatatgatagaaattcatcgttccttgcttgactaaagttacaattttggcttcttttaatatttttaaatgatgcgaaacagctggacgtgacaaatgtgtccctttagttatttctccaacccttattccaggatatgttcctttcattaagcttaaaataattaattgccttgtctcatccccaatagcagctagcactgatctacattctttgaactcattttctagttgccttaatttatcttgttcgttcattatatatctcctttaattaaattgtaatcattagtgcttttccccatacaaacttcattcattcgcatatgtcaatggtttaatcttttaatccataatagcaaggcataattgttttatcaacatcgggaaagtaaatcgagacgaatatattattttgtcattaattatagtaaagtttttaacttctaggtcttttatttctagtagcctgttgaagttatttattttattatcaactcaaaattttcctatcttaaattatgtgaaaatccaggagtttttaaattcgtggccttcgaacccgcattattcaagcatattctgaagaatatatattctaatattctttaccataaatattgtttagaatatttattcttcaccatatttatggtaaaaaataatctgcgtatttatagccttgatgctagtatagttttatgaataaataaaatcattcctatttagaaaaaactcagcattttataatccgctgcagctgttcacgaatttgttcataatcatagtaaataaaataaatgagaatacaccaagatggttggatgaaggaattgcatgttatgaagtaaaagacaataatgaaaactggataataaaaactgttaaaaatggactagcaaatgatattgttcctacatttaaagatttagatacaggcgatgattttgaaacttttttcaaatatgatggatatcaatactcatatactatagtagaatcaataatcaaattatttggctatgacaagctgtgcaatttgataaaagaacctaatagttttgtagatgttttcggaataaccgaagatgagcttcataacgaatggattgattatataaaaatgaactacgcactaaattagactattagaaatttttgaacttacttgccaataggaaatcctttaatattatgtattaaatgaggaaaataaacttcctcatttaactttctaccatactttttagcttaaaaaaaccttattatcattatttatatttgacatttttaacttgtagtcttctaatgatatatggcctccagcaaattcattttcgaatatatgaaattttgttagcctatattattgtccaagctatacatagcttatgatttatatatattctttcattaattgatctaaaccaacttctgatgttaacttttcaatattattaaatatcttctcttcgtcccaattccaccattgaagcttcagtaaaaattcaattttttcatcactaaaacgctttttaataaacttggctggattaccgccataaatagtatacggctcaacatctttcactacagttgaatttgtagaaataatcgcaccatcaccaaccttgacccctggcataatagttacattttgacccatccacacatcatttccaattactgtatctcccttaaaaggcaactgttctactgttggagtgaccttttcccaaccacctccaaagatattgaagggataagttgtaactccatccattctgtggtttgctccatccatgataaacttaatcccctctgcaattgcgcaaaacttgcctattataagtttatctcccaggaattcataatgatgctctatattatcataaaatttctcaggagattttttattatcactataataagtatattctccaatctcaacattagattttttaggtagattacttatataacaaaccgtctttatatttgtatttggatatagcttttccttgtctggtcctgtcatagagtactcactcctttcagttcttttatttttaatttctgacctctttggaatcaatattatagtcaaatgaatattggttggtcctcagtaattatttttatcaagtttccacccttctgtctggtaatttcatttgacactatctacatcactataaaatttctatatatccttcagttccattcactcggattctctgcccatcttttatcagtttagtagcattctctacacctacaactgctggtaatccatattcacgcgcgataacggctccatgagtcatgagtccaccaatttcagtcactagaccttttattgatacaaataatggtgtccagctagggtctgtaaaggaggtgactaatatatctcctgcttctagcacagcatcttccatgtttaagatgacacgtgctcttccctcgattactccagacgaaacagctagacctgcaatcgcaccagctggaagattttctcgtttatatttacctgtaatgatttcaccatcagaggtcataacacgtggtggtgttagtttttcatttaatttgtgctcgtcttttcgcttgattataatatcataatcaagtttatttgtgtgtactacttcgcgaagttcctcaagagtaaggtaataaatatcttctttttcatgaataacaccatcttgtacgagtcgtttcgcttctttcattagggcctgcttataaacaaaatagcggctaatcataccgtattttgggtattcacgataacctataaaattcctgatcaagtcgatatttcgttttgtttcttttgccttttgttcaccatcaggtaactctcgtaaccgacttaataactcttgttctttattcaaagcttcctgtcgcccttgctcaaatttcattttgccagcactcggctcaaagtttttgatattgcttaaaatcatagggacaagtgtaattggtttttcgctaaatctagttctagtaatatctatttctccgctgcagcgcatcccaaatttcctaagataagacaagattgcatctctggtttcctttccaccataaaacttaatcacttcctccaaaaagttatcatcttttacatgttgtaaaaaatcaactatttctggataaggacgtatcacatctgccacatccattaactctagacccatttccgaagtaatgttgtttggtactgattgagaaatgatatcggctgcatttttttcacctaaccactcgttcatcttttcattagtccaaagcgaagcatttatagcagacataaatacagctgtactttgtgggtcaaataaaatcctctttaactcatttatatcttctagaataaaatcaattaaatctactcctgatttagtttggattttttgttttaactcctctatggatgattgactcttcttaatcagctcagaaacgattgtcggatccaattccttttgtggctctgaacctgcagctgatttacttttaatgtcgctctgttcctctttatcatttggtaagcattttatgaaatctcgctctattatggtcataattgcatcttctgtgagaggttcgagttgtttcatattatttaataagttttttctgccatctggtgaagcgagcattggtgctacatcaacaaacaaccttccaccagccttaaaccatcgaccaaaagatattaactcctttaaagacattccgagtggcttcaaaggatcggtcatcatttgttgatgccccacagataaatagacatgttttttttcatcattcgtttcaggaattggatataaagtagtgattggtcggctctgaacaatataaaaggtatcgtgatccaaacaccattctatgtcttgtggacatccaaaatgctcttcaatctttctacccatatgcgtaagtctcaaaatctgttcatctgtgagcacttgactattttgcatctcaggctcaatcgccaacttttcggtaccaccatcttttaaagaatagatacctagcttcttagtagatattttcttatctactatcttatcgttgcgtactctataattatcagcattcactaatccagaaaccaaagcctctcctagtccaaagcttgcatcaatagataccacttttctattacaagtaacaggatcagcagtaaacaaaattcctgccgccttagggaataccatcttctgaacaaccacagaaaggtgcactttattgtggtcaaattcgttttgaatacgataaattactgctctctctgtaaacagtgatgccaagcactttctgatatgttttaaaattgattcctttccaataatatttaaatacgtatcctgctgacctgcaaaagaggctgtcggcaaatcctctgcggttgcactagaacgtacagcatatgaatctttttcaccaagtcttaatataaatcttgcaatctcttcgttaataacctcaggtatagttatcccttcaattaccttgcgaatttcactgctaatttctcttattttttctatgtcttctactccaaaatgcgataattcatctaataaacctttaagttcttcattattttcagttatttttttatacgcttctgttgtaacacaaaaaccttctggtactaaaatttcagtaattctagataattctcctagattagcgcctttccctccaaccatggaaatctttgttttatcaatctcctgaaagctaagtacatatgaattcatacacattccccttcctcttttaagtcggaaccctgagtagtttaattcacttgctcgcactcttatacttctcgttaaaaaccatttaaacttttaattccttttctatatacgagtgaagcaatttctacgaagtgattctgttcctatgatacacagaataagcacatattataagcctgttatttaaaaatttcatatggtataataaagttgaggggaatagttgatttttataagaattaagagaatatattatgttaaattctttaacaccacagctgaataagttacatactctaactactttattctttagtttctttgtggttcctataatttttcttttcttttatcgttacaagcatatcattagtacatcttatgtaatgtattaccgaatctataaatatttttattccgaaaactataagaatgtcgctgaatcttctaacttataagaagtgaaaatttgaatattaaaaaactgtcatcaagtgttatctaatcaaaattaattcagaaaatgataaccccctcaacacttctgtcgagggggttaattgtcgaggtaaaacgcaacctttgaaatccactatctgcatttattatatctatcagtttaagcaagatgctagaatacccgctccaagcaatcctgcatcatcacctattttagccaatttaatatttacattaatattgttaaatactcttagcttaacttcattaattaatttttctaagtaattagaattgtttaaaataactgatccgccaagtactataacttctggatctactgtagttattatattagcaattgctttagataaatttatagtccattcatttaaaacgtctaaacagtctacgtctcctccactcgctttatcaaaaatatcttttgtagaaaattcttgtccacatttctcactgcctattctagaaatacttacaccactgcattgtccttctaatcctcctgaatttaaacctgcatgtctatattcatcttcgtttattatcatgttgcatacttctccagctatattgttaaagccattgactatttgatttttataaataaatccaccacctactcctgttgatagagtaatgtaatatacactttcagcatttttagctgcacctatcttggcttcgcaatatcccgctaaatttgcatcattatttacaattacaggtaattcaaaatgttcttcaaaatatttctttatcttaaagccttcccatcctcttaaattaggaggattgattatcactccatttcttatatccaaagggcctgggcatgctacaccaatagcttcaactttatatttattccatttttcttttatcatatttattaaattatctatattgcattttgctcccttttctacaatattatctattttaaatttatcaattaaattatattcattatctaaaatggcagctcttaagttggtgcctcctatatcaattcctataaaatatttcatttttaaatcctccttatttacttatcagatactcatacattttctcttatttaacattcacatttatcatcaaatatacttttcatctaggtgatctccaataagttatacatatattgatgctccaaatatatgttgatgaactccatcagcacaaatgtgcttttgcaatgacctcaagaatttatatctatctatatctttcatatatagctctaatatctatagtatctatttttttgctttatctatttctcttactgcttgaatatatttactttagatttattccttttttccatgagtaagaatatctttttctattctctcaagtctctgagtactagtatttccactcacaccactgtttattaattccaccttaataaaaataacgttcaccctctaataatgaaagtgaacgccaaaataatatggttcaactattgaataatttaagagaaagtttatccattactctataaatattttagtagtttcgctccacttctcaccagatagtaatactctaaagcctgtctcttctgaagacaattttaaatttggtgcattattcatccatgtttgtggctcgatacaaataaaatctgatgaagcttcattattccatactgtacaaaatttatagtctttaccaaactcataatataactttatatttttttctttatcctcaataatagcaccattaaaaggtgtaccttgaaaacttaaaggctgtactgtgtatgtatcgttcaccggatgttcaagcggaattactccaccatccctgtatttcttctcataatcacataaattaaccttattcccagtgggtaaatatcttgaattaactaaccacttatctcctactgataaagttaatgcataattttcttttttgctgtcagcttgaaatggaacattaaaagctgtatggaatccgactcctaaaggcattagtttttcactacaatttataaaggttattttttgttctaatccttttttagataatttataggtcatttggcattgaaactcatgtggaaaatacctaaatacatcttcattaaatgaattactccaaaaggatacttcaatttcgacatactcttcaatcttattaaccttagtgctagttactgtaaaaggcaatttatttattattccatggtaatgattatttcttatagtgtcgtttattggaagttcatatgccatatcattaactgaatattttccatcttcaattcttcctggtggaaataaaattggaattccaaatattattggcttactcttaaattcctttaatgtttctggagttcttatgatattgcaacctagtactttatgctttaattcaataatattagctccgattttaggtatcatgactgcttcataatctccagcagtgaaatatactgcttcttctccagaccacgttatcttttctattttcactcccatacctcctaccataaaatatttctgtgttattataattacttatatacaacagtaataattttttcatcattttccataaacttagtttctacatctattatagaaagaagttgttcctttgtttgcatgcctgttaaatcaagcatcttctctttatagaataggaatacctttggtatagtagcattagcatcagaatatattgtgtgttgatcaagaaaagctacaaaatctgataaagttgcatcttttctaaacgttaagttatatgcattttctctctttaaacgaacgacgccttctctatcaaccatacaaatattgtttaatgtttttttgaacagtccaaaaaaagctttcttttgagtaacagccttaaataaataccatcttcctgtattagatactaattcaactgttgatttttcaacactaagtgcacctgatactacttccttcatatcatcttctgatgcaacactttgagcaaggtcttttgatctaagttcagttgatcctgttgcaattgctctaagtatatttttttgcgaatctatttcgatagttacatcaacagtagcttcatttgctccagactgtactattttttcaattatatcttctctaattttcttaatatcatcttctgaaggagcaactaccgatctttctatctgctcacgaaccatagcaagcgcaacaccaattgtggatatgtaaggtgcattttctgctacctttgatttaaatccacctttatcagcaagtgcgtgaacaagcacagctccacttccgccaccacctacaagtgtaatgaattttctatctaattcatattcttcaaccatttcgttaacgactttcattactttatttaccgctatatccataacttgcttagctgcttcctcagcagaaatatttaagtaatctcctaaaacctgccatgcttttttattactttccgcattacctctagcataatccccctctggtacataacctaaaagatttgaagcacctgcaagtgtataagaaaattcctttccatttgagcactcaataattgcataattctttggatcgctttcccttggacttatgaatttgattttaggttcttggatattctcaggatctgcaaaacattcataatccactccagctatatgtgcacttcttggtcctacatcactaattttattattttctatttttatcatactaccgcctgctaccgctaaagtacgaacatcaagtgatcttaaataagttttatgtccaccaacctgtgcattttttatcattacctttccatctttaataacagaaatatctacacttgtacctccaacttcaaagaatattccatctgaaattttttcatacataagagccccagcaactcccgctgcaagaccagatagcattgtaagtataggacgttttctcacttcatcaacgctcattactccaccatcacatctcattatcattaattgagattttatttgtgcattctttactgccttttcggtcatatttgctgtttccatcatcttagggattaagctcgcatttactactgctgttcgtgttctcgttttcaaaccatatagctgtgatatttcatgtcctcctgttgcatatagtgacttattattagctatctctattacatcctgctcatttttaggattgtcaacactatacgcttctgatgcaactataacttctgcaccttgactttgaagttcattaattgatttctctacaattttgctatttaaattcttagaatctatgaaagtatgatatgtttttaaatattttttaggagccaattctatatctgctgtatttgtctcattttttgcacttccagcatccatacctgttcccatacctattataccaacttgtgctacatccccttcaagcaaagcattagttgcttgtgttgttccatgagcaatgaacaccacatcatcaggggatatattattgtcagtcaatactttatttattattttgactataccacctgcaactccctctgcttcactatgtgttgtacttattttttgttttgcaataatttcatatgtatcattatctattactactgcatcggtaaaagttccacctacatcgataccaattctaaccttcttagccatacaatctcctccttaacctcctggttttatcacaaattaattaaatatccttatttaaaggatatcatttacgcgaatcattgtaaatagtttttgaaattttttttcattttttccggatattttggatacaaagattcaaaattatcccttcatttaaaatatacaagatttatgatttgttttccgaaatttattataatgattttcattaaataatataggtaagattaatagacttaatatagataagacttataaacagttaaaaaaaagactggagttgaacttaaatcctataccagtcttgtctttagccttgcatcttaaagattataatagtaattactgtaatcttgttcactttcaaataatgcatcgctatccaatttcttttgcaaatacttcttgttagatttaataagcattcctactataacatcaatagtaaacagaaaagtcatattatctgaaataaccgtgttattttcaatagctaacttatctgaagtaattatcttaatatctgtaagttcactaagttttggagaatcataacttgtaattgtcacaatcttagcattattttgtcgcccactaattaaaggttcttgaatatctcttactgatatattacgtgttatacctataattaaatcatcttgagaagaattagcactacagagcttcatactatacacatcattataagattcagcttttattcccatcatatttagtctttgtttaagttcaatagccgactgccatgaaccaaatacactaaatatgttaactttcttagcagatttaatcatttcaactactttaattaaatccatttcatttattaaagaacatgtattgagtatcaattcattataatctgaagctatagaatcaataagactattgttatctctactcttatcatttgccttaagatttcgataaaaattatcttgagctaaagctattttaaaatcattaaatcccttgaatcctatttttttacaaaatctatttatactagtttcagatacttttgtttcaattgctatattagtaattgtattattgataacaaattctgcattgtttatgacaaaattcgctatttcattttcactaaaagtcaaatttttttgtcttgaaattatctttgcaataactgctggaacagtatttctcattaaaaagccctccctgattatccgtatattttaacttgaataatatacagaatttaatcattcctaaaacaatactatcatatattatatcaaattgtaacagtctgttcaaataatacgaattttacaaagtactgtattatagggggttaagctttattagtagttataacatattattcaattcttgctctaaacaaattattattttcttaaaatcatctaaagatattttacccaattctattaaatataaataatcatatatattaggaagaaattttgctcctaatatttccttactaaaactatgagcagctatttcagaacactttatgattgaagatttccttttaaaaaaaacaaaattcattaatgttacttgctctaaaagttcatttgttggttttttttctttgtattcaagaaaatgataaaattcatgagctagatgcatattaaatacatcctcgtaacttaacttttctttaaaaaaatccaccttattgcatgtattcataagatcaattaaagagttttcatatatttttataatattttctttcttcgaaaaacttatttctgccctaaatttcactccataaaatgttcctgatttttttactatttcaattttaacaccattatcttcgcatagttttttcagatctttccccaaatatttttttgcttcaatttttcctaaaaataatgaatcgtcaacataatactctattttatctttaggtatcttttgaaatagtaaatcattttttaattcagcataagctaatgttctatcatttaattttcctaagacatcaaacaattcttccatattctcttccccttgataatatattgaatggaatcaccttaagtattccattcaatatatattattacaatgttactacaaaacttgcaacaaccatagaaactcctactgctataaccagccaaataatagttttctttaagatttcgtttacatcagtctttgtataatcagaaacccatacattatgagagttcgttggatcacaaactgcttgaagattactgtttacacgtaatgcaaccattgcagctactggattcattcctgctgctacaagtaatgctgctattccacttcctaatccatatatattaaaaggtcctctatatatagctaatggtgatagtaatgtaaatacaagtatatatgttaatggactatgaggaattatagtttcaatcattggcttaagtatcgctgcaactggttctgccataacggcatttaataccattcctataccaattaataaagctaaagctcctgctgtgtcttgaataccttcaattaaggcacttgataaaacatgtactggtctctttggtgttgcaagtatcaatgttattacaatacctaaaacaactgaaggaactattgataattttaatgtaaaggcaaatattactggaataattgggctaataagtgctattgatctaacattcatattatttcctaattgcccttcattatttaatggcattgaccaagccttttttaattttgcacctttactgttataataaagaatagtaactacggctacaattataagtggtactgcaggtattaaagaatagtttgctatttgttctgtagttaattttaatacatctttgtatattgcccaaccaccaacatagaaagttactcctattgcattagcaaacaaaagcactaatgcacttacaagtggacttaatcctgctgtcagcattattggtataatgattgttcccacaagaattaccattcctaaaccacttgctgctgagaatattattgatgctgcgattaaaaaagtaagtgcaataataactggtttatcacctgcaagttctgcagcttttcttataatagtttttgttataccaaccttatttaatatttgcccaaaccatgcaccaaatattaagccagcaatagctgaagacattctcattgaaccagcctctaatacattggctgtaattgtaaattctttaggatcacttgacattattggaattcctgcaattaatgcaaatatgactgccattagtggcaataccaaaatcgtcggtaactttcttgtcatcattaaaataactgaaactaagaatacaactaaaataccgattgcttgtatactcattctaaaacctccaaatataaaaatttattttttaattagtagttaactttttataataattttaaacatctaaatatgaaccattttcaactaatctttcttgtacttccttaacatcaacattttgtactgaaatcatcttctttgctgctattgctgctgcagtacctccagcttgtcctatagcacctactgtaggcgttactcttattgctgcttgtgcttcaaaagttgcagaaacacatcttccaacaacaataagattatctatattttccggaactaaaattctaagtggaatgttatagtaatctccccattcaagcattttactcgcggtgccctctccatcaggactatgtatatcaataggatatcctgaatgagctattgtatcttcaaacttttctttattaagtaggtcttcagcagttaaagtatacaaacctttaatttgtcttgaacctcttacacctatagatggaccactttgtatgaaagtagcattttcgaatccagtaaggtacttcttaaagaaggcttccaattccttgcactgttttcttccctctatttcagctttgcttaggctccatggatcagtactatcacaccctaatatccttgtagtgttaactataatctctcctggattattagtttcaaagaaaagtacatcttccctttttattgatatctcacctttttcttttgcttcgttaaattccttaacaaatcctattactgataatcttggcaccttgtctatagtagtaacatctttatgaattctggcgaaattctcaggatctttttttataaattcctttaatttttccatattcacatctctaattttcatattcaaagtcattggctgagctgctccatccttttctcttcctttagtaaaaggaatacctgcaaatgctccaagatcaccgtcccctgtcgcatcaatgaatattttagctttaatatcacttaccccagccttattacatatctttatactttctatcctcccattactcatttgagcaccagcaagcatagtatgatataaaacttctccaccactttctaatagcattgtttcaatttcgtatttcattgcttcagcatcaaatggcgttacggaatacgtatacatgctagagtctaaaatatgacctggagatttacctgactcttttaatctttctattaattcatctgtgattccacgaataacttgcttatcaccagcatggaatgtcatcatcgggccaacgcctgcacctgttagcgttccaccaaggaaaccgttgctttcaattaccaatgttttagcaccttctcgtgaagctgctatagcagctattgaaccagaaaagccgcctccagctataacaacatcataatttttcataaaactcctcctcttgattatatttaagcattgaggtatttaatttaaaatatctcactaaccttaatattactttaccacattttttcacaatcgtaaacagtttttgaatatttttttcatttttttcatttattatgtttatttttttcataaatgcatcgctatgcaaaatttaatgattttttcactatttaataaccctcactaaccttggttatttggtaggtatctagcaattctacttctttaactttagctccactttcataatcaaatatagattttagagctacttgtccaaataaattttgcctttgagaaattaaaatgtccactattcctgctttaacagcttttatattataatccgtattatcaaatcctataagttttttatccattgaattagatgatttctttaaaagctcagcaacctttataaagtgtagatccaatccagctataactttaacgtcagaatacttatttaaagcatcttttagataactaaatctttcatttatatcacaattatttatttcaacatcaactattctaatatctgaatgagtatgcaagtactcttcaattgcttttattcttatgtcagctatttcactttttctaatagtactaagtattacatttccctttcccttagctacctttattattgcttgcgctacactaacacctgctttataattatctgtcccaatgtaggctaatctattacttccatgtaagtcaccatctacacaaatagttttcattccttttttacttaactcattaactatcggactaataagcttcgcttcccatggatgtattatcagataatcaatgccaccatctttttctgtcaattcattgattatagctacctgttcttctggtttacttttcaaatagttttgtggatacctaaccacaagcttatatccatattttttagcggtttctttagctatcttaatcatatttatcatatatggatcactttccggtaatattgtcacaaaaccaatccttttttctctattcttatcacattcaacattgtagtgagctatttgactttctacactatctatcctactttttaactttttagcaatatccgataaaataatcatcgaattcttttgatgcatgcttacctcaacagcttctcctgttgaggctgcagtttcctctgaaatagctgcgatattagtaatatcatcaattattgaattttttaactgctctaacttatccatactatcttttaccgcagaatactgattagtacattcgataatacaatgatctatattattaaaagcactattaacattcttcacagattcaagctgcaaattcaacttatcttctgtggaattaattattgtttcagttgaatcaatttccatatttatttcacttacaatattttttatctcataagctgatttaaagcttctatctgctaactttctaacttcagttgcaacaactgtaaaacctttaccctctttgccagcccttgctgcttcaatagatgcatttaacgctaataaattagtctgatctgctatttctgtaattactgaaactatttgattaatattattagattttaattttagcattcctatactattagaaacattggtaaaagcatctctagtttcagaacttttagttaaagtatcatttacatttgtactgccatgcaaacttgcgttttctaatagctgaatcctattctctataactttcattgcactgttaacatcttcaaatttaagtgataatccttctactaaattcatacaactttctgtttcacctgcttgttgctgagatccttcagctactaagtcgttaaggctcattaaagtttttgataactcttcggtctcatctgcagtatctattactgaatcacccaaggctgatatttcagcaacataacttttaaaaacctttacaagtttaataaattcatcgataataaatctttcatctgaacttaaatccttattttcatcatatttcaaattaccagttttaattttttcaattgcaacatttctacctatagatttattttctttaaatttgcaacattgtaatataattaaaaagattgctcctaaaactccaataatacataagattgattccaaatacaggaataacttactcaaaataaataccagaacaaatagtattaacattagcagcatattagttaaatctttttttatatgaatcatttcttttcccccgttcattattattttaaaatggcatctctaattgtaagatagcatatttttttaccaatgtaaacattatctgaaagttattttctttttattcggattttttgccatattttttcttaatataacaaaacttttttattactcagatatgcatattctttaatatcattagaatttatatttttcactattttcttaaggctttatttgtatgaattcatcatgtggtaacctttaggaaatattttatctttgtgaattcacgtcgaattaaaataacccactaaaatctaaattctagattttagtgggtttcatgatagatgcaaatcatactaactctgttaatactcttaatttttactacttaaattactttttgctattattgaaccatttaatcgttgctttttcaacctctttaggaagctttttattatatacttcatcgtataaccatgccaatgatttttttcttaaatattttctcatttcatcttctgcttctgacattataacttttattaaacatgtacattttgtatgtgtatatgcaaattatctttatctactaatatattattttgcgtaatttatgcacattgaaggaatgattcgcttccttctactgcttcaacaatatcccaaaatgttatttcttctgcactgcgagctaacgcataaacaccttttacaccaggtatgattttataattcttgactcgcttaattttgtatataccttttataaatacgtttctgagataccttaaaatgttgccaaatatcttattcccactgatttatcttcctctagttttatcatatataataagcaatgtattgcatattatactcctactaaaaatttcatatggtataataaagtttaggggaatagtttatttttataaattaaaacatttcactcctagaaatcgctactctttactgccatgtgatttctaaaggatttctatctaccagtcttttaaaattataaagtggatatcctactaatagcgcacccgttactaccctacctttagaaatattcagcaatcttaaaagaggttcatattctgccatagaacaatattcaaatagttctgaccaacaggttcctaatcctaatgtttgtgcatataattgcacatatgttaatgaaaagtgtgtattgtcgcgaccaagttctttttgttctcttggagctgttgcaatcactaaacatggagcatctcttaatattgtatctttgttatcattacgatactgtgctattgtcgaaacagtattctgtacccacggcgaattctttaacacaccattttctatagattcctccgtccagtcagctataatcgaagtaatttcatgtagaatcttatgattatcaataacatgatacgaaagtccttgagaattgcaagctgttggtgcaaatctagctatattaagaagttcactaattatatctcgagatacatcccttttctgaaatgctcgaatagatcttcttgatctaagaaaagtggccgcaatatttgaatccattaacttttctttttgaatttgcacttgattatctaatggagtttttgtgctgtctaaagcaccattgggacaaacagccacgcaatgaccacattcaatacaaagatccctgtctactttgggtcctaaatcactcatcaccaatgttcctctacatattttcacacacagaccacatttagtgcatttttcagaattaactttaataaaattattcatacaattctctccttcattatattgttttacttgatttatatattttggggaaacaatatttctaacctagccaccatttcttttaatatagtaaaatgaaaatctaataatagaggatctggaagtccagttttatcaaaatcaccatctattttagctttaacaattgttataagatttttttcactaatatctataacctttaattcaagcttagctgcaaagtggtgctttatactccattctcgtattttatctaacccaatatattcttgaccttcatcaattacaattgcatcttcagtgaaaattgatataaatttctttggatctgatttattggatgtattaaaataagtttcaataggttcttgtaatttcatattcataatatctctcctttataatcctattctctaataattatttcatataatcgatctttctaactataacaagcataacctgaccacatcatgtcaagttataatcgctgaatcaaaatgaatataatccactgtataactgagaaaataaaatcacataatattacataatgttatcagactagaattcctatttacctaatttccaaaagatgaaagtattaaattatatgatattacctatctccttataatgattttgcttaagtaaataaataccattccaaaacttgacgtgatgttgtcaagtttacttaattatactgattaagtagataaacttatttaaagggaggtatttttaattatgcaaaatactttatcatttgatattaacaaagaacttgatggtaaacgcgtacttgtaacaggtggaactaaaggtattggtagatcaattgttgatcgtttgcttaatgcgggtgcaaaaataataacaactgcacgaactatgcctaatgatttgccagattctatagggttcattcaagcaaatgttagcacaccagagggtactgagagaatcattaaagagactcttgaaagactcggtggattagatattttaataaataatgtaggtggttcttcatcctccacttctggagcattaagtttaagtgatgacgattggttgcaagcctttaaccaaaatcttttttcagctgtacgcttagatcgtggttttctgccctctatgattaaacaaaagaaaggcgtaataattcacatatcatctattcaaaggagacttcctgggataatgactatgtcatactctgctgctaaagcggccctaacaaattacagcaagaatctagctacgcagtttggtggagatggaatacgaataaatacagttgctccaggttttacagaaacaaaagctgctgagcgtcttattgaaagaatggcacaaaattccggaattgactataatagcgctcgtcaagaattaatggataaccttggcggcataccacttggtcgtccagcaaaacctgaagaaatcgctgaacttgttgcatttcttgtatcagacagagcatcttatatcactggtagtgagcatattattgatggcggaataataaggactatatagtctataaaggcgctatactaaataattcaacatagacatattgtattatttagtaatcactagattagtatcaataactttgtagtccttgctactcgtaatagcttatatatcatgaataaaattgttttctaaatcaatggtcatgaaatcgcacaaactacattaaatattttaggaggtaaaataatatggttataaacaatttattattaaaattaaagaatagagatgctgataatattaaaaaaactcaagaaattcttctaagcatgagaggaaaaatagaagttctgatagacatacaggcagaaataaatattcgtcctggtgaaagtaattatgatataattttgattacaaaatttgcatcattagaagatttagataaatatcttattcatccaaatcacttagaagttgctaaatttatcggcagtgtcttagatacacaagcatccgtatgttatagcttataaatagtaacacaactacctacatttaaaaataatagttagtacatttaatactaaaataagaaatttataccttcctaattatcttgaaaaaagttaatgtaggaaggtttattaaagttagaaattaattactaacatatcttcattattaactttatagaaaatatgaatatatatgttgcaataataaatttacatttaaaatttcagttaggtaaggcctaagtgaaaaccaaaatgtagaaatccaattacaacatatatagtattatagatcagttaaatttaaaagtatggttatagttttttgcttcaccatataacctttaaatgagagtagtattaaatccattatattcttaatttttactacttaaatcactttttgctattattaaaccattcaattgttgctttttcaacctcttttggaagctttttattatatacttcattgtataaccaagccaacgatttttttcttaagtattttctcatctcatcttctgcttctgacattacaacttttattaaacatggacattttgtatgtgtatctggcagattatctttatctaccaatatattattttgcctaatttccgcacattgaaagaatgattcgcttccttctactgcttcaacaatatcccaaaatgttatttcttcctcactacgagctaatgcatagccaccttttacaccaggtatagattttataattcctgctttgcttaattttgcatatactttagataagtaagtttctgaaataccttggaatgttgccaagtctcttattcccactgatttaccttcttctagttttaccatatataataaacaatgtattgcatattctactcctactgaaaatttcattttttatactcctttggtttatagtcttttattaataatatcctattatttatccccattcaagataatcatatggtatgaagcatatgttccctgccaaatatttatattgacaaacaaaagaaataataatattataattatagataacagttatcgacgataatgcatatctttattttaaaaggaaagaaggaatatataatgtttacagaaaaattttttgaggtattaaatcatgagggagtggtttctattgtaacttgttcaaataacgaagctcatgtcgctaatacatggaacagttacttaatcattgcagaaggaaataaaatcttaatccctgcagctgccatgattaaaacagaagaaaatgttaatgctaatcctaacgttaaattaactcttggtagtaaagaagtgatgggatacaattatatgggaaccggatttttaattgaaggaactgctaaattcttaaaagatggagataattttaatctaatgaaagaaaagtgtccattcttaacaagaacattagaaattacagttacatcttgtaagcaaacattatagttttctaaatgtaaggagaaaattatgcctagaataatcagtaaatctgactgtgtgggttgtgcaaattgcgagcgagtatgcattgttggatgcattacagaagatacggataagaaaagaagaatcaatgaatctgcttgtgttgactgtggagcttgccaattagcttgccctagaaaatgtatttctcaaaaataatcttactaaaaagatgattttatttcataaaaatagaacaattaaaggcttggtataatctaaaaaaatactatacaaaacaaggttgggcttaaaatttaagcttccaaccttgttttttatattcataataagcgcataaactttgctaggtatataactttatgtgcttaaaatacattgactagtataacgtagattctccatcttcagagtattatttgaaagcacccttatattgttctggataatcaaaatctatgtttctagattttgcttcatttaacacaaagtatgggtttcttaaaagctctctgccaactgcaactaaatctgccctgccattcgatattatttcctcagccatattaatatctgtaattaatccaacagctattgtaggaatgttacacttttcttttattatgcttgaataatttacttgatatcctggatatacatttatttctactggaattaatcctccagtacttacatgcactatatcaatatattctttaatttcatttataatttcaatcatatcatttagcgttattccaccctctttataatcataggctgatactctaagcaaaattgctttctcttttggccatacttctgtcacagcttccaatatttcttttagaaatctgattctgttctttatatcaccaccatattcatcttttcttaaatttgataatggtgatagaaattgatgtattagataaccatgtgctccatgtatttctatagcatcaaatcccgctttatctgctcttttcgctgcttctttaaaatttaatacaatttctttaatatcatctctagttaattccttaggcaatgtgcttctttcatcaaatttaactgcacttggagctacagcctgactagctgttcctgtatattttcttccaccatgatttaattgtattgcaattttagaaccatattttttaacaccattaacaatttttttcagtccatctatatgcgtgtcatcccaaatccctaaatcattgtctgttgtccttccattttcaacaactcctgtagattcaagtattataagacctactgcaccaatggctctgctaacataatgagtgtaatgaaaatcatttgccataccagtctcatccgaagagtacatgcacattggtggcataacaattctattctttaagttcgtattttttaaagtataatttttaaaagtattcataattataatctcctttttatttaaatctcttgcttattttcattatattatctatactatactttgaaaagtagtgatattttttttatataatttcaaaaaagtaagtatagtgaaaaatcaacggctgaaaggagttttatttatgtcagaaatcaaacttgaacgaggaaatcctaatgaaaaatgtcctattgaggcagcaataaatattataggtagtaaatggacatttctaataataagagatttattgatagatggaaaaattagatttggagatttgttgcgctctttagatgggataagccccaaaacgctctcccttagactacgtgaactagagaaatttgggttagttaaaagaatagtttatccagaaattcctccaaaagttgaatatgaattaactgaaaaaggtaagagtttagaaactgcatttatagagttgaagaagtggggacttacaattttagaatagccaaaaattctattatgtatgcttttttccctataaactctttctttaataccaattaaattaggcaccttcaaaaattgctaacattgcagctattctttgaagatgcctaaatatataaaatatgacgctaggcattaccctataacgctaaattatatcttttttaaaatagttcatcaatcaactttattttttatcatttagtatcatttgttaatcattattatcattatatacttttttaaatatctattcaatatattttataaattaaaagaataatgttataatattaatcaacaacaatactaaacgataatgattggtgaggtgcctaaatgtttactgaagaaagactagaacagattttaaatatacttaataaacatggtagagtgaaagttaaagaactaagtgaacaatttaatgtttcagaaggtatgataagaaaggatttacaaaggttagagaaaaatggagatcttcaaaggacctatggtggagctatattaaatagaaaaatttctaaattaagctctataactaccagaatgacagttaacttaaatagcaaagagttaatatctaagaaagcttttgaacttatagaggatggagatattatttttttagagtcctcaagcataaattttttattagcaaaactaatagctaatagcacaaaaaaaataactttgataactaatatgtctataattccaccgcttttcaataacaatgaaaccgttgtattaatatgcataggtggtgtatatgacaatagaagcggcggagtcttaggctcagaagcaattaagagcatatctaaatatacttttaataaaggttttttaggaagttccggtgtaaatttaattactaacagcgtaggtacttctatgttagaagatggtaatcttaaagaacttatagtttcaacaagtaaagaagcatttttgcttgttgaaacagaaaaatttaatacagatagtctctataaatttgcaactataaatgaatttgatgctatagttaccgattcaaacatcactgacgatattagagaacagttgaataatttaactgttaagctaatataagattgaatacatactatagggttccacaatgagaattgaacttacgtggatatcagcctaaattgaatatccatatagtgtatgctttctttaatgtaaaaaaagaaagcatacatatgtttatgtaaaccaactacatgtatgcttctaattttttttgcagatacactatattacatatactatttatgaaaaagtagtttattatacccaatttttatataaccaatatgaataataacatggaattgctacaactactaataaaataattaaagttaataaagcacttttcatctgtatacagcctaagattatcatgcaaataccgccaaatatccaaagatatcctgccatatgatgagttttattccaattcatttcactatttaatgtccatggtaatctaataccaacagtatagttttgcttgcattttggtaagtagtttccaaccgctacgataataactcctacgactactgatgtaataatttgaataggaattttatatccaagtgcaataaataaggttactggtactaatacgactgaaataattggagcagaccactttcctaaatacttcaatgcagatggtgaattcattttctttggatcgttattaagcttaaagtgtataaaaatattaattattgccattaaaaccggcattccaaacgctccaactgcttttggcacataattatttggaacacctgcataattaaaatgaataggcactacttcaggtaatttatcatatactccaaatgaaagaatcaatggcaaaaaacaaataatagttgtaatccataaaatattatcttttttcatcttcattccccctaaattgcgaaaaccaaagcattacttcttcaaataccgatacattgatttcgtaatatataaaatttttgtattttgtctctaaaaccaaacctgctttttttaattgagatatatgatatgaaattgttgcacctgtcatatcaaattcctttgaaatttccccagctgattttttaccacttttcagcattactaaaatttctcgccgaaccggatctgacaatgctttaaaagtttctggaaactccaaattatcatctcccttttatattctatttagaaatatttctaaatagaatatatcaattcttatcttcaaagtcaatatctatttagattattttctaaatagatattacttaaaaaggagaacctcctctatctagatttggttctccttcattatctttttatttaatatttattgtaaattcatctccaacttttttatattcatcaaatttaggttcctcaccaccttcttctggcatttttactgcataaggtgtcagaattaatttacttgccttttcactcatatttccaactaatacattttcgtattttagtaaaaactcatcttttgttccctttgttaagtcaaatagtactttattacctaaatcatcatatccttttaataaaatagcgtatgttcctctctcgattgaattattaattattttaccatatattttttgtcctaaagcattatctgtatacttttctaatatatatttatctccattctcaatattaaatccataaccaagctttacagttttagtatcaattttcagcctatctccattagttttaaattcaaacttccaagttccatttatatcatcagtataatttaccatcattttggagtatacaatctttatatttaaatctccacttaaatccatgtcttttattgaacctaaatcatacccaattactgcttgtgtagtattatcatctattttttccataccaccgcctgctcctgtaagtttaactttcttattatttatataaagagtcatttcactatcccaagattcgtattcttttaaaattctatctgagcttatatcagtagatataagcagttcattatcatctaacactacctcatttaatttaactgttactccattgtctataacagatttgttgactactgtattataatcttctaaattcctctctattcctaagaaacttgaaatactttcgctgaataaatttatttttgatatggcgtaagctcctgtatttccaaaagacataccaactagtactgctattattgcagctgcagctattacttttcttccaacattttgttttctactctttcttatagatttcctaatattctttttaagtgattccttttcaatatcattaaaatcttcttttttgtattcatctaaatcgatgtttgcttcattaagcagactatatatgttattcttcatgcttaacacctcttctattatcaatattaaaaatatcttttattttctttttcgccctagataatctattgtatataacttcttttttcattccatattcgttgcttatttcattaatgttcatctcatcaacatatagcttataaagcaaatttctatccttctcttttaaacatccaagcagcgattctacttcattacttaattcattttctaaattctttgactcaaccccatcttcactgatatttaaatcatctatattttcatgttgtaagtcttttaaatattttcgtttgtaatcagtgcatttaaacttacatataccagccacccaatttttaaattcatttttactttcatcaaagctatttatgttgttccaaatccctaaaagaatatcatttatacattcttcttgaacactattgatcccatatagatgctttcctacaatagattttataatccaaccataattatcaataacataatctaaggctttttcattcctatttctcaattccttaatataattatcttcattcactttcattttctacctcttcccataatgcaagcttgcatttagtaagtttgtacttacatatattaattcgtataaaaaaagaaaaatctatcaaaattataaaataattttaacagatctttctaagttctttgatatttttactttaatacgcaaagtcccattttgattatatgatattgtttattaaaaatataatttctcaaaggtatatatatgttgcaattctcaattcataattagggctaaaattcttgcaatatttttgaagttataatgaagaattatttttgcaatatatatggctttaagtaatctttttctcaatcacattaagtattgcatttactactatagctaagcctgctgacattaaggttccccatagtatcttagctgtatttactgttctaagtccgtctaataagacgcttccaatcccaccagcattaatagaggctgcaattgtagcaatacctattgtagatactactgcaagatggattcctgcaaagattggcttagtaactaaaggtaacttgatttgaaataatatttggcttttgctcattcccattccagtcgctgcttctacaatggaagcatccacattattaagcccatctattgtgtttcttagtaatatgtactgattataaagtactaaaactataattgcagtaactttgccaagccctgttattggcactaaaatcgcaaataatgctaaactaggaattgaatatatcatagcaaatatattaaccaacaatttagatgctatttttgaataagctactaatatcgttaataatgctgctaatattatagaaatcactaaagtaattaatacaatttctatatgtcctacaaaggcttttaataatttatcaggatattttaataaatagtcaatcataaagttctaatcctcccaaaatacttcctgcccattcgcgggattgggcacaatcaagaaaataacaagttcatctgccagcatattttccaccatccttcgtcggcagattgtcttaatagtcccactatgaagccaatctacttcctcgcctaatgaaaaatatccatgccagctttggacttgttatttaccttcatgtgccttaattagtgattttacaaaatcatttgctggattttttgcgatatttcttggtgtatcaaattgctgtatctttcctttatccattattaacactttacttccaagtttaaatgcttcattaatatcatgagttacaaacagatatgttttctttgaagtattataaatctttaataactcatcttgaagatttattctatttattgcatcaatagcaccaaaaggttcatcaagcagcattacatcagggttaactgctaaagccctggcaagtcctacacgttgctgctgtccaccagataattgggctggatatctatttctaaactcctttggctcaagcccaacaagttcaagtaattcgtctactctagcttctattttttccttaggccacttaagtatctttggaacagttgctatattacctgctatggtcatatgtggaaacagcccaacctgttgaattacataacctatttttcttctaaactctactggatctttactactaatatcctcaccaaaaaattcaatacttcctttatgtggatcatacaatcgattaatcatcttaaggagtgttgtctttccacaccctgaagatcctaaaattgtaatgaattctccatgttcaatttttagacttacattatcaactgcgctatatgctgctcctttaaattgtttataaacattcttaaactctattgctatactcatcttgaatatctccttctatctattatttaatagaatcgtaatactccttagctacttcttcgtattcttttttatctacatcaacttctgcgtttaattttgttatctttttagtatctaagcttgcactaactttatttaaaatatcagcaatatccggatgagcatctaatactgattttttaattactggtgctaaattatatggaggccatacgtgtttatcatcttctaataaggtaaattcaggttttactaattggccttctgttgtagatgctggtgctagatctgcttcattattcgctaatacttcatactttaaaccattgtcatatacctttgtagatttaaaatcaaactttccatagaccttctctaatcctggaataccatcttctcttttatcaaattcaccttgtgatgcaaatctgatttcacctgcatgtttttgtaaatcagaaatagttttgattccaagtttatttgctacatctgtacgaattactaacccttgtccatcatttgcaggcgaatagtcaagccattctaaattaaattgcttttcatattcagatttaactgtgtcataaacttgctttggatctgtaattaaatccttctttaaaatcgccaataatccagtgccagtatattctggatataaatcaatttcatcatttacaagcgatgtatgaataactgagcttgctatattaggtactctttctactttataacctttgtcttcaagagctaatgcataaacttcacctactattgaattttctgtaaagtcctttgaccctatacgaattgtatttttatctccacttgaacttttgctatttccgcaagcaacaagccctccaagtgtaactgtaattaataacgttcctatgattcttttaatatttttattcataattatcactccccaatctaaattaatctttattacttgtcttttaatgagcttatctaaagctcatatatgattctttaatactttcactaatctataatgattaggcgacttaaaactatatattcgaattaatatacttatatctaagcagatatttttccaaacctaacataattacatttgcaagcattgaaagaattgctacagtaacaccacctattagaagtaaatctgctctattaagtcctaatccagtgaaaataatgttcccaactccccctccaccaatataagcagcaagggtagcactagcaataatctcaaccattgcagttttaattcctgttagtataagaggtgcagctaatggcacctttaccttccaaaaactctgcgcttttgacattcccattgccattgaagtttctatcatgaattcaggaattgtgttaaaggcaagtgctgtatttaataatattggtggtattccaagtaacgctaatgcaataagtgctggtttaacacctgttcctacaataggaataaatattataagaacagctaagctcggaataattctaagagtattaaaccaggtcgtcacccatctataccaaactttatttttagtagataatattccaaagggaatcccaacaatcgctgctacaaataaggatagtaaacttatttctaagtgttgccctattgcctgcaaataattattcatgtccttttgaaaataatctataatattttgccacatattctcacttcccttgttgaaaaagtataattcctaaaatttttaagttcttataaaacctttggtaaaaagattaaaagtattaacgttcctaaaaaaatactatacggctcctaagtcaaagataccttgaattgtgcttaggcttaatagataataatatataattcctatctttgtaagtatatacgacatattcaaaattattattgtaattattgaataaaatttgtaactgttcatctatctttgattgcttagtctatcattaattattaggaactttcctcttttcttccagtaattatatcatataacatattttcatgcaaacttatgttcccagaacgtaggtttgcttatagaaaaatattgattatttaatattctctattcatctattgaatcaagcgcatgcttaagatctgctattaaatcctctgcctcttcaatacctattgataatcttaaagtatcatcatatactcccgctttttctctttcttctttagattgtccaaaatgagttgatgttgctgaatgtacaataagtgattttgcatctcccacatttaccatgtaatcaaatactttaacttcttcaaggacttttcttgctgcctctattccaccttttaatcttatagacattattgcgcctggacccttaggaaaatattttttagctaactcatgatacttattacttttaagtcctgggtatgccactgaaagaactttcggatgaccttcaaggaattcagccaccttttgcgcattagctgcatgttctctcattcttaaagataaagtttcaattccttgcaataaataaaacgcactagttgggcttaagtgtgcacctaaatcagttaagtatctgattctaagtctcttagtaaacattgttttatctaaaatatcttttcctatcgtatctttgtattcatcataaaatttttcaaactgagggaatttcccattcaaccaattaaaaccacctttttcaactacagctcctacaattgttgtcccatgacctgcaagatatttggttgcagaatagcaaacaatatccgctccatattcaaatggtcgtaataaatacggtgttgcaaaagtattatcaacaattaatggtattccatgttcatgagctagattagccacagcttcaatatcgattatattcataccaggattgccaaggctttcaatataaattgcctttgtcttttctgtaattacttttctgtatgattctatatcattttcatcatctacaaacctcccaacaattccataatcaggtaaaatgttatttaataaggttctacttcctccatataaagtattaacagctactatttcatcccctgattttgcgatattcaaaaaagtattagatattgctgccattcctgaacctaatgcaattgcttctattcctccctcaagtgatgctaatcttctttcaagtaccgtattagttggatttgaaaatcttacgtaagaatgaccttcttcagaataatcaaataatctaatacatctctcaaaatccccaagttcaaaagctgctgtttggtaaattggaactgcttttgatctataatgttctgctggattataacctgcatgtaattgtcttgtagtaaaacctaactgattatttttatatgcttcgtaactcattttaatccctctcttttaatttaatcacattcaaaatatatcaaaccgtatgcctaaactttttgaaccaaactcaatactctcaatatttatttaatcgctccttatataaacaaaatcactttctttactaacgcaaaatatacggtgtatcttcaagcatgttattttctttcctgtaacttaagtgcctttgtaggacacgaatttgaacaaattccacaacctacgcattttgaaatatctgtttttatgattccatcaaccttagtaaatacatcaaaatggcatctttttatacaagcaccacacttaatgcagttatgtgaattaaattcaatgatttgatttgtttttggccaaaatccactgctatttctttttgcctggcttctaaataaataacagcagtctccacagcaattacatataccatttgaattaactgtatgcataagacctttcttatcagcattttttactatttcttttgctctttctttatctatttcttctgataaacctctatgtgcaaatgtattaattccatttctatacgtaatacaggttttagttggttttccacattctcctctaaggcttctacaatcgcagtaatttagataaacaggtctatcctgagtgtcaatgaattctaacaccttgttaagtggtaaaatttcatcctctgtaggccttacactaaaatcagggtctaacccatcataataagctttaaaataccaggcatccatagaaagttgatctgcctttggaatgcttctataaacctcttgctcagatattgaaaaaatatctaatctactataaaaatttgctattttatatgtagatgtctcttcatctacaagtgaaataatacctcttctatagctattttttataaacgcctctgaattttcatctataattttctctatgtccttcttagtaaatgtatccttgtccatcttatctacaaattcaatttcttttttagtaaatatcttgttgatgaacggataagctacttcaggtatctggaactttttaataaaattttgtaaatccataaacacatccccacagccaaataatttttttgatagtgcctattgcctaaaataaaacaaaaaagaccgcaaaaatccctaagcaggaaaagtctaaaaaagacttaaccaccctaaatttctacgatctctagctttctagtcaatcatttcttatttatttttattaagcatatattatacttatatttattttttaattcatactaattttatatgattacttttttatcagtatattccctaacctatattttgtcaataaaaactttggttagaatttgctttataaaataaatataccatctatctgtactacattaactatatctattattcaacgaaacccaatcaatcatattgctatttttacatactctttttatttcatttctaacttccattaacgcaaatccgagtaaattttccccgcgccataattctggatttttgatattaacatcctcctcagacatctgtattccccatacattatcatatggacttgcctctactaatattttatcccctgtggaaagaagaaatgtttttaatctttcattttgcatgaacttattataatttccatttatgataattgaatatttagctctattccaaatttcttcatcaaaacctcttactttacgtccaaagctctttatttccttaggatcataactattcataattttttcttctatttctttgtctccaaaaaatctagctttttctgccatcatatattgttccataaataaatattcagtatgtccaatattgaacctgctcttccaccactggctaaagcaagactttgtaatcccgccatcttttttaggatgatgcccccagaaataaatatattccaagttctttccatctttataatctgaaataaggttatttaaatcatattcaggcttgccatctttttgccaagtgtatgtccaataattattgtattcataaatattatcttctctttcccatcttttaggctctggaaacatttctttatactttttcttctcatcctcttctaatttattaaaccataagtaaaaatctatagcatatccttcaccatatcccattctccatccaatgcttccatttggaatttcaggatacattagccatagtggagccattaatagatttccatttttattttccataatatctttctccttacatatctgcttttatataataaaacatcactaactaattcctcatcaattgcattagcgacttttcctcattgttctccatcattagtatataaatttattttatcctttatctcaaagctgataaactctcattttgatatctttaaatctttcttgattaatgcttgtcttatttatgtatagaactaagaattctttttaatatagatctttagagccttaattaataagacaagagcatatattcctagcacacataagattaatactaaaattctaaatataatcactgggattatttgcactattaaaccactcatgacacacctcctgtaattaaaatttgtttttcatacaaatcattttcttttccggagcaccaatatcatttgcaatcacatcacatttagtcattaacagaaaatagatatttttcttttcttcactcaaacattcatagttagcttgccctttagcaattactacatccgcctttttataggcttctttaaactcatgacttgtcttttttaaaacagtcccaagagaaccatctccattatcaataacctctgcatattcatcaattcctacagcatatgcgtcttcagctatagagtcatttacaacaggtttacctcgtactccaaagaatattttaacattaggatttagttcctttatttttttcaaaagaatcttgtccatacatatttctccacaattatcacctaagtataataatgtttttgaatttaaaatatcttccgctagctctttagaatcatctattgcaagttctaactgttccattttttcaaaataatcaaatatatcctctaataatgtattgtgaataggattaaaatctatgatattaccaacaatggcataccttactgctaattgaaacgaattttcagcttgctcaatcttcctttcaaattcaggtaacagttttgaaaataatgtattatagtaatttctagtttctttatatggatcttgattattagtatgttcttttatcatgccaaaaatttctccaataatttctggtgtagttgcctcaaaatacattttactgagatatgtaaaaacttcctttaataactcttccttattgttaacccctgtaatatttgctactttaataacttggttgaccatacacggcaagcatttatcatgtattttcataattgcacctctttatttctaaataatttagcagtttaaactaccctacaaattacaatttatcttttagctaatgatagtaaatcttataaataccattctgtttaattataaaaaatatatttcatttataattctaaatcctatcttttcattattaacccaattgatatatgaataatttaaagtttaaattataacaaacttcataattcatataaaccagttactttaaagaattctctaatatactaaaaattattttttgtaccgttaagacttatcttatatcctaaatttacaattaagttatataatatgtttgttttagattttcttattctcttataaatagattttaaagaataaaactctctcctaaaccacatatagccttcaaacagctcttctgcgctcatatttttaggaataaaagctactctagtttttccattgtaatagctccaatcctctgttattaatctattttcttcttttagctttgaatatactggtgttttaggcagaggagttaatatacttacagttgctccatctattcctagctcattgcaggcatcaagagttttcttgaatacatcctttttatctgtatcaaatccaaatattattccagcttgtacacaaattccattattatgaattttgtctatcatacttttatatttatctacatcatttatacctttgtttacacttcccaaactatcctgtgaaaaagattctattcctacaaagaagtatacacagccagcctctttagctaattttaataattcatcatctttacatctctctagcgttacttgtgctgcccactttttattaagttttttcaattccaacagtaattctttcacaaaatttatatccccaaagaaattatcatcccaaaatacaaaaaacttacttttcatggtctttatctcagaaataacttctttaataggccttgttctaaacggctcacaataaatttgctttaaattgcaataactacaattataaggacatcccctcgaagaaataactgccccttttgtaaagtatcttttatgaattagatttcttcttgctattggcatattttttagattaggtacttcttcgcaaatatattctggttttgctttatcctcatagaaatcttctaaaaattctggccatataatttcgccctctcccaccattatataatcacaatgtttctttacctcttcttgtaataatgttgcatgaggacctccaattacaactttaatattcttatccctaaacttcttcgatatatcataacaatgggcagcatttgatgtgtttaccgttattgcaaccagatgaaatttttcttcaaaaggaactctttgattatattcatcaactagagttatttcatatttattttcatctatgaaagctgctaagtatggcatagttatctgaataaaattattaaattgattttttctaaatctatttatttcctcattctcaggtgttattaaaagtatttttttcttcatgccaatccccccatatctattatcaattgatacatgtttctttgttacgatttttttccaaatgactttggagttcatcccaatttggcgttgaaatatttgatttttgctttaatatattgaatgcatcactcaacatgaacatctcattaactgctgacatagcatgatcgcttattgctagccttcccataggtgttatcataataattttcaataatagatagaacatatatgatttatttctaacaaaattttcttcatttttaggtaaaatggagtagccaagtgattctaatactttatagccttcatcgattgctttaataatttgatttaaaagttttttgctcttagctactttatgtaaatctccatcacatgcatatgaagcataacaaagaggcataattagagcaatatgacttttaagccacgaatccatatcatcaaaataagttaatttatattttgtgtttttaaaagccctatctataatgtttttccatgataagttaccatctaatccacctaactccatttgtccgattatacgcacgcaaataacttttccattttcacgtcttccgccagtactttggaacccaaaagcaatatgtttttcattacagctattttttagcatataattcttaattgcatggggatctgcattattaccaacaaatataatattagaacttttattatttgaaagacatggtaatattgaatttaaatgtgtatattgcattactacaaatattatttcatacacttcatttgaaggaagaaaatctattacttttactttgtcagtggtagttttacactgtatataatggcgaataacaagtccattattcttcaattctttaaaacgttcgtttctagcaagcaatgtaacatcattgcctccgcgtatcaatacatgagccaaataacttcctaaaacaccagctccataaactaatattttcatgtaaattcccccattcgtaatatattagcttctcactatagactccgtactattaaatcttcaaataacatttagctataactaacattgcagtaataaaaaaataactttttttattacatgccatagaagcggattctataaacttattgcaattatatttctattatagcattttttaacagcccacattattgaacttcagatttgattgaatctataacaaaaagtatcacatatcatatgatacgcgatacttcaatttactatttatttttataactgcacggaataatttattttccattgctataccatttttttataacttctgtactttcttgacttggataataatgtttgtcattgctttgttcacccactgcaaatatagaaaatcctaaaaaccaaggttcatcttggaactctcttctataggcttcaaaacaattagcttgctcaacgttattaatattattattcttatatggattccaattccaaggctcgtatgatgcataatcaaatttaggaaagccaagttctccaaaaaaaataggcttattccatttatcatagaagttttttatttcttgttttatattttggtgtctaacttgtccattaaaatctatctgagaattttctattgcgcttgtaagattttcaactgtatttgtaggattctttgtaagttcgaaataagctgctatagaaataaaatctacttttgaaaataacttattatttaacttgttattatatgcagtaacactgtcaggagcccatgaagcagtatcccatttatttgttctgtatgttacaaatcctttataatatgttctaacataatctatcgtatcacaccaattgttttcttctgattccatgttaactagattacttcctatgtttagggctgttacattatatggtactgcaatatcagttatcaatgtctttaatacattagtcttccaatttaaaaagaaagcattcatgttattcggtttccattcagtttcagcctttgtgccctgctctatccaaggatatggctctaatattacatttatattggtatttgtattcttcaattgtttaattaaattaattgccttttcttcacttattttatcaactatcatactacttgaagaaatattatctacatctatcattacaggtatatttaaggtattcaactgaaacttattcatatcatttagcacttgttcagtattatagtctgttgataagctacctgatttaatcttctttccatcaattgtccatccgattttagaatttgatgtttgattatttgtaatagtagctgcttgtacattagatgaaataataaaaaaactactgaaaataattgctattaaaattatatttttcagtttgtctactgttttgcaattgtttatatatttcatgtatttatttctcccctaactttgtgcttttataagttctatttgatattcacccttgtaaatatattcctattataacacaatttaaggtaacacattagttaattcaataaacatttttatttgttatatacactttacagatggctccaccatatgaaaataatatcaaatcttgctatctcttttattaatttcatctgttattaaaaattttgaaatatacattgcatttatgatattcttaaggcgagtatgatgagatgtcccctcctcaaattttagctgagccttctcacatttgctgataatagaaactacaggtggtagtgcttctattaattcttcttttgtatatttattcataataacttcatctgttattaacgattttgaaatgtatagagcttttaacctatttttaagaagtgtatgttgtgaggtaccttctgcaaattttagctgcgctttttcacaattattaatagttgacgatacaacttttagtgcatctaccaattcttctcttgtgtatttttccatagaattttacctcctaaactaatctacttaataatttttcttgtaccattataatatctctcatacaaagaaatcaataattcttcaacttgcctctcatcaggttctttaggcaatgtagtattaactgatgcttctttaaaattaaaatcatataactcgactaacttaaacaattcatcataactatacttgccttttctgatatccattaataaatcatattctttctctcgataggtgttgatttcatgagtttttaatatttctgttcccatgattaggagccttattaagtgcatagcatgttttaaaagcttcccctcatctttttttctattcctatgattaagcttatcataatcgtgaacaatattactcatttctgagtatatacttttaaaatctcttaaagaatacttatctatatgaatgtccattaatatctctgcttcctttttatcagatttatcaatatataattttatactcccctttggaaactctgtgtaattagatgaaaaatgattcatttgattatttattgtattaagtatatgtttctccttttcttccttcggatactcatcccttgccaaggcattttgcagtcttcttaattgtgcagtagcataattaccaaaagtgtgtataactctttttgataagaacagctctctatttttacgtaatgcctcaccatatttattcatatatataatatgctcatccttagtacctaataattcaagaatattaggatttccctttaatgctaatgaaacaaatttcctaagtccatatataacagtatcagttgctgtatcttcaaattgttcaaaactttgaaatccatatatattttcttttctttcaattgtaattcctcgtaaatctacatcactattatctatattagtaccatatccaattgaccctgaaagtgttaagtatattatgttttctcctaagttttcatttgaatgtataaatttatattcctctttatttaaaatttcctttgttactttattcattctatatcaccgctatattctttaatagtcttatggaaaaattcatttaggatactagaatctctttctttttcagttttaatattttttgcataactataataatattctagcttgtctcttaagaattccattaattctgtaggttgttttatcgtgtctgactctatcctatcagctttgatagtaacaagttcttctattatcgtcttgactttgtcatccattttaacttctttcatcattgcttgtaaattcataggtggaattgtattgaaattctctatccacatacatgataaaattggcctaataacataaaaaagctttttgatgttaacattatttaagccttccaatccatcaaagcttttctttgcaatatttatataatggtatgtgactgatattggtgaaaagtacttttctgccacctgtcttaattcttttacaagctcttgattttgcctgtaggtaattggcgatgatagccattctaataaagatgcatttgacctgtacattagttttaaggcttttcgaagatcccatccattaacatctaacacctcatctacaggtatttctataatatcagggccttcaaatacacttaaataccattcaactggatgtatataaataaatctcacatcaaaatcactatccttagattcaaatccccagccacgacttcctgactctattgcatatagtatttttacattatttttttcttctatatctcttaattgagcttgtattactttatccatactcagtccctcccaacagttaaatatgtaatccaataaattattattcatctatacacttcatctatgatacttataaattgcattttagcattacattatacacataaggtaatgctaaaataattatttccaataataaatctttttccataacctaaaatctttatcatcaagcctttttttataataattaggaaaattatcataacttccataaaatattagacaacttttaagatctctttcaagttcaatcttatattcatttaaagtttctctaaaaacgtaatcacggaatgtccaagtatcataaaccttcctatatgattttccactatgaatttcagtggttctgcggaccttcttatttgcagacctcttataccaatataaagactttaatccatatccatcttgataaaccgatgtttttttataacttcttgacattatatcgcctccgttacaaggcgtcatctctccaaatcattatcatcaactcctaacttattttagaaaaaataattttgaaatcagtgatttaaatattctaattacccttgagctttaaaattataaattggtttgattatttcaataatatcaacagtctcagaaatattttcaagtatttcttccttaggcttatacaccattggagcttcatcaattgtcgcttctgtaactgaagttgtaaaaatcccttccattgaagccttaaattcttccaaattgactttttccttagctttagtcctgctcataatacggcctgccccatgtggtgctgagtaattccaatctggattacctttccctattgcaattatgcttccatctctcatattaaggggaattaatactttttctccttcataggcggaaatacttccttttctaattatgttgtcttttaagtttatataattatgggtagtagaaaatgcttcaaattcatcaaaaccttttccaagcagctttttcaaaattatatctgccattgtgtttctatttaagacagcatattcttggcaaatattcatatcatgtagataatccttcctataatctccacttaaaaagcacaactcttttgggtagcttggcattaggtcattatatagtgcttctaaatcttttaaagctttctggatttcttttctacgtccatcagctttatattcactaattattttttctcttttaacaaagtaatcacctttaccactgcataaatctattgcaagattttgataaatactagccacttgtgttcctaaatttctgcttcctgagtgaatcacaagatactttattccatcagcactctcatttatttcaataaagtgatttcccccgcctaaggtgccaatacttctttcaattcttttagtatttttcaagctcctataacattttaaattctgcaattctgggaatctaaccactcttccttcatgtacattcattcctgatggaatatatttatggataatctcatctagcttttctaaatcaacatctactcttcctaaatttacagttaacatcccgcatccaatatcgactcctacaatattcggaatgactttatcacacaaatcagctgtaaatccaataacacagcttgcccctttatgagtatctggcattattctaaccttgcagccctctacaaaaggctgattgcataattcctctaattgttcaattgcttctgtttctatattatctgtaaatacttttgcagtattatatttccctttaacttctatcataaatattactcctctaaaattaaggggagaaaaactatttaagtatttagtgctctaccacctgagctacttataatctttccaaattataagaccgggttcgaaccggtgacatctatcgttaaaatcgaagtaacttaaatatacacttccccttactatttttgtctatataattgattctaatttttccttaaaataatactcttcaatcttgtcctttatattgctaagaccgttttctacatttggtatgaattctagtattttttcattccatcctgcaattatatttactttgtctcctttaaattgctgtgtaccataacctaaaaggtcaattgcatgtacacagacattaggatttacttgctttctatattgatttatcaaatcttggcatactctagcatatccataatttatttcgttgtctgatagaattattattctatcaacataaattttattatctaacaaatgatatattggcaatgaaagatttgtccctccgcctgtaacccttatagaatttgcattagctataattccatttgtagctgcaaatggagttattttaaatcttgtatcaaaagtacttgttatagcttcatcacaaatgctatttgcaatcgccataagaacagtacctatttcagcacaagtagtatcactttttctacttagcgtacttctcatagaacctgatacatcagctgatataaaagtcttaccactaagtcgctctatgttgtctgtagaaaatctaattgctttttcgagagtatcataaatttttgatgttccaagaccttcatttgataatactttaaatgctgaataatatctaaaaggtagctgcttgctatttttaactctattctcattttctaaaatttcatataccttttctatattatctggttcagctttaatgatgtttctcaaattacgaagtatagccatataaccaagcttattgctatcaattaatttttcccaagtattcttgttattgccctcacttgaaagcattgtttcccatgtaaatggtgtttctaggttatcctcaagtaatctcttaaacatatcgctttgcttacctgtgcttggtcttggatgaactaaatttactatgtccttaagtttaatctcctttgatctattgtattttgcaagagaatactcatcaaatcttatgaaagaatcacctaaccctttcttgagtgaatttggaattggtttgccatatacatttaggtaataacttaaaatttccgccatatcatctactctctcaactatttcacttagaactcttctaacatacttctttccctgcacatcatgagcaagctctgcagccataacatgagaaatgcttcttaaatgaatttcttttctagcatatatggccaaatttgctacaaatttcggatctatcttaataacatttcttaaatcgttaactatttctaaagaattatctccataaaactttccttcattaaagaaacttgttaaaacttcagttattaatttttccttcagttccattttaaaagccacatggccttccttatttactgtatttactgttgtgtttctaaaaaaattaaattttgacattttaatttgctcctttcaatgatgaagttatatttttcagatgacttatggagttgcaccatactaatactcttatcatcatgtcaaatcaattttaattaaattgatttatatcctttgcgtcctacttgtgaagaaaaaatttaaaacaataagggagaaaacctaaaagtgttcattgcttttattgcaattatctttactccgaagtaacaccttcatgcacttcccttaatttaattagattgtggagtaaatctacctgagttgtttacacttagctagcccaatggtatcactcttctctctgaaataaagttactttaggaattattttaatcttactaaagcattaagtttgtattgtttatttctaaatttaaaccattcctttaacttaatattttaattataattttccttttacgaagtaactcaaatatgcgctgccacatctaattttaatctctatgaaatatggagaaaaaagctatttaagtattctggtggtgtgttatcccttctactatacatattaaaatatgcaattggattcgaaccaatattaccacccctaaaacgaagtaacttaaatattcacttccttattgctttgtcctctcgactacaatacttattatattatttctataattttcttacagacaaaaactttgcatcttttgaattataatccattagtaccaataaaatgttaaacgcctgtctcaataaaatactctaaatacacttaagtagcatatatactgtaaaacaaaagagcccgaagtctttttaacttccagctctatttcttgattatatataattaagataacttatttatattttccataccttaagttgtttcatacataaatgctcttttaatcttatcaataataatctctctaaccctattaggcgcctttactttaacatatggacctaaggacattattttccttataacctcatcttcttcgaaggtataataataaatatctatttcatatttattttttgaaatggttctagaatttctttcaaatgaagaaaaactcatgaaacacctttccatagctcccctaatatcttcaagttcaattgtaattggaacttctgagtatttcttttcctttaatttcttaagaacatcttttctttttatattcgaatctacattattggctactttaacttcctttaatgtatgcaaattaaccaatatagatctcttctcatctaaagaatatagggatgctctaaatttatcatcttttaatgagtactcaattctaattggaattgctaattggttattatattcattgccgtttttatctacattagaatataatataggcttctcattaattatgccttctaaaatagtatagaaatccttacttaatttctctaaatcaatatcaaatccattttgtactttatttgtaaattctattatttgattacttcccttttctttcatatctgtcaaagctgtttctaatttttttaaggtttcttttccaagtaaagcttgtactactggttccttaatcattccattaagccaggatttttctagctttgaaaatctgactttaagaggtataccattttcactatttaaaatactataatatttgccttctctttcttccaaaaaattaaaatcatcctctttaccatattgatttaaaagcattccttcaaaagttttaaagtcttttcctattactttttcatcgtactcctcgtcttcaataagccttataatttcatctttataaagtccattttttgctagatttaaaattctaaacactaaatgaaaatatttatttttatattcatgaaataactccataattatttagcatatcctcccaatccttttttattttcttatgaagatatctaggtgaaataacctttaaatagccaccatattttctaatccacggaatcatttcacaagaatcatttactatctttttaaataaatatttagtatcacttatcttctcaaaagtgcaatccccaagctccccttttatcttttcaactatataatattcatataaagaatcaatattaacttcaaattcaacttcttcgtatggagtatcagtgttatgaggcacacttgaaaaacttttttccatagctaatttatacttttcctcatattcctcataattaaatcttgtttttaaaacctcaatatcatctttcctatcaagccttgcactaatacatcttccagtgctagtaaacgaaaacacgtagaaccttccacattcaacatcgtatctaagcttaaaaggcctaatcacttcattatcatacattttgacacgagtggttttgcaatcatttttaaatcttatctcattcctattttcaattgctctcataacttttaaaatcaattcttcttcaattacaggatgaaaatgcagatttttatattggaaacaattcttatcctttggtattacatttcgttcaaattctaaataatcccttagtgtatcaaaaaaataatgtccacttacattaggaaaaataatatttttatataaatccactatattataaagctttagaatttcttcattatcaagttcttttagtatatcctctgaaatgtaatactctttaacccgtccattcttcttaactgatacgatttccatagaatttgctaattcattaagctttctttctatggttttactacttatatttccataatcaattaattcttcacttaccagctcattttcaatgtctgaaaaggccattggtttatttttataatttaaaattaaaagcaaataataatataagataatatcagctttagtaaaactcttgcttaaatatgtattgactaaaaagtttttcgtatttgatatatcatcatagcttaaacttaaaagtttattcttgccatctttatctatcttaataaaatccttctctatatattgtttaattcggcgcatctcataactaacttttcgtgagctcccatgatttttactttctaagtcaccttttgaaaaacatccgtataaaaaaacgtcccgaagtattgaacgtattaaatcataatgcttaataaaatctggaaaaatagaaatccccacctttgcttaatcaatctctagtcagccctataatgatttttcaaaacacttcaaatcttcccatatcacattttgaaaatgaaattttgttgtacctacataaacatatccaatcttaggatatagcgttgcagctgggatattgccttcgtaagtatcaaggcgaataactttatatccttgctcttttgagtatttttcaatgaattccatcattacttttgctttacctttgccacttgcagaaggtcgaatacacaaagtatgaatgaccataatttcgcttggttttgcctttgtaatccacgaaatattgtcatattctttgggttgaatgctattaagtactacgcatccatatattccgtcttcgtcttcaccaacaaacattgtattattatcaatagcactccttgcataatcaactgttggataaatccccttttgccaatttgtataagacactgtttgttcttcataatccaaaatctcattatatatcttttctatttctaaaatatcatctatagtagcaaccctaaccatcgtctttctcctccacaaatcactattttttctttcacttattataacatatcttgtaaataccacacttcgaaatttttaaatagcattttataccttacctaataaatactctaatagataaagaattttatttatactttgcaataaataccatactagaaagtagaaacatttttatgcagcaggcattgaaaatgagctgttaaaagctcttaattgtaggttgttcaactaatgcttgtcacaattaaattgggagcaagcactagtggtgcaacctacaatttagcactttcagcgaaattttcatagtcctgtgaaataacaatgtttttactttcggtggattattgcacaagtctaggttatatactatttatctatatgtgaaatagaaattttgcttataaaaatagagcagcttttaaaccactctataaaattatttatttaattattgtttatgactaaacgcttactacaatcttattttgatttacaccagatctacgtaaaagttgtttcattgcttcactctttacataaaagtttgtatttttacatccaccaaatgcactcattcctatttgagttacactgttaggaattgtcatgcttgttaagttagtgcaacctgcaaaaatactaggttctatagatgtcaaaccacttggaatgtttgcacttgttaagtttgaacatccaataaatgcactatttactatacttgttacactatcaggaatttttatctttgttaagcctgtacacccttcaaatgctctgtaatctatagtttttacactatcaggaatttctatgcttgttagatttgtacatttactaaacgcactatttcctataattattacaccactgggaattgtataatttttatctacttttgcagccggataacatagtatattagttccgtttttactatataacactccatcaacacttttataacttatattattatcatctacagatatatttgctaagctactacaacctattaatgctttttcccctatagattgaacgcttgctggaatatttaagcttgccaaatttgcacagccataaaatgcagagtcttctatatttgtcacactattaggaataattatatttttaatattattgtgtttataaaatgccttattacctatgcctgttactgcaacattatcaattttatctggaattactacattgctgtcagaacctagatatgctactatttcacctgataatttgcaaaaagcccatgctccatttattgtgacatttgtaaattgaccatcatcatttaatccaactttatctccaaaatcatttggcttaccatgatccatatagccttgtgaatcaaaaaaatataaatacccatctattactctgaaaccttcagcccatgagtttccttctgtataccaccagccttttgcatcctttttccattctgcatttgctcctatcggatttaatgccaatactgaagctgctactaatgtaatagctattacttttgttaattttaattttttcatatttctctcctatatcccctaaaacttaataaatattaataatatattaaattttaccattcctataaataattgtctataaatctcttaatcctttataataaatataataatcctacttgcattgtcccactttaaagctgcataaaaaaataccacattttctaaatgcgatatttcaatctgttatttatttttgctcgtaaataatgataaaatattataaagatataagttttttagcaaaatcttttgcattttgaaaatccttatcatttggcctgcctttagcgattccaccgattaatttaaatggtccaaaagtatcataacccttgcatgcaaaactaccaacaacattaaaccctttttcttttagcttttgttcaacaaaatcattatatttaactttaccctgtccactcgtagaaaaaacaaatacttttttattagacaaagttggtaacttgtcaattaactcaagaatatttttatgtaacttcccataatatattccagaaccaaaacctattagatcatattcatttaatgtatttatctttaaatttcttgtttctattatatcagcatttatagattcgcccattgcccttactattttttcagtattaccatgatgtatagatgagtagattaataaaactttcatattaatatcctcctaaaaatatactataaaccaattataacatattttgtaaatatacaattgttctgttttcatatatattgcaattcacaatgcacatctcaaaattcacaattatagctaaaattcttgtaatatttttagaattatgatgaagaattatttttgcaacgtatatattatggttaacaatattttaatttaaatattattatctagatttatttttaaaatatcttcttctgtattcttcttcacttatactttcaattaaaaatttatcgagctgacaggtaaaaatattgttatcctagtaccaattccttttctgcttagtacagagaaatatcctttatgtccatcaacaatccattttgctatagataatcctaacccagtaccaccgttctttctaactcttgctgtgtcagctctaaagaatcgctcaaatatatgtggtatgtccttttcatccattcctataccattatcctgaattgaaagataaggttcccctttttcatttattcctgtttttagcattataacttcattttcttcagtatacttagctgcattttcaattaatattctagctgcctgcttaagtaaaccaatatcaccctgaactattatttcttctgaactatagtattcatatatgtgtttttcatcaatcatcttcgactcttcaagaacttcattcatcatatcatttagtaaaaactctttagagttaatctgtgttttaccattaatccctcgagctaaaaataatagctgttctactagatttttcatattttcagattcacttttaatggcttcaatagactcatttaatacactttcatcattttttccccaacgatccagcatattagcataaccttgaattactgaaattggagtcctaagttcatgggatgcatcagaaacaaaccttgcttgttgtttgtaagaatctctcattctttctaaaagattatttattgcctcttctaatccatgaagctcactatcccctgtatatattctttcatctgagattacagggctaattttagagatggcctcctcaagattttgaaacttctcttcatcaaaggtcatattactaagtctgcttgcagtttgagctatttcatcaaggggttttagcgtccttctaattttcattgttccaaagatgatttctttcaataaaaatattccctctataatagctatagaattaaccactctttgaattatatataaataactacttgcatctttaatcatagttttaccgttatcaaaaactactgtatatgtggaactttctattggaaaaaagataaatgttcttttggcatttaacaaaaattctccatagaaattaatttccaaatcaatgcaccaatatccaataagaaagagtattaaaaatatatcaatccaaagaaacttcgaaaatagctttcttacaaaaacagaattcaattttattgcaatagatgtaacattttttgatttactaaccttattcatcttttataacgtatcctactccacgtactgtggttattatctttgttttaaatacatcatctattttagttcttaaaaatcttatataaacatctattacattagtttctccaatataatcatagccacatactttttccattagtatatctctagttaatactatgttcttattttccaataaaatttttagtaaagtaaactctctgtttgttaattctatttctgtattatcatacattaccttatgtctcatcttatctaaagacaataatccgcagcttattatgtctgtatctcttttttcaataacagttcttcttttaagcgctgttcttattcttgctaataactcttctattgcaaaaggttttgttatataatcatctgctcctgcatcaagtccagataccttatccataacagcatcccttgcagtaagcattataacaggcaaatctgaattttttctaattctacgtaatacttctaatccatttatttgtggaatcattatatcaagaagtattaaatctgcttcacccttttcagctatttcaagacctaatcttccattatccgcttttaatatttcatatccttcatgtaacaattctaactctacaaatcttgcaagtttctcgtcatcctcaacaattaaaattttaaccatttttaaatcccctctttaatttaccttttaccttttttacattttctgatattaacttaaatacatgattaatcttcttcacttctctcctttttcctgatagtgaaaactcaagatcaaagaaaagtcctactatatataaaggaatgacagtaccaaaggagaatattaataaaagtataatcactgtaactggaatcctaagaaataccttattacctttctttatttcaaagaaaatattattacatatgtctattattttgcatacttttacaaaaattccttcaaaggtattatcctcttttgtattactataattattcccgtaatccttattattagttatcacgccatttttatgattttccttatattcattagtataaaagatattaacagaaggcttttgaactttacctatgtcttctaaataaacaaacgcatctaaaatgtcccagttcgacttttctagcgcacttttggcttcttcataacttatattagcttcgttttttaatttttctacaagcttataatcttccatagtaaccctccatatccatggctatctgataaattataccatttaatctaatgcttttatatacacaaaattagaggcttcgaataatttcaaaacctctagtgctgtcattagattaatcctatcctttatagctttctttaaaatcactttttatattatctgctgattctgaagctttatccaaaatatcattaaccttatcagtattaatatcagggcctgctattgaatatttatatccaaaaaataaaccaactaataataatactgaaacaggccaaaacccgattattaacaataacgctgctatcgtaagtgatatccttattggctttttattttcctttttcatttcaaaatagttttcatttcctttgcttataaccttccctataaacttaaacattctaccaataatttctccaatgcctccacttttctttttatgattttcctcattttcttttttattttcttcattattatctacagccacttctataattgtattggctccattattttcaacttttccttgtctttctaaataaattatagcatctaaaagatcaaagtcacattcttgcaacactgcttctgcttcttcataacttactttggtcttttccattaaaattttaatcatttcatttctttccatattaatcatcctccaaaactttgtattgacttatcatgtttatataatacttagagaaaattaatctaaaatataagaaagattaaaatcagattaaaattgcataattttttataataatatgataacagacgcaatcagccaaataattatatctttcattttgctatactaatacttaaaaatattgttaattatattatattttctatagcctgtactgctttacttgtccctcctagatttaataatttttctcctgctttcttagaattatctgcatatatattatttgtactaaattcattgactattttcttaatcgtttctgcattaaaaatatttgtttctaatgagacacctgccttcaaattagatattgaagccgcattatactttctctcaaatacatttccagggcatacaatttgaggtacgccatatattaaacccgtcataatactattttgaccaccatggttcatataagctatggcttctggcataagtttactaaaatcaaatcttttatctacattaatattatttttcttgtatggtttcacttgttctgttgcaatatatatttgaaaattagtttgctcaaatgcttgcgttaaagtgtatataactttctttggtaaaattgtcccgttgcccatgtatgctataattttatttttattatgatcttctgatctaaaattaggtacaaaaaatggacctgtaaaaactaaattttcatcattaatgggttctaactcataagagcttggaactatttttagatcggcccaattaaatatatcaagtgctgattcgattggaggtagtttattttcttgaataaatcttttaactcctgtgctatattcaggattagaggcaaaatacttcgaagcaggataactgaatcctgtaacaactttaatattttcaagttttgaagcaacaatagccgcaattctaaattcggcatataccacatccggcttaaaatctagtattgcctttcttatacaagacacatcttctgaaaaatgcttgtacgtaattgctccaacaaaatgaagcacctgttcataactattaacctttttcttctgttgaattccaagtaattgtccaattttaaacattctttttcccaaagacataggcattccaaatggtgatggaattggcgcataataattttttacattttctatttttttataatttatatcttctgccgcgcaaaacgcaacttcatgttttctttctattaatttattacataaagctgctgctcttgaaaaagggccacttgtctccgccattgctgccataggtgctattaaaattttcataaatagtcattcctttttatatatgatatagtattctaatattttatacttaataagcttcttatatgaatattttcccagacactgctatcattataggcaaatcttttaattatctaaagcaatttgctttttacaaaagtcttatctctttttcaattcaatttttatttcatcctcaatcatttaaaaacacgctccataaatttatttatactctcaaaacttttctctgctgatattagaacatgttctcctattttaaataacgtaaaaatctatgttttcttaaggttgcagccttcaaccccgcattattcaagcatattctgaagaatatatattctagtattcttcagaataaatatggcttagaatatatattcttcaccatatttatggtaaagaatattagaatacagtgatgcttgtgaatcgtttttgcttagaaataaaataataatcgtaaagctgatctatgctttagtggaagaaaatcccccaaaactttacctagaaagaaagtaactgtaatagtaaaataaaattataacgctggcaaaagctgctactgcttattcccagcgttaattgtatacctaatcatctgttttttcctcttaacttagctagttctgcttatagattatctgtgttcttttataattctcttatttttaaagtagataaattgtgatttatttaactcttttgaacatttgatgattttcgttaaactcaaccagatcccacaagttaccatatagatctttaaatactgcaacaattccataatcctgttctttaggctctctcacaaattctattcctatttctctcatttcattgtaatcacgccaaaaatcatcagttcctaagaaaagaaaaactcttccccctgcttggtttcctataaaatcctcttgttcaggcttagatgcccttgcaagcagtattgttgttccacttgaacctggcggagatactactacccatcttttctgttgttctggttggtatgtatcttctactaattcaaaatgaagtttttttgtgtaaaactctattgcttcatcataatctttcactactaaagcaatatgtacaattgattgaatcattatttatccctccattacttcattaaaatcaatacataaatcacatttatctttcaacataattatcacgagtttcatttatggctgaccactctaattgctatttccatgaactccacgcctcacctgaaaaattagtatattcacacaaatatattctataattcatataactcttcctagattatattagatcaactacattaaacccttgtttctgcgcttcctcaataaaattttctccatcaatatgaatacaataaacttgatttctatatttgataggaatattttcactcaacactcttaatgaagtgtgtacattctcttcattatcattaatgcacgcatcatgataaactaaatttcccgactctagataaggaattaaatcaaagtttgtctcatatgtatctccactataaaaaatatcattttctttatcaaactctaatttataggaataagtattccatgtcttaacgtgcttagttatagatgctgaaaatttcaatcccaatgagtcaattctcttattatcagcattatctacaataaaactctcaccttcttttaatccgagaagttctaaaaacatacttattttttctttttcattaaaataaacattagtaactattttatatttccaatagcagaatcctataaatccacctaatgaaccaatatgatctgaatgcatatgagtgattaatacatgtatctctttaattcctttaagtaattctttttccaaaatccttttaaatacagtttcgccacaatctattagtaaaaatgtttcattttttcttatataggcagcagtatttccttctttaatgtgataacctgaccctcttcctaaaaactctaatttattcataactccctctcagttccatcatatttatactttgctcatgatatacgaccagcagcagatcttataaacatgctgtaatttcatttctattataacattttttaacattacttttcctagaattagcgcagaagataatatatcataatattgcacaaccattcccatccattgaattaaaacttttctctcctgatttaattaacgtaaaaatctatgtttttttgaagtttatagccttaaaacctgcattattcaatgcatattctaaagaatattagaatacagtggtgcttgtaaatcgtttttatttagaaataaagttgaagaaaaaatataaatctattactaaaaaggaagtccatattaatatagtaaaataaaattataacgctgacaaaagcttcttctgcttattgccagcgtcaattttatatctaatcatctatttttcctcgtaacttatctactttaatagattatctgttttttctatatagcactattcatttacatggataatcaaacacttctcctaattttaaaacaagctgagcatgactagtcaattcttcatatccatcattttgtaggcaccacttaattgcagtcataacaagtgctgcatataattctgataaataatctaaaattttaggcgactttttattttttgttttatattggtcataaaaacttctctttaaaaaatcagacatatcatcatacagatgaatcgtatctgtatgaattgtaaaaagagctaaaatttcttctcgtctaacagataatatatgatataaaggttttataaccataattgcatcttctacattatcacagtcaaatcgatcttttacaccagtttttagcaagtcaaatatttcattgcaaagagtttcagctagtttgtatttatctgtataatgcttgtaaaatgtagagcgattaatcaaagccttgtccaatatatcttgtactgttattttgtaaaagtctttttgcccaagtagataaataaaagattcttctatgtttctttttgtctttataacacgcaaatcattttcattcatatgcagttcctccataccattattttaaagaagtttatatagataaacaacactttgtataatttttgtagtttaagtgcataaaaacttagatattgatgtttgaagcattaaagtaaatgagtaaaataaataacaaagggggaatgaaaaatgaatgaattaaaatggtttgtatgggtttttcctttattatttattgtacacgatatggaagagattattatggcaaagcactggtgcaaaaagaatttaaaacaatatatatctctagctataactccctttggaggcacaaaaaatacagctggattcgcaataggtgtatttgaagaattgattttgtggattatagctactatgattggcaatattagtggatcttatggtttgtggtacggtttacttgtagcaaatatcgttcatctgatcttatttcatattatattattaccattatcctaccgtcattatgtccctggtgaaataacagcatggctaacagttattccatgttgctatattttaaaacttgctcagaatatcttgggatactctgttattgaaatttctatctgggtaacaataggaattatatttgctttcgtaaatatgaagatattgcataaaaacatcgataagttgcctaaattggtggaatgatcatactttaacggtatgcattcccgtttacaataatatgtacccaatttgacaatctttaattaaacgttgttataaatatgtgcttactgatgcttattattccatcgcatcatttcaacaaaaataaggtataaatcttttcctgcctgagatagtgagtattcaacatgtggtggaatttcgttaaattgggttctatcaactaagcccttgttttctagatctcgaagtgtagatgtgagcattgtattagttatttctcctatttgtttttttaaatcaccaaaacgaatagaatcacatttcattaactcaaagagcactcgaatattccattttccttggaaaatctctaatgttttatatgtcccacaacttttatcaattcttacatcttttatttgttcttgatactccttaaatgttatgtctatcatttattttattctcctttggttttaaaaagtcagtacgcttaaatatacttagtctgtatattctgcgtacttgtgctatatatatgatctaagtataataaacgtaccaaagaaaatcaaggagtgatacaactatgagtacaacaatttattatttttccgctacaggaaatagtttaaaagtaacaaagaatttaagcgaacaattaactgatactaagataatacaaatctctaaaaaaagcattccaacatcaaaagacactcaatcagataaaataggttttgtatttccagtatataattttggactacctgtgattgtaaaaaattttatagaaaccttgcctattggtaaacatacctatgtttttgctatagcaacttgtggaggaatggtaggtgctgctcttaatcaaataaaaaaaatactaaacaaaaaagacattaatttagcttcatctttttgtgtatttatgcctggcagtgatcagctgatgtttcctaccgtttctgaagaggagcaaaataaacttttcaacgatgaagaaaaacagataagtacaatagctcttgctataaaaagcaagcaacatattaaatataagtctaatgctattatgagttctgtttacaacttactatacactgctacctttaggccaaaaggtatgggaaaaaatttctggactgatgaaaaatgtataggatgcggtttatgttctcagatctgccccgcaaataatatagttatgcacgatagaaaaccaaaatgggagcatcaatgtgaatcatgtcttgcttgtatgcaatggtgcccgcaaaaatctatacaatataaaaaagctactgttaagagaggtcgctatcacaatcctcaaataaatgtaagcgaactcattcccaatcgttaaattaagcacaaatcaatattttactaaatgtaaactgaaagtatacgttttagcttgatacgtatactttcagtataaatgaatcttactaattaattcgatatttttcattcgaagatgtcccaaacattctatataaatttcaatgataaactgctattatatttaaatagataactaaatatttataatctaaattagaaatatgataatgaaatttatataataaggagcgttttcaaatcatgaatgtatatcgtgagtatgtaattccagaatcggatgacattgaaagattactcaaaacaaaaatgactcgattagcacacctgctatatacctttgctccacaggatggtgttttagatctgccaatctctggtctgtctatcgttcgctattcaggaacagagatagattgtccaaagactttctatttaccttctttaagtattgttgcccaaggagcaaggtctatctcaataggtcacgagacatacaagcttgataaatcacaaatgttaatgaatccaatcactctgccaatttctctgcaaactatgaaggcaactaaatctgagcctctccttattataaggctggatcttaatcccgagaggattgctgagattgttccgaaagtatattctcatggtctgcctgaaataaaacagtggcgtgctggacatgttatgaatgcagatataagcattattgatgcaatgataaggcttttggagtgcttgcagaaaccaggagatgtagaattcattgcaccactgattatggatgaaattctaattcgcctacttcgcagttctgctggagttcatgttgcagccatgggatttgcagactcaggagtacatcaagtgtcagaagcaatagcttggcttcgtaaaaatttttctcaggcagttaaagtttcagacttagccaaactgacacatatgagtgaatcctctttctataatcattttaaagcggtcacttcgatgtcccctatgcaatatcaaaaagctctgcgtctacatgaagcgaggagtctaatgctgtcccaacgcatggatgtgaccactgccagcggaatggtaggttatgttagtaattctcaatttagccgagattacagcgctttttatggagctccccctagaaaagatataggaagactatacagacgaagcccaaaaatatattaatctaaaatatagctttgagtttatagtgattgatatgatttttgatccacaaaaaagagactccaatcactgctttatcatgcctgctgcctatgagcttgcgggctttccttatattaatgaagaatatactgctggtttaacaccctcagttttctaatgtggctgagaaataataaagatctggagaataaggcaaaaagataattgaaaaaggcaaatattcttgttatgtaacatttataattaatttagtctttgaaccggtactagcctatcatcttggcatgtcatgctggttcgaatactcttttaattttgaattgatattaggaggtaataaaaatgaaagttatggcttttgtaggcagtgcaagaaaggacggaaatacttcaaaaatagttgatgccatttgttcgggcattaagaaaaatggacatgaagttgaaacttataatttagcagaacttgataataaaggctgcagggcttgtggtttatgtcaagcaaataaagtggaatattgttctattaacgacaagatgactgaacttttacctaagatagctgatgctgattgcattatagttggaacaccagtctatatggtgcacgtgagcggttatacaaaaaatttcctagatagactatttacgttttttgtggaatccaatcataccacaagacttttaccaggaaaaaagtatataactgttacatgtagcggtgcacctgctgaagcatttaaaaatgttacagaatatcttagtcaaatttttggcgactatagtcaaatggtgaattcaggtaatatcatcgcaggaaacttgcacagtaaggatgatattcttagtcaacaagaaatttttaaccaagctgaggaaataggacaaaaactaaactaattgttgtaaaacaaaagaaaatcactataccatccaggtacggtgaaacttctagccacgtttaaaacaggcagcaccttattcttgcaggaaatgtttgtttctcccgaagcatcgcggagaagcaaacaactttcccataaacatttttcaaaagattaatgagtccgataatagctcattaaatttatatatatatgttgcaattcacaatgcacatttcaaaattacggctaaaattctttcaatatttttagaattatgatgaagaattatttttgcaatatatatgcaataaatacattagggattatattttagcagtttctcatgacaattatctttaatgcaatcataggtatatgtagcaatcgaaacagaaaagtgcatatccttatttttttcttctttctaaaaatgtaacatctacaaaagctaaaccaaaagataaacccactgcatgagaagcagcattaagtaggtccacattaggacttttaaagatgtaatcgaaaacgcaattaagtgcaaaaaatgttgcaaacataatgacaaatttaattaatacttttctaagatgatcccatttcagttttcttgcattaaataaagtaattataggcacatacaataacataaatagagcaaacacagcatagccaatcacaaattttgaagccataccattatctatgttgctataaacaataatacatgtaattattgtacatataaaaaatattgaataaataactttgttaaagagtaaagctttactcatataatacaccccaatactctatattaagaccattaatttactataacgagtaagttatagaatatttctgtaaaatccacttttaatttctgctttaaaaattattatatagtgttacaagcttattatttactagagaatcctacaatttctattgaagctctggttcatctcctactattttatagctacgttcttcaacaactgttccatctgatttcgtttctttaaaagtgattacatcatatccatcagcgcttttactttgagatgtttcataaattagccttacaccattttcaatacgctcttttgttcctatccaataaggacagtgatttagaaatgaatcattcttcccccagtatacaaatagtttattttctgctgtaacattaatattaggacgtttcttttcaacatattttgagctcacatcagcaattctaccaatttgtttcaggtattctttagcatcattctcttttgattctgcaagctgcgaatagctttcctgaccttttaaaaccttgtcccataacttctctggaaacatctgttttatagaattttcacattcttctccatcttcaggttctttatattcgattaatgaataaccaccatttgaatttttagaaaatatcattaccgtaggaatagctccacttccacttatttctgtgaaaatcccattttcaaagccaaaataaccaaaacttgaaatagtgtaaactttcgcgatattatctttttcttcaacatctaaaactatgtgcccttctgtagccgcttctccccttagataatttgtccctctactttttatggctttgcttacagcttgatcaatattttcagtagtgttgttattgttaacatctgttgaatttacaatattgctggacgaattgttttctttcatttgaatccatgctccatcagcattcacttcataaccgccaacactagtatttttagccatttctccgctatcatacaaataataccaattgtttttatcttttacccaacctgttttcatatatccgttgctatcaaaatagtaccagttattattaataaacttccagccacttgaccatgagcttccttctgtataccaccatccgttattatcttttttccattcagcatctgcacccattggaaatatagctagaactccaactaatatcaatcccttgataattaatttttctatactttttcgattcattttttaccccactccctttatgattggtaatttaaaatttacaattgcagcactttttaagtaactttttgttattagtatgattataatattgaaacttacttaatcattttaacttttttaatggaaaaaatgcaggtattacgacaataacaatcattgagtaaatcacaatcccaaaagcacttattaaacgaaagttactatcttcaaaaataggtatggcagaagcaaagaatatcatttgtgcaaaaaagctccaccatggcagtttacttttacgaaaacaatatggacatgtgatacgttctgtgaaacgagaatcaccaccaacttttttccaaaaagtaatggttttaaatttacaatgcgggcatttaaacataactttcacctcaattacgttaatatgtaatctaatataatataaaatgtctaattttgacctccaactctaatactaactaatttactaatacttttacttctatttatacttggtgtatatgcaggtctaaataaaaatataataagagctaatataattaaagcacttactctttgaatatttttctttttcatatattttctccataacaatttcttatattgcgtcaatttgtacaaattcacaatataaaaagaatttaaccaaaaaattttatgtgttaaaaagaagaaacatagcagcaaaataaattattggtgctaagctaactataattgctttattatataattttgatttgaataaaagaaagaatgatattattactgatattaatatgactgctggaagtgagagggtggataggaaaaacatccatgtatatatgctttccgtcgaacctggtgaatcaaatgccataggtgaaaccattgctccaagcaaacttaatggaaatatcaaacaaaatatcatattaataattattgttataatcttaataattatattcccattcttttctttatctacttcatttaaaatatgacctagctctttatccatttgtttatttctacttatagatttccgaagctcttttacacctttaatcattgctattactatcgctactaccactgcgatacaaataaacttaataagtattgatataaaattaattgctgtagaattaatttgcatacaaatccccccagtagttcaaaaaatattctcgtaacccaattccaacaaatgtattcctaattataacatatattacaagtatcctattgttcaattttcaaaaaacactatttttactaattatcttgcattcatataccattttctaatatgtcagttccaagaccttttctcaaatctcttatatctctaagtggtggctttctaaaaagccgcttatattctctctagaaaattgagatgagctttcataaccaactaccattgctgcactcgttatatccaaagattctcttaacataaaacgtcttgcctcatgaagacgaagctctttctgatattgtaatggtcccatggtagtcacttctttgaacttatgatgaagacttgaaacactcatattatttgattctcctaactcttccattgcaaaggcactagtataatttttttaatccattctattactttacctattccatcagcctgcttttcctacaaatgctcctaaataaagtttcttattatttatattaaaaacgcgtatcctttaagatgaatcaattgtttctattggcgatccagccaaaatggtcaaagctatgattgacagtgtagaccagcaagaggctccaaaaagaattactctcggtagtgatgcctatgattcaattcatcaagcactatctgatcgtcttaaagaacttgaagcacaaaaagagcttgctttttccactgattttactgtctaagtccaactgtactggtttggaataggaatattagtgtattttaaaattcgcggtaactcattaagttaccgcgaattattatatatcaaaaatcgatatcaatatatttcttattagatttttataagtaaatattcaatcatattttaatcttaatttttcaaaatatatctcagttttaattcttacttgtctatttattgccgtctattaattctttcagactaatactaggattagtataacgtcccctgctttgtgtcttattcttatagttaatagcctgctttgggcaccattgaacgcacgccatacattgttcgcaattgtgcttaaaactaggctttttgtttttcattactatgttggaaacaggacaaactgcctcacatgttctacagcctgtgcaagcatcggaaacattaaaacctttgtcttttctagcatatattaatttttgaccaatagcagtcgatatattaaggggctcgttcaccttacccactggctgctgtgttttagctactatcttttgtactaatgcaggtatattatcagtagcaatttgatatttctctggatttctctcgttcatttcatacatcgcgacataattttcaaccataataattttctctgcaaaattaagtgtcacacctttttttgctaaaattttggcagggacagttgacgcaacaccacttatattgccgcatccagtcacagcaaaaaaatatgcgtttttacttttttcaagcgacatttcgcttataaattgtgttactcttcgtggcaaattcaaggcatatgtaggatatacaaaaccgatataatcatacacttcattgctgtcatgttcacctttacccatggataccaacttgcaatccggtaatgcctcagctatttttttagctacctgtaagttgtttcctgttcctgtaaaataataaataacacttttcaatttcaattacctccttatttgttataatcaatatgatccatataattattttgtatagttattatcaaaaatcactattattagctattccttgaaggagctttcatattctcctcacttaatttatccattgtcatatcatattttttatttatcttagatataaaccttttaatggttgcttcattttaaacaaaaaatcatgtccaatcacccaaactatgtccaatatagttatggctaatcgtaattacttgctcaaactctgttaaagttctgatcaagcattacaagttacattaatatatttctgtaacttatgatgtcaatacaccacactccaccataaattacaatgtactaaatatgtaacttgttataaattttatactaggaatgtttttcttctttaagtttaaccattcttttataaagtatagtcaaagtattagactgcaaataaataaagtcctcaacaattcttctcagaaagtcaaggactaaaaattttaactcatcatatttgggttttagattcatttatcttgtactataatctctttgatactatttatcccgtattttatactttttctattggactcaacatcgtaaaagcacctgcatttactgtccaatcactatcattaatatctccaatacttccttcgttgcactctttttcaaaactgattaactatagctatgaaactcaaatccatcttctggttcccctatttcaaaacctaatgttgctgaaccattcatcttaaatagttcaagccatttatcccattcttcttgttgcatttcagcatagaattgcagcccactaggttcaactgaagcagtaattattcttttgccattatcttgtgcataccaatgaggaattccatcaataaaaccactccatcctggcatttcagaatataattcagctaatttatcccatatataatctggtgatgaataatgaatatttaaattatgattgtgtatttccataagaaattctcctcccccttaacaatattgcaatccaattattaccagcctaatttggagccactaaagcacatccaattatatgaataattaaaaattgtattttatttatgacatggctcaccgtacgtctaataactatactttaatgcaaatcttattaaatatcgatttttgaggaggcctcaataacaaaatctttaaatattttagctgaaggagtcatatatccattcttcaaccatcccatatgcacagttctatagcagttgggttcttttatttttaatactgatacttcttctgttattaaatttggggtgttaggaactatagaaataccaagacctgcactaacaaaacctgttaccaccatactgctttcattatattctatagatgtttttggaacaaaaccaatgctttcgaaaatagaacacatttttcctttgattccttctgaaaaaaacacaaacgattcttcttttaagccttttagaaatacttctgttttatcagcaagatgatgatttttagggactatgagaacaagctcctcattttttataggaactgactctatttcttcataccttttaatatcttcaaattcatcataaaaaccaaaatcaaacttaccatccttaaggccttttaaaatattaaaagttgattgaatcccaaattcaaattttgtatttggactttccttcaaaaattcacttataatcgaaggaataaaatgtgttccaatagtgtaaagtgaagacatggaaactgtgcctgccataggattaattatatcctgtaattcctgaattcctttactaatctcatttattgcagcgttagcatgtattaaaaacatactgccaaaacgagttaattttatattgcggccatttttttcaaataatggtacatttagctcttcttctaattttgaaatagctttactcaaggctggctgtgttacggaaagcaaattagctgctgatgtgaaattctgtgtttccgctacagttttaaaatattctaattgctgccagttcataaatgcactccttaatttataatattttaagttataaagcattaataacaatctataacttttagttattgattcaatgaaaaatattaattagacatatgatatacatattgatatcattatattactttataaattacatttaaattttgatagattaattataaatttaatttatgtattagtcaaaggtgatgatgtttttttattaagcaaaaatcttatatatttattaccatttagtaaatataaagattaaattaaaatgtcttttaaattgaaaggagaaaaactatgaatgaaataattcaaaatatcttaacaagaagaagtataagaacttataaagaaaatcaaatttctgatgcagacttaaatactgttttagatgctgcccaatttgctccaacagctatgggcaaacaaggctggcatttcacagcagttcaaaataaagaaaagattgaaaaactaatttctgcaataaaagaagctatgttaaagtcgtctatagaacaatatagaaaaatgggtgaaaatcctaattttaatccattttataatgcacctacaatagtcattacatcttatgataaaactttacctacaaaggaatctgattgtgctgctgcacttcaaaacatgcttttagctgctcattcacttaatattggatcttgctggattcatatattagctattactggagaagatcctaaagttaaaagcgtacttacagaactaggtgttcctgaagattatgcggtgtttggtactgctgttttgggctataacagtaaagaagaaactaaagcagcacctagaaaagaaggaacttttaatatagtaaaataaaactctaatctggtttctttgatagtatcctgctatggtaaggtaaactcccagctaaatgtagaaaccagaatcgatagatactcttccgccagaaatggcggtttcttttttgtactcccaattcatgcaaagttatttttaaaaataaaaatagatgagcccactaacaacggacaatatctccaaataactacgaatatcttaatgcgttgatacaataatttacttttttcataatatcaatgctaataaaattcacaaactgtttccactatcttaaacctatacccataaaatgtaatgcaaagataggacgctacctacgtttattgaaaaaataaccattgctatcaatccaactttataataaaaattacagagccatctgctttttacaaaagtcttttctctttttaattcaatttttatttcacccctaatcatttaacaaatgcattccataattttattactctattaaaatttttctctactaatatttaagacgtattttcctatcttaaatcatataaaaatcgaacttttttaagccaacaaccttcaagcccgcattattccagcatattcttcagaatactagaatatatattctagtattctgaagaataaatatggtggagaatatatattctttaccatataagaatattgaataaatgttttgagcttgttttaaatatctctctaaattttacaaagccttatgaaaattcttgtgccctattacttagtagcttagtacattcataaaaataaaaaaggaatacccaaagctcttattgctctaagtattccttttaataatatttatctagtcattctatttttatttttatcttttaactaaaggaaatgcaataacatcctttattgtatttgatccagttagaaacattatcattctatcaataccgatacctagacctccagttggtggcattgctgtatcaatagctatagcaaattcttcatccattggacttgctgtttctagtcctcctcttaatttttcagcttggtcatgtaataatatacgctgccttaatggatcatttaattctgaataagcatttccaagctctactccataggcatatggttcaaatctttcaattagatctggattttccctatgaactttacaaagtggtgatgattcttttggaaagtctataacaaaagtaggttgtattaatttcttctcgctatatgcttcaaaaagatttgttattaattctcctttagaaacttcatttatatttaaaccttcattttgctcttcaatcaaaagagaattctcttttattttacttataatttcttctttagttaaattctctacatcaatacctgtatcttgttttacaagattacacatagtttctctcttccatggagctttaaaatcaatttcttcttcaccatattttattttagtagagccattaacagacataaacacatattcatatattccttccataattctcatcatatcttcatagtctgcataagacatataacattccattagagtaaattctggataatgtgttctatcaattccttcatttctaaaagatcttgcaaatgtataaaccctttctattcctccaacaataagtcttttcaaatataattctggagagacattcatatatacttcacaatctaaatcattaacaaaagttttaaatggttttgcttctcctccaccatatttagtatcaagtacaggagtatcgcattcaataaaattcatatcattcaaatattctctaattgcagtaattgctttagaacgttttatgaatctttccttaacgtctgaattcattatcatatctaaagatctatgtctttgtcttaaatctgaatcttgaattccatgatatttttcaggaagggttcttattgatttagataacaattcaaatttgtttgctctaatagttatttctcccgtctgagtcttaaatacacttccctctaccccaataatatcgccgacatctattaattttaaaacattataattttcatttccaattaactttttactaaaaaatatttgtatatttcctctttcatctactatgttagcaaaagttgcatttcccattcttctaagaaacattattcttcctgctaaagaaaatactttactttcatcaatagtatcaaaattatcacatatctcttttgtataagtttttttgttaaaatcgtaattataaggatatggatttattcctaactcactaagtttatttaacttttttattctctccactataaattcatttgcatttgtcattatattttctaattcatttaaattttcatattgctcatacatttttgttaccacctttacttatttattgattaatttaggcatataaaagaaaatatcactttcaattttgccttaagttttttatcaggcaagaaagcggatttacttgttattcttctgatattgccttaatacaaataaaaaaaaccttcacctccaagatttctaatcttgaggacgaaagttataaattcgtggtaccacctcagtttatgtatgcgttgccgtatacacctcttcaagtacatcaaaaatgagatactctatacctataacggggtattccgtcacatcctacctctattaagtaaaacttgattcatgctgggtttttatccccatctgaattctagtttaatttataccctcaatgggtaccctgtccaagagcacgtagccgttatcttccacctatatgtgagagagtattacggattactagctatcggataaaatagactcagtgtgcagctccaagaccttcttcaataaaaatccattgctcaatcccaccatctagagctctctgaaaacgaattattttatctactcttcttttcattgcttttaatacattttacaataaaaagctgtttttgtaaatataacatctaaaaactctcttcatagttttttatcttcaattaacaatcttctgtttttctttttatatattttaaaatggtgataccatcctctacgaaaacttcatctaaatgcagctttattgttggattattttctaaaaacaaaggtcttcctttgcccagtataattggaattattcccactataaattcatcaataatatcggctttgataaaattgtctacaagacctccacctccaaataggaatatatccttaccgtccctttctttttcttcttgtattattttaacaatatctccgctaataaaatgaagattatcttgattttgaagtttttgagatgttgctacatatacttttttacttttataatcattatgcatatcttggtcatagcaatttttacccataactactatatctataccttctaggaatttgtcaaaatcaaatttattttcagtatttaatgtattatctccatgtccagctatccaatcatatccaccatcttctgaagctatatatccatcaagacttattgccagatttaaaattatctttcttttcacattaaagcctccctaattgtctaagacattttgattttcacctgttttattgttattattgtttgatatataattaattataagtcataataattgtcatgacatataatatattagaaaggaaataatggaagaatacaaattaattgtttgcatttattatttccttcaatgtaacattttgattaataaatctagttttacttttttcctttttaactcttattgcattatgtggacaattattagtacatgccaaacatctctgacaattgttcataaatacgggtttcttatctacttttatattatttacagggcacactttttcacaagttttgcagccagtacaagtattttctacagtaaaattcttttcaaattcatcatcataaaatattttttcacttagtattctaagaccactagaaataaaagaatgctttttaatatatttcttttcttcattaatatctttaattattttttctaagttctcttctatctttttcttaggttctttttctagctccttatttatatcaaatcctggaaggtagttatcaatcataactatctcattaatataagaaaattcaattctatttctattaccaatttccaaaaggtgtcttgttgctgcaccagcatacattccataagttgctattccaaaaatatatttacccttaaattttgctttatttaaaaattcttcaactattttaggaactccgctattataaattggaaatacaatcccaattttttcatcttcaaaatcatatttaccttcttttattaatttaggaattgaataataatcgcttccaaggctttttgctatatatagactatttcctgttgctgtgaaatataaaattttcataatatcctcctcaaatttcaccgttacaattgtaacgcttatttgagtatagtataattggggcaaaagaatatttcaatagaagatagagcaaacgttacaaaagaaaggatattgttatggtaaataaagccgctaatatacaaaatataataacaaaagaaagtattttcactgcacttatgattttaatggaaaaaaagaattttaaagaaatctctattacagaaatagcaaaaaaagctggagtttctcgaatggctttttatagaaattataatataaaggaagatattattaccacatacattgatgaactcttaaaagaatattctaaggaagtaatgcagaaagaaaaactagacaattatgagaatttacgcttatacttttcctattttagaaaacatgagaagttaatttctaatttaattaattccaatttaattaacatacttcttgaaaaatgtattgaatctttttatgaactatcccaaaggattctctgcaaagattcacttcttccagatcagcataaattttggattgattatatggccggtggattatataatgtattaatcgaatgggctaaaggtgggatgaggcaaagtgatgactatatggcaaagacaatttctgaatttataaataagtaatatagatgaatcataccaattagaggctcttttctttaatagttccagtgttttctattaatacgtatttatattcaagtatataatacggaaaatcggccgtatctaattcttgattaggattaccagatttatagtattcaggtattttagtttcgtcatatccttcaaacattttatacctcaatttaaaatttacatgaaccaaaaaactgtctagttatttttgtttaaaaagcactaaaattatttataaataggtgactctaaagattcaagcctaggaagtgatatcccaagtctacgtgcttcagcaagagtatcgcgcacaaatattacattactttcagcttttagattttcactcccactagcacttctcattatttctcttggcagcttaccttcagctaatgctaatttcattacaaaagccacaatacctgcaggtaaattcactgcgatatttattattgtactaaccttagagcccttagctgccatcaatggtgtaagttcccttaatattaaagcaaaatctttaagggcatttgcagaatcaaatagattattaagcgaacctacttttgaggctgctgccatcatgcttgcgttagtaattacatgaaaccatagccaattacgcatatctttctgttcagaaataccaaaacctgcatttttaaatagtcgagttaccatatcatatctagctttattagtagtattgtcaatgaagcccataaatatgtttttcatgaacccaccatctaacgtgtttttatttataaaagatccgccagctcctgggaatccccaaacaacttgttctttaggaattgatccaattgagtttaaaggctcattaataatattattaaatattagaacagttgaatttttaacaagtggttctaaccaatttattatagtacttaattgattatgatttacgcttatcataatcaaatcaaaatcatggttagatgacaattcttctatcattttaattttccaagcggtatttactaaatcaccttttttgttctttctgccatctaatatttttaaattcactatatcaccatactgattgattcttccttggcgcacataaaatgtcacatcattacctgctttttctaaagcccatccatattgtgttgaaattacgcctctacctatcattaaaattttcattatatttcctcctattaaacatgtgttgtttaaaatataagtgtatgttaatataatatttgattactcataaagctacaaccaatagatttttagctatgttgtataaacaacattttattaaatctgttgttttgtcaaaggagattaatgataaattatgaatgaaaaagatccaagagcagtaagaactaaaaatttgattaaagagtcgtttattcaattacttgaggaaaaagactttaaatacataacaattaaagatattacaacaaaggcaactataaatagagcaactttttacgctcactatttagataagtatattttattggaagaacttgttatagattgttttgaagaaatgttaccaatagaaattttaaatgctacagatttaaatgaagagattataaaggaacttattttcttcctttatgaatacaatatttcattttatcaaaagcgtaaaattgattctacatctatagcttctactgtagataatttattaaaatataaaatagacaatcttatcgaaaaaatattaaatagtatggtagctagaaatgagttagattctaaagacacaaatatattagtcaaactaatttcctcatcagtatatagttgtgctcaatattgctattttagtaagaatgataaagaatataatattgaaaaaacgattagctttattatgaatgggataaaggctgtaactttaaaagccgcattattccagcatattctttagaatatcagaatatatattctagtattctaaagaataaataaattatgattttatattaattttcatttcttatatcttctaatagtccttcaaaccactttacatttactaaatgatgagaacgtgaattttccaacatttttctaaaatatgtaggaatagtttcatcatgctcaagagattgttctaataaggaaattttctttttagtttgttcaatttgtatttctattagttttgttagatcctcgcttttatattcatcagcaaacaacattgctgcataaaacgataagtttatataatctgtcttagatccatacttatacattaatttttcaaattccttatctcctagttcagttataatgtaattattagtctctctagtattatctaatttgttaacttttttaatatattttttttcttctaattgttgaagattgtagtagaatgaacctttggtgaaatttgctatatatttatagtgtctctcttccattaaggctaataattcgtatccataagaaccagggttttgttttaataaacctaaaattagtaatggtatcaaaaaaacaccttctttatgctcttcatcaaaattatattaactgttatttcataattataagatttaatcattgttggtttgcatgaattgagatacaaattcctcatatgatatttttcctaatgcaaactccatactttttatatatatcttttcatttttagtatgtgttctagcattatttaaattcagcagctcattttcattaattaatggcttcaatacatgttgtctattagaaaaggcctcaaaataacgtaaaccaaattttctttgagaaattgcatcaatatgaataccatcaggattagaagttaaacctgatcctgtaacaaagaaacaattatcttgttcaaaagcaaacttttgtaactcttcattaatgaatttatattcagtgcaacttttcccaaatccttctttacctaaaaattctcctaatccaccaataataattggaatatctggagcattcaactcttttctaaaagcctcaataattaaaagtaatttattataatatactttatagttaccattaacactatcactttctccttgatgccatagaattcctgtgagttcactactttccatagcaaatttagcttcagttacagcatatctaaaaagtactccgtctacagcccactcatccagtgtgcttccaccttcagcacaaggaattaaaccaatagtatcttcttgattttgacgactccatgcatctgcaaatgaaccggcaagacttattcctgaaacaggcctgtcataattaattggctccgtcatcatctgccatctaccattacgcaacatttgtattctttcattataaattgggggtacctcatgaataaatccacgcccagccatatttgactgtcctatcattaaaaacgatttaatcatttttttcatcctttcttttgtttaatctttattatgaaatgcttacagttctcaataaatgttaaatacttacttatttaatatattaacggatattgacaatacatttctatttatcatcagtctaattagactaacatcactacatattatagtctaattagactaattgtcaactataacttttttcttagcatttatacttggtcttgatttattatttgcttttattcaaaatataaaacttgaatttgaaaaagagtgaacaaaatcgcaagcgactaaagaataaaaaatcgcaaattcatttgaataatgcgactttaaaatctattctttatttttattgattaataatgatattgtgtgtttgaaatttacctaactagattttctccatccttaaatgctctcaaagatagttcctcaaactgctctaaattagaatcataccttccaagcttttctgaatgaaaattagtagttccacagcaaagaatactatcctctaatttccaaccatatgctgcaagcatattattaacaaatttaatgccttccgcacccatttcaggattttggctaccttgagtgaatatcgttattaactttttaccagaatgtctcggtgcaaaattatctccaaccattggaaatgtacgatctaaccaaatttttgcttgacctgtaatttggtaataatagattggagaaccaaatacaatagcatctgcctcagtaatagccttatacattggctgtagataatccttaaccgcgcaaccatcatgtgtacggcagtaaaaacatccttgacaaccacgaattccagaatcatttaaatcaaattcaattatttcggcccctttagatttcgctccttttgctacttgttctaacaattttgtggtatacccattttttcttggactaccgttgaaaataacaacctttgacattttacatctctccttataataatcacttttacttttgtgtaagaatagtacaaagctcaggcaaacgatcaagtatttcgaatgtatcaattggattccaatagtcgcgtaaagttataatttcgccattacgaacctcaacaacttgaagatacctcctctgaaaaggcttgttattagccgtaacttcaccgtacatatcatactcagctataataatttcaggattgcttgtctcatgtattgtcatggatttatatcctattggttttaaaagtgcagctggcatcatcgcaagataattacgaatattctcacgtccctgaattaacctcattgatttttgaatatgaaacggcaattccaatataccatcacttgcaaataagtcagaaaaactgctcaagtccttatttagaaacatagtttgggcaagttcaaatatttcccttggacttctgatatttttattttcttcattcataatacacaccgccttttaatattaactaaacggaactcacattccgcttatgttaaatattatacggaatggtgattccgttgtcaatattcaaactttgaagtaaaataaaaaagaaaggtggttatctggatgacaaataaagagtgctctgtacacaagacagagaatattccgcagcctgatgataataattcaaaatccttgcgagcggatgcaaaacaaaatagagagcagatacttgatgcggcatataagattttttctgaaaaagggacgtcaattcctataagtgaaattgctcgtcaggctggtgtaggcattggtacagtataccgccattttccaaacaaagaagcactatttgaggcagtaaatattaattataaacagcagcttacaaaaagagctaagtctctaattaataatattgatccaggtgaagctttttttaatttctttatacatatcatagaagatggatttactaacaaggcgttaaaagatgctttaaataccggaatgacagattttgatgtgctacaggattttcagtcaacatttgctactctcctcaccagtgctcagcaaaccaaggctgtacgtgaagatatagatataaaggatttaattacccttatgatgagtcttctgtttgctatagagcagcgtaaaggtgatttggatatcgaacgattcaataaattaatgtccattgttatcgatggacttcgttataaagataccaataataagtcaacataaatatatgtgttattcaacatctttgaatatatacataattatttcttatttgagtattaatctggcaaaaaaacgctgattttatattttacatataaaatcagtgtttcttcgtttttaatcattattttcttaaaatcttatccatcgcttttccctttgctaactcatctattagcttatccaaatagcgaatttccttcataattggttcttcaatatcttccactcggacaccgcagacaacccctttactcaagatccttaaagggttcattgtgggagcttccctaaagaaagtctcaaaatctgtctgtttttacatttgtgcttctagctcttcctgtctatatcctgtcaaccagcgaatgatttcatcaacttctttttttgtacgtccttttttctccatgatattttcctcatcttacatatataagctgaaatctatgaattattcttagtctaagtttaatattgtttcatctttatttagttttgataattcaatgcttgtcctccataaatcttttctattttctttattataggaaagcttcgaagtttttatctcctttgtgcctttaaaatatttacctgtaatttcattaagctcaggattaattatgagtaatgctaatgctttacctgatttgctagcagtattagcacttggacgaactaaagtaaaaatagggagaatataatcacaaacaaatttcattaaaggaggaaaagtgcgtgaaaactctgtacctggcatctgtccaggatcaaaagcatttactgtaatatttttattagtttgttcttttattctttcggataactcatatgcgcagtatatattgcataattttgaagttgtgtagcgacgttgaccaattgtcatcatatttttactttcatgagcatccttaggataagctaataatcttgcatttttatatacaggctcagctatccctgttttttgtaatggatcatgagttccactactaacaaagactattctacctgaatcagtcatcttttctagcagcatattggatagtagaaaatgtccaagatgatttattccaaaggtactttcaaagccatctttagtataatgagttttatcaaccataattaatcctgcattgcaaactaaagcatatagtggtggataatttgattttgaaaatttgctcacaaaatttcttactgattctaaggatgcaaggtcaagttccaaagaagttatgttgttattgtttgtttctttaattagtgaattaactgcatcatttgctttagctgcattacggcaagctagtataacatgattattaatattagctttagcaatgtttttagcacattcataacctaatcctgagttccccccagttataataattgtttttttatttaaattaatttcatttaacataataacactccttctttgcaagtaacgttaacatattttatcattgacactgtcaacttgaatttattataatccctaacattgacggtgtcaatatagtgttgtaaaattatttataaatatattggtaaaagaggttcatatgaaaaatagtaatgatacaaaacaaaaattgattgatgtcacaaggcaaatgattgatacaggtggtgttgattcggttagtatgcgtgaccttggaaaagaaacgaatttatctagaagtgcagtttatgtatattttaaaaataaagatgatttacttgcagccattgtaattgaaaattttgatacgctaaaaaaccgtatttcaaaattaattggagaaataaatgatccaaaaaaacttgtttatgaagtcttatatgcattttatgattttggtataaagaatcaagagcattatccattaatgttccgcaagcaatggaataaggagcaatatcctaccctgcacatttcagccattgaagtatttgcactcttgtatgaatgtttggaaaaagctcatgaacaaaaatgtactgttaataaatcgccgaaacaattaaccgcaatggtatcttcatttattcttggtcttgttgagcttaactctactgggcatctagaaccagaaaaaggattagatgatccgactgatttaataaattcatttgtagatgttatttttatttaagtaataaaacattaacataaaattttaggatttattttatgagttatttactatataatatggggtggcggttttaacttggactttacaaattgtcccccctcatttcctaaaaactttgagcataaaaaaacacaccattcattttaaataagcgtgtctcttgaaccaaagtcggaaggtctgtacgcaatcccatcaaatgcagaataatggccattgcagtcaggtttaccttttggataatttacagttgcaataccaaccatattttcatatgctcttgatctcaactgtgaaatgcggtttatctccatagggcaagcgtttggtactaaaataatctcagtgcctcttagcataagaattcttgcgctttctggaaattccctgtcatagcaaatcattgcacctatttttacattaccttgggaagtgcctaaatcggcaacataaaaatcatcactggctgttaatctgcattcatctccaaaatcacaggtatgaacctttgcataggtaagttaattatattggttgatattatccattctttcaaatagtctgttatatctatctaatgctgctttatcctcgactctaattcctgaattatagaaagtgatgttgccatgcccttcatttaataaattcatttctttcaaaattcttttaagattttttgcagtgccaatgtttccatcgattatactaacatttgaaggcactaattttctaaccatatccttatagtaagaaaaatgggtacaccctaaaacaatagcctcataattatttaaatcaaatttaaataactcctctttaagatacggtaatactatttgttcatcaaactcaagtctttctgagaattgaactaatcctggaagaggaagtaagtcaacaacatgttcgttatctaatttataaataagattatgtaatttttcttcctttaacgtcaaagcagtggcagttaccaatactcgtttattcatatctttgtttttttcaatggcaggctttactgcaggctccataccaataatcggaatgctatatttacttctcaacgcctctattgctacacttgtagcagtattgcaagcaataactactgccttaactccttgttcaacaataaaatctatagcatttaaaatatactttttaacttcatcttttggttttggtccatatggaacatttgatgtatctgcataatatatataatcttcattaggtaacacttttaacgtatcatataatacagtgataccgccaatacctgaatcaaaaaaacctattttcatctttttctattcctccaataaataaaatttatatgctactccaatgaagctttattgtatcattgttttacataaatttacttcagcaaaacaattataacacatttggtaaacatcacattgttcaattttcaaagtaaaactactttaaaaaattatttttaaatttttgattatcgcaaaaaataagaaatctactattatgaaaattaccttattagtaaagacagggctgatggtgttttatatattcaaattatatgtggagctggcataactaattataagttacatatttataaacttgtaattagctttattatatgataaaattcaattacaagttacatcatcaagtacttgtaactcgtgattaaattatataatcatctcaaggggaggaattataatatggaaaaggataatagaaatttgatacaggttgatcaatctaaatgtactaagtgtggaagctgctccaaagtctgtccaactggtgttataggtatggatgaaaatggaccaaaggtagtaggacagttttgtatcgcatgtggtcactgtgttgctgtttgtcactgggcagcacttgacaatgtaaaaacgcctttagcaaatcaagtagaactagaaaaaacaccagttcttgacgaagatactgcatctcgctttctccgcagcagacgttctattagggaatttcaaaataaaccagttcctagagaaaagatagaacagcttttaaatattgccagatttgcgccaacaagtggtaattcacaaggagtttcctatcatgtaattgataatcctgatacattacgcaaaatcacatcggttgcaattgattggttagaagaggcattgaaacacccaccttatgctggatcaccattagaagcaccatttaccaatcatgtaagacactatcgtgagactggtgaggatgttgtattacgtaatgctccttgtctagtaataccaatagttcataaaaattcttcatcaatgggacatgacagtacgcttttttctctagcatatgctgaactttatgcgacttcaatgggacttggaagttgcattactggattttttgacgcttgtgctgcttctggttataagccattacttgatattttgaatttgccagaaaatatgaaggttacagcaggacttatggtcggctttccaaaatacacgtataaacgtttggtagatagaaatccattgcaggttacctggggaaaataataagaaataaattgtatgatttgcattaatttacattttaatgtgactgtgatttagataaccatataagaaatggccgataatagtcggccatttcttatataaaatatttacttattggaattcttaagtccttttattaaaagatttataacagattctatgttttgttttctgtcaggatcttcaaatgtgtttggatgaataaaaacgctggttgcaagatatacagatctcgcctcttgataaggagattctgtaaagaatataccttctgtaattccttgcactataaccttctcaatagaattaattccctcttctataccattttttattacttccattgatctctgagctagttttatgtagttcgcaaacatttccggatcattaatagcactgttatgcttagcttcaacaaaactttcgagtaaattactaagtttaacatctgcaggactatcttcttttaatatgttatttgacggagcatgcaaacgtgtaagccaacgctcggtaacagcgttccatagatctgtttttccattataatatctataaattgcagcatgacttacttttaataattttgccacgtcagttatattcgctttatctggtccgaaacggcgaattatttcttctgttgcattaaggatcgtttctttatctagcgatattttatccaaatttatcaccgctttcttattttatttttaattatatcatttttagttttatgtttcaaattacattaattgtaacagaattaaatttgttgtttctcccattcttttttcagtaatgcgtactgaaacgtattttcatatttaggaattccattttcatcttttataaacgaaataaattctaaaaaacatccctctttacgcatccctaatttttcacacagtttttgtgatcgatagttatcatcttcaacatatgcatataatcttctagctcttttttcgttgaaaaggtattgaaataaagctttcgcactctcgccagcatatcctcttccctcatattgttcattaaaattccatcctatggaataggtgtctggttcttcataaaaataaaataattctccaattaaattctcgtcatcattcaataaaacagcaatatgagagtcatcttcacttttctttttagcctctgatatagcctcctcatgtgttgttattttctcacctcgaaaacagttaactctaggattcgataaatatcttgcccaagcaatatagtattctagtctataaaaaattaaacccacttatgattttaatttatttatggataattataacatatcttttgaatatcctattattcaattttcaaaaatctatttttattaattgctatgcaaaatctacatatggctcaatattacacacatctaataatatcaattttctatatacatttttttaatatgtggacaatttatgcattaatcattataattgactatttatttgaatataaacgttattaatagtcaataatccatttatatttattactttttatacttcaatattttgtttgcataaatattattttcactataactttaggaggtaataccaatgatcccaacaaacacacctgacgtcttactaagaacatttatactttttataacattactagttttaaccagaatattagggaaaaaacaaatgagtcatctaactttttttaattactttactggaatcacaattggctcaatagcagctaatatgattcgtgaaaccgaagaacctttttgggatgattttatagggttaattttttggtgtgtattaactcttttagttgaatacattggcttaaaattcagtaaattaagacaaataattgatggtcaatctacaataattataaaaagaggggtaattttaaaagcttctttaacatctaatcgtgttaatttagatgacttattaatgctacttaggaaacaaaatatattctctattaaagaagtagaatatgctatattagagcccaatggaaacttaagtgtaatgaaaaagccacaagatcagcaaattactaaatctgatatgaacattaatattcctacaccaaaatacttaccatctgaaataatttctgacggaaaaatagttaaacataatttgaaagaattaaatttaagcgaagattggttatattctcaacttaaaattcaaaatatatctaatttagcggatataatatatggagaacttcaaagtgatggcacattatttctacaaaagaaataatttatatgcaaaatcttcttcttaacatttttatataacttatttcacataacctcactaacctttatactaactaaaaatacattacatgatgtttcaaaattaatcaggtcaacaaaaaacaccaattatttatatttctcatataaaatcagtgtttcttcgcttttaataattattttcttaaaattttatccatcgcttttccttttgctagctcatctattagcttatccaaatagcgaatttccttcatagttggttcttcaatgtcttccactcgaacaccacagacaactcctttaatcaaagttcgtaaaggattcattttaggagcttctgcaaagaaagtctcaaaatcagcctgtttttccagctcagcttctagctcttctttgctatatcctgtcaaccataggattatttcatcaacctctgtttttgtacgtccctttttctctgccttcataacataaagggggtagacacttgctacactcattgtataaatcttatgttttgtcataatacatcctcacttatgtaattttctttatttataatatttaaagcatttctctgaaattttcactaaaaacccctcctaataatattaggaatttataagtttaattgaaactattgaacataagaacaaaaatatactaactcctattaataaggtatattcttttttcttatttaacttgaaataattaatacccattattaattgttgtattcctaataacataagcacaattggcataataatcattcttagattaggtttcaaaatagaaaatattgctgttaaaatagttattattgatattgttatattaataattttgaatttagtattataatacataattatcccctcaaaatccatagcgagtttatttgcatttattcacattaatctaattatataccaattactttcaaatattcaataaaatcactttctacttataatatgatcctcccatagtcagaaagtaataaaacctttattacttctttttttagaattgtgtaaaaaaaatcgtaaatccaatgttgaataatacgattttaaaatttgctatttaattttactgattcataactatatggaaaatattcaacaaatactatataggactatacatattatttcatattaatttttcatacagtttaaaccaatccaatccgtagtttccaaggcccaaatcaacagtatcaatatattcaaatccacatttttcataaagcctaatggcaggcatattaccttcaaaaacatccaatctaattgatttaacttttgacttaacactatgcttatcagcaaagtccattagtgctttacctacaccacatttcataaatcttggctgaacagcaaatgtatgtataacaaaaacatctgaatagtcatactcaaatccccatttaacattataatatgccggttcaggctcatggcttaaaataatagaaccaatgcttgttccattatgctttgctacataaagatttccgtttttaatgccatcaattgcattttgccttacaggatatataccctttatccatcccggataatttacttcatctgccaaataatcatttaaatcattataaaaattttctaattcatcaatatcatttacttccccaaattcaatagtaatatccatatgtatcacctctaaatcaattcgaaatataaattttgttttattgcaataatttaccattacaaatcgattataacatatcttgtaaaagctatatcactcaattttcaaagaacatttttataatttactacgtcaaatctacagattgtaaattaccttaatgagaaatctgaattatcgcccataattttttaatatcctcaatataaaacttataaattagggctttaatcaaattaatattttagtatatataagtcttaaatttcttcataatgatttagaatctttttgattttttcataaataatagattttaatgattgtggtttcactgacttaatagacgtaccgtacctaaggaaataattagatatgaattcttcttcacccacattaaaaaatccctttataattgtctttgtacctaattctattttcatagaaggatagttttccttataaattttaagacctttttaatcttattaatttcttttatttgttctcctgataggcagttttcaaatttttcatttaatttttctatacttaaatgaaaaggcgtagactcataggctttcagtgtgagcattgcaaaatataaagcgtatacttcatctatggtaaatataataggtgacaataatctatttttcaatataacatatcttccgtacctaccttgctctgcataaataggcattcccaattcttctaatgaagcaatgtcatgtaaagctgtacttcttgaaatgttatatttatttgttaaatcacttaaattaaagtaatctaagtcattcaaatacatcatcatatggtttaatctttctgattttttcatatatcctccgttttaaaattttcctgaataaaggtttcatattttgacacctttgagtattatactctaattatatcaataatatagtcattgatatctaatttattatacaaaggagattaatattatgagtacaacgctagaaattgctattttcctttcaatgaatggaaaagcacaagatgctattaatttttacaagaaacactttaatgcagaacagttaatgattataacatattcagacctggtaaagatgggggataaatcaatagaaattaatgacgaaaataaaaatcacatctctcactctgttttaaaaataggtaagactaaaattatgcttaatgaaaatccaatggatgctaatgaaaagtaccaagctggtaataatacttctctatgtattcaaagtgctgatttggaggaaatccaacaattctacaatagcttaattgcagatgaaagagttagaataattgtaccattagccagtaatatatttagtaaagcatatggtattgttgaagacccatttggtattaaaattcaattatgttttgatgagagattaaagtaacaattattcaatgtatgagaaataagaggtttggaattggtttataatatggtgtttacgggtaaactgtattttattaaaggaggtgcagtattggatattaaaaagattcttaaaatccttaataaagaaatgaaagctactgaaaataatcaatcaagttaattactataacctaaaaataagctatagccaataaattatagtaaatcgagtaggatgaaaacaattattttgtttccatcctctcacaccactctatttcagcaatcaccctacaagggagccctgaaaatccgctcatatttactgggaaagtatatactttaaatggtttatctgctgctttttcttttgctaactcatctattagcttatctaaatagcaaatttccttcatgattggttactactttgaaactgtagacaaccccactaataaatcaaattacataattattttgaaataacttctaccccatcttctgttacaagaactgtgtgttcccattgtgctgaaagagaaccatcagctgtcaatgcagtccatccattatcctcatctataaatatttcatgacttccagcatttatcattggttcaattgtgaacaccattccaggcgccaaaaccatatctgttcctctttttccaaaatggaaaacaaatggatcttcatgaatatctaaaccaactccatgtcctccaaattctctaactactgaatagccattattttctgcatgttcctgaatcgctgctccaatatctcctaaaaatgcccaaggtttaactgcttccagtcctttatttacgcattctttagttacttgaaccaatttcctagcttcttcacttacttcaccaatcataaacattcttgatgcatctgaataatatccatttaatatagtagtagcatccacatttacaatatccccatttttaaggacaacatcgtcacttggtattccatgacatacttcattatttattgatatacaaatacttttaggaaatccatcataattaaggtctgctggaattccaccctttgatatagtataatcatatgctaatttatctatctgctctgttgtcatgccttctttgatgttttcactaatcaaatctaaaagaccattattaacctctgcactctttcttattccttcaatttgctcttttgtttttataagatctcttgttggtactatatgtccttttctttttaagtcacttaatttcttatcaaattctaaatgacaatttttatacttcactccacttttacaccaacataaatcatttctgtttaatatcataatattactccttgttttaactatttaattgatcctccatgaaaataacattcataaactttaatattaccaaaatatatttcctcatgcccttgaaaccacttaaattcaccatttataatgcaatgatatttatactgtccattttgataaataataggacctctatatggattctcttcagttactaaactcaaagcttcctttaaaaaactacctgaaaatctttcatccaaaactcttccagtataattcattgaccaaaatggaatatcatcttgccacaaaccttcttcccctgaaaatctttctccacctaaataggtatcaatatattttaagtttccttctacatattctaaatcatgcgaatttggtcttgaagatttacactctccaccatttccagcatacgtagcttttttagccctacatagaaaatcaattatatttctatttatattattaactttattttcttctattgataacctacaattttcttcataatcattgactaatttatcaatgcttactttaaagaactcacttaatgcaattaatctagctatatctggataggactgtcctacttcccattttgcaactgattgtcttgatatgcctaagaattcagctaatttttcttgcgatagaccttttgcttttctaagtgtttgcaattgttcctgaaaactcatagtttaacccctcctggtattagtatacttacaatattatcatatttctaccacctaaatataacacagttgacaactaaaagttgcatttaataaaaaagtaattctaataccaaatattctctgccttattatttgcttatgatgaatttctccgtaacatcagcaaataatagaactactcatcttttttattctgattcattgtcggtcattgctgatattttgttgtcctccatcaccttgttggttagaaacaaagctggaataattcctatcaccatgaatattatacttgtaataaaacctgcctgaaaagcttgatgctcttttttgtaactcaagtgtcggtcctttctgcttatcaccaatattccttaatataaagcagcccagaagcattgtaatatattgcttctgggctgttttttcgcctttatttacgatactgttcaccgcatcgctgtcaagtgctatttttgcctaagggaagatacttaatgattgcctgatatatagagaaacttagtataattttaatgtctatttatcaattaatccaagttcaatcatactttttgcagttgccacgattgcttcttctgctggtcttggctgccacccaagtaacttcttagcttttgcattgctacaagctgtgttttgtcctaaaaacgttgctggcatacgtaaatcctttttaaaaattgccataaatttaatcataaaatccggcagtgccttagtagatactttttttgctgtacttcctaaatatctctgcaaaattttcgcttcttctttatatgtcagattttcacctgtagtagcaataaatcgctccccagctgcttctggacatgtcatcgcaagcaaatgtaattctgcaacatctctcacatcaacgtaatcaaatccaatatttaagaggaatggcatatccccctttagcatcgcacgaataatctgattagagtgggaaaaatcctgtccaagtacaggtcccatgaccgccacaggattaacagctgagagttccatattctctttctttgcaaattcccaagctgcaagctctgccatagtttttgaacgttggtatgcatcaatattgcctgacaagtcagtccaatcttcctctgtgaaaatttccggatgagatttatggcctgaaagcactgcccctgaagcagaagttaggactacacgtttaacacctgccgctttcgctgccttcattactcgcagtgtaccatcaactgccattttcaccatttcatcaccatcatcaggacgtgtggctggtgttggtgatgccacatgaataacataatttgcatcagttacagcctctatccagtttatatcacttgtcaaatctgtctgtataaactcaagattttcaaaatcaactgctccgccttttgcaagcattgacttaacctcatcttggcgtgacaatgtacgaagtgttgtacgaactcgatatccccgtttcaaaagctttaatattatgtgtacggcaatgaagccacttccgcctgttactaaaactaattctttttccataataaatccccctcactaaagtttcacttgtaacctctgcgcaattagaatatactattatcaagatgaaatcaacacatagacgatcatatgtgacaataagggaggtattgtaatggcagcaacaaatcactcacaagcaatcaaaaaagatacaaaggattttataacaatagctatgctgcagttgcttgcaacagaaaaattatcagaattaacagtttcacaagtttgtaaacgggcaggtgtaagccgcatggctttttaccgaaattttaacgatctcgagcagattttgtatgagtattatcaaccaaagattgcagctgtattttatacgattcatcaaaatccatccttctctgataaatttgatatccaattaaagtttttcagtacctttagtgatgatttactttcatctgttgaccgtggatatgaaccaattattcagcagatttttatagaagaaataaacaaattttatgctcctgatagtggtgaatactggacaactttcatgtcagcaggcgtttatgctgtttggcgaaaatggtttctaagtggacagcaaaaaccgctccaagaaataatggaattctttaagcaatttgatacattaaaaaagactttttaatatttatgtttaaatattaaaaaaagatagaacaattatctctaaatgttctatcttcattacgctttattttttataaattttatattgatttcctatattatctataatatttttctaggattttatccaactagattttccccagccttaaatgctcttaaagataactcctctaacgctgttaaatcaggaacaagttcagctccacaaacatgaatattatcctctgatttccagccatatgtgttgaagatattagtaacatatttaataccttctgcacctacttcaggatttgaattagcttgagtaaatattgttactacctttttacctggctgtctaggtgtaatggtgtttccatcatggtcaatcaatggaaatgtacggtctaaccaaacttttgcttgacctgtaatttgatagtagtagattggagaaccaaatacaatggcatctgcttcattaatagcctcatacattggtttaagataatcattaatagcacaaccatcatgggtacgacaatagaagcagctttgacatccacgaattccagcatcgtttaaattaaattctataatctcagcacctttagactcagcaccttttgctacttgttctaataattttgaattatacccattctttcttggactagcattaaaaataactacttttgacatttaatatctctccttttaaatacaaatatttcttaaattagattaactatctacttaccatatttattctccttcatttgatatttactcaaataaaagtacttggtataattattgtacttaaataaatttatattaacaagaacgcagaatttaatgattaggtattatttttcttacctaggaggattagatatggcaagcaaacaagaattagagaaatatttaaatatagtgagagaatcagattttaatgaaaaatgccctataaaagatgcattggaagtaatcggaggcaaatggaaactgaatatattagggcagttactaagaaaagacgtatgtcgctttaatcaattaaaaagagacgtatcaggaataacaaatacaatgctagcaaattcattacgtgaactcgagaatgatgaattaattattagaaatcaatataatgaaatgcctgtaagagtagaatacaccttaactgataaaggaagaaatctgttaccattactttatgaattaactatttggtgggaggattatataaagaataaagaaatttcaaaataatatattgaaataaaccaggctacattttggaatttatatccacaatgtagcctatctttacacattcactaagcaaagcccgtcgtgtaattcctcagatcttatttttatcctataacttcctttgccatattgatcatgtcatccttgcttagttcagtataatccatattaataatgcaataagatagtccatcttcataccacataactgattgattttgactaacctttatttcatctttttcacttccatatccaatttcaagaagccctttatcttgtaaatctttttcttcgtctgttggtttatatccttctggaactgatttgtattgactactagtatatatgattttaactccattatattctacttcagaagcattttttggcatgtttccataaaaagatttgtcatctgttttttcagctgacatggataaaatttggccctttttagaaccatcttttttataatcaaaatctgcgcttttgtatttttcagtagcatctcctttttcattacggacttcattgtttacataattaaatgtatcaaatttaaatccattattaaaggattcaacatatttaggggtaaatccaacagtctcgtttactttatctttacttggaaaagttctaatttcagttagatgagatgatgaaccaaatattccagaaagattagttgctgcaacacatgttacggttgttgcaataatgaccattcctgcaattatgaatgtctttggatttaataatttatgtttcatagtaaaaactcctttattatctttatcttttaatatttcatttctaattctgaaaaacatattttcagatattgaagcatcatctgctttatgaattaaggctcctctaattttttgatctatattttcatcaaaatttttatccatcaagtcccaccctctttaaatttctatgattatattcatcgttacatttaattaaactgctttttaatttttttcttgcactatgaagcctggatttgaccgttccttcaaagcagcccattacttttgcaatttcgctaactgtaagaccattaaaataatatagaactattactgttttttgttttaaatcaagcttttcaatttctgcataaagattattattttgctcttttcttaaatattgctctatagaagtatcaatatttttttcatctaatttttcaaaaatgttatcaactggcagtgattttttatcttttttcgcatatctccacgcaattctcgtaagcattttaaaaaaccatgatttaaaaaattcaggatttttaagactttttatatttttataacagcttataaatgcttcttgtacaatatcttcacttgtatacttgctacctgtaataagatatgagtatttgaatgattcatttttatatatttcaaacaattcacctaatgcgttcatatcaccagactggatttttatgacaagttcttcttcagacactttgctctctcccttcgattcttatcgatgcatctatatattagagacattaagttattaattggttcatttttagaaaaaatttttatcccttcaatttataccagtgatatccgtaattttatctaaattaacatctatctataaataataaatagagtagcatattgatctattattttctagttgctcactatgagaattatggtaaatttaagatgaaaattttgaagaaatggtatacaataccattgaagacaaaatttcttacaaagttttacatacaaactatagtaaaggagatagatatttatgataaataaaaaattgatcaaaacccttggtcatatatttggaatcatgacatttatgttagcttccggtataacttatacgtcagcttttgctgatgatactatagcaacaacggcacccgctactgctacaaccactagcgcgagtgctacttatacagataatacagctacatcaattaaagattattctataactataaataaaagttcagaagaaaatgggattaaggtgactgttaatagtgcactatctacaaaacataatttaaaagtaactcttaaaattgaaggaatcactgatcctaaagcaattgaacataataattcgctttttgaagtatcatatggtgacaaagattacggctttaactctacctcttctagacaatatgcagatgataaaactatgtttttaaccttagaaaaaactaattatgaaggtgaatatcctgaaagtggaaacttaagagttgatgtagttctttcaaattacaaagttaatattggcatggatatacctgtagatttcactaattctattaataaagtatttactaaaaatatttcaggcacaatacctgaaattaattatactttgaaacaattagattcagattccatggggacaaccataagttatactgagcctaaacaaaatgaggctgatattgataacaataatgatttttgggattcacaaatattattaaaagttgataataatttttataaattaggctctaaaggcgatagcattagagacgacggaacaattattgggcattatacatctaaattgccagtttatgatattgtaaaaaacggaaaggatataagtataattccaatactttataaagtatcaatggatgactctgatatgatatccgatagtagtaataaaaacattaccaatgattctgcaaacaacttaagttatgaaaaagagttcagctcttctagcggattgaaaggtacaatatataatgttgaaagaaatgataatagtgtaaaggtatattgcaaaggacagtctgagttagaaagtttaattatagcaagcaatatttctttaaactacaatcatgttaagggacaaaagtatactactatttataattacaataagtttgcaagcttttataaagatccaaaagattcccttggctacattgtagaatttgataatgttgaaaaagataaagctgctgctttaaatattagttatatgctaaaagaaattagtacgtacaaaatgagtgatgaaataaaaacatcaaattaatgaactctatattgaatttatggaaaattatatcaatacaaaaaattattaaagtgaggagattttatgataaacaaaaaaacaaataagttattaagttccatgattggagctgctttaatgatcggacttattcaaatgcctgcctttgctgttgataatgtacaagcccaatcgtcctatgcagttaactctggattaattggaaataacaattctgttgagcaaaatggagtcaaaataactctaaatagtgttgttgggacaaaaaataaactcaaagctacaatcacaatacagaccccaacgccttttgataaagatgacagagaaacagcaaatgttttattaaactatggcgaaaataaatttaatggtggaagtacgtcatttaggcatccagatgacaagacattagttataaccattgaagatagatttaataaatctgcattacctgaaaaaggtcctttaagaattgatgtcgtaatgcaaaaatacaaggttaatgttggattagatgcaaacgttgatttttcagactcattaaaaaattcaatggaaaaggattattcaattaaaattcctcaatttgattctacatttaataagttagaatccgatattttgggcactcatctttctttcactgaaccggaagaaacttctttaatgcgaaataatgatgtattaaccgaacattcctttatcttaaaagctggagataaaatgtattcgttgagacattctaacagctattcatctagcagtgatgaaaatgacaggtcaatagtaactacttatcaagcagaaggagcaacttatgaaaaaataaaagatcaaacatctataagcttaatacctataagctttactattaactcaaaggatcaaaaaaacttatataaagaagaacataatgataaagacatgcaaactatcaataatgtaagttatgccaagacttttgatttttctgatggaagtaaaggcgaaatctataatattcaaagagacgataatagcgtaaaagtttatctaaaaggagtaaatgaaaaagaaagtttattacttgcaagtagtttgtttatggattataaagatgagaatagtaaaaaagattattatgatcatgattattacgacggtaacgaacgcactactttctacagagactcaagtgattctttaggttatattgtagaatttagtaatgtaaaaaaagatgtaaatactcaaataaactatgacccaaccataagtttaattaatgcatttactgttggagatgaaatccaattatccaagtaaatatatcaaatctataatctaaatctaagcatataataattactgaaacaaatgaagcctcactatagtatccaaattatagtgaggcttcattttattaagaatattaaattattatcaaatatataatttcttgcgtctattaatttaagagactcaagaacatcttaatgattcattctatgaacaaagtgtttaaaactttagagatagatttctcaaattcagattctattatatactattagaattctttattctaaactttaaatttatttgcttcttctatcatttcattagtcatatcactaagcatttgtgcagaagatgctacttcttctgttgaagcattcacttcctctgatgatgctgaaatttcttctgctgatgccgagacttctactgaaattgaagataatccatttattctattcaaaatggcattcttatcattttctatgttatcagcagaacttttaactgtttcaattttaggaatcacttcatccactgcttgtattattttcttgaaagatgctattgaattatctataattttaccttgatttctcatttcatcatccatagtagtcgattcctgaactataatatcagcattgttagatattaaacttattaatttactaatattttcagatgattcttttgattgttcagcaagctttcttatttcatcagcaactactgaaaatcctcttcctgcttctcctgccctagccgcttcaatagccgcatttagtgccaataaatctgtttgttctgcaatactatttataaggcttgtaatctcatttatttcgtttatgtcttttccaagcgatataactttactataaaactctttaaatgaattacttacatttattactgattgatttaatcctttcatttcgctactgctatcatttgccattaaacttatttctctagaattcgaatctacaacttgtatctctttaaccattctcgataacttattactaaattcatcaagaatatctgttatatttattaactcttcagattgattgcttgtccctttcgcaacttcagatattgcttctgcaacattatgtgatacgcttgctatctcttctgatatcgatgctagattttctgattgtgaattaatatttgaagaattttctttcatttttttaatcattgttcctaaagattcttgcattgatttcattgcattagtcataacaccgatttcatcttttgaattcaaatacctagtagaaacttcttcacataaattaccttctgctagtaattccaagtgctttgatgtagactttattcctttagatatactatttgaaattatgtatattatcccaagtccaattaatatgaatactatagatgataatgcaactgaaatttccaaagtgcttaattctgataatatttcatttcttgctattgtaactcctacagaccaattagtttcttttactggagcatagcttataaatttatctaccccttcatattgatattcacccaatcctgtctctccagaaatcattttcttttcaacatttgctaacccctgcaaattggtatccttttctgccgcctcaatcccattatacatttgagtaactaagtccctatttttatgggctattactactccactgttatttatcataaatgcagcacctgtttgtccaaacttaacctgatctgtaaaatcgcttaagtcattaccatcctgtgattctgctaatactcctacaatctcattattgtatttaataggaactgcatatataactagaagacttccatcagttttatttattaacggatctgatacgctgcttacaccattcatagctttcttaaaatattctctatcttttacattagaagttgctcccaatgtatttgtaagatttccctctttatctatataacttagtctactgcaaccaatcctcttaacttcacctaaaagaatcgataatttgtcttgtaataagctattaggatcatttatatctggtcttgcggcaatagcctctagtgaatttaattctccctcaattcttccttgaatattatttgcggtttgctctgcaattttaggtaaagtcttatttaaatttgactttaatccatttaatgagcttataaccgaaactatgcctaatccaatacatgcaattcctattatcagcccaaaaaataccgttaattttgtttttatacttctcataatatccccctttaatataattaatacttggactcaagatgattaatcctctttaatatcaatcccaaattcatattttatacattttttgacctaataatattattataccatcttttcatcaaaattcgtattattattatcattggttttcatgaaatattttgctattttaaagctattctctatattattggaaaagcatctctatacatggtcgaatttgctcccataagtcatatttctttaagtattccgtagccagcctaagatttcctattatcttttaataaaattcatcatcactacttccatttaattccaaaccttattcatcaatttgtatttgttatttaataatcttatttctatataaaattttatgttcataaaaacataacaactattattagctcaactctataataaattttgattattatagggtaaaaaaaaagactccagatttataaaatggttcctatgtcaaggacattttgaaaaaggctaggcagctatgagctggtttctgtattgtacaggagccagctttttaagtccccactgatatctataattattataatactccatata

SEQ ID NO: 11 - DNA, 107222 bp, Clostridium beijerinckii
aactgtatcaaatactagaaaattattataattcacaattaataaatctattttataggaaataatacgagtttaaaaggtatgattcattatattttacagccatcttaaacaatttattttttattaattttattgaaacttttccatttttataatcttcaatactttttaaaaagctcattttctctttatcatctgctaaattcttaaaatatccccatacatgtaatgcagtatttattgaatttccaattgttatttcctcttccatggcatcttcaatataattataaaacttaaccgctggatactgagttttatctttaagcagcttccttatttctaagtaatttgaaggagaattctctaaaaccttgtatttatatcttccccattcttcctcaagtttttttattttagtattttcagctatagaatttatacactttacagctgaaaaatttttatccttaacttcaagcattatatctatatctttcccttttacactttcatagaactctataaacttattaatttttattgtatttgaatgagagcctgccttttttaatgggtcttgctgagaataatgtattttctgccttccatctttctctctccatgttttattgcactcacttatccaatatgaatcgcttttttctctatcataacaatttatctcattatgaagattatcaaaaacaactggaatatttagtccatttcctattttaagaacatcatttatattgtacgatttatcatcattttcaataacaagtctttctttcacctgatcattcaaacgtttataattatctgcgaatctttttatcgcctgctctttatcattataaactccaccaatatgcaatataattttatgattttctccaattccaaagttatccaaaactttaacatgataatttaaatcttcaattgctctctttacaacatcatcattaggagaattaagcactgtatattgccctggatgcatcgatacccttatatcattatccataatctttctacctatttccccaaattcttgggaaaatatattccaccatgataattggttcaaatgactggatccgaatggtattaagtctgaactaatcctaaaaagctttatattattctttatattatattcaattatatttttaagagatttcaaattatacgatattatttccaataacttttcttcagttaaactcttagcagtgcagctttttagattggcatctggaactcctattgttaaacatgcatatcctatactcattctttaatctccttttctaagaatcataattactcatacctttgccttagtactcttttctaaacaaagtcaaaacccattctttaacttgtcatttttaaaatatgataactaaaattaggacttattacaataagtcctaataaaataacaattacatattaatttttatttagattttctttatttaaaagcaggaatccaaaattataaccataatcataagcatcacttaactcactctcacttggtttgaatttaacacggaatccttcatcaacaaccttcattctaagttgctttagtctttctataatatgaggaacagcttccccactccatccataacttccaaaagcacttgctagtttattaccatgagttcttgcaaagattgaagtagttaaatcccatattggctttagagcctcaccaactattgttggtgaaccaaataaaataccatctgcaaattctagttcttcaagaactttgtctttatctgcctctaccatatcataaactctaacatctatatctccactagccttaattccttctgcaatcttttctgctaattcttttgtatacccatacgcacttacatatggtatgattactgtctttctaggatttggatttgaaacattagaccacttcttataatattccataatttcatctattctacagtcaagaactggaccatgtcctgtacaaatcatatcaatttctaaatctttaatcctatctaatgctttaatcatgaatggattcttaaaaggtccaataatacaatcgaaataatatttaagagctcttaaatatccctcattatctgtaaccttacttagtagaattccttcaaaactataatgagaaccaaatgaatcacaagtaactaaagtcttatcttcttcaatataagtatacattgtatcaggccaatgtaaatttggtactgacataaaacgtaaagttttgtcacccaagcttaaagtctcattttctttaactattattccattaaattctctgttaacaatattcttcaagaatcctatagcaacttggcttccaataatcttaatattaggattcatttcaataagtttttctatactccctgcatgatctggctcagtatggtttactacaatatagtcaatatccttaatatcaactagcttatttaacgcctttaaatatccatctaaaaacttagcctttgcagtttcaaataatactgttttttcacttgttttaagtaaataagaattataagaagttccaaactctgtttccatgataatatcaaatacccttaaattggcatctaatactcctgtccagtataaattttttttcaattctaatatttccatgtaaaaatccctccctagatatatttcgtccaaatcagaacattatacaccttttttgtataacaaacaattaataatacctttaacatcgttatactaatgtatttcgccatatatattatacacaaattcttatatattttcataaaaacatataatatattgctttttcgttaattgactatatatttgcaaattctaagtataatctcgtacttttttacttattcctctacaaatgttgtttatatatatctgaaaattcaatatttattttttctacacaagtattaattatattattacttatattaactctttctttacttttatttaatacctttactggaagtttaatcgtaaatttagttcctaccccatatttactttccactgatatcgtgccatcatgcatctctactaaggactttacgagagataatccaattccgcttccttcataatttcttgtaaaagatttatctacttgtctaaatctatcaaaaataatttcaactttttcttctggaattcctatacctgtatcttctacagacaaggttatatattcttctccatcaaatatatttacaaatatgcttccatcatcatctgtaaactttatgcaattagacagtaggtttaacataatcctttcaattttatcaggatcacaagcaataattttttcttcaacatcggtatcaaatataaggtttatattgttattgcttatataaccagctactgacagagtgatttcttctacgacactgacaatgttacaattaatcatatcaatctgaaaatgtcctgcatctaatttagttgaatcaattaaattatttattaaacgaagtaatctaaaacaattttgtctttcaatgtctatattattaattatctttcctttgtcgatcggtttttctttatctaaaagatctcttcttagaatttgtatcacacctagtattatattaagtggtgttctcaattcgtgagaaatattagcaaaaaattcagttcttaatttttctaattccaaagcctcttcttttgattttaattcagtattttttctttcagttatgtctcttacagttgcaataatagccttctgctcattaaatattattgcacgactattactctcaacccaaaactctttatgatttttatctattgaaatagcttcaagggttactggagtattaatcttatttttctttctatcattaatcaatttaagtatatcatcgtatatgtacggtgaattttttgaaataatatcttttatactcataccaattagttcatcatgtagatatccatatagcctattagcagtatcattaacgttaactataatcccattaaaatcatgaatcaatattgcatcacttaccgaattgaaaatagtgcttaagtaaacttcacttttctttaatttcttatttgtttgctttaactcatctataagcttaatatttttcattttcaattcatatgtctccaaagccctttttacggaaattaacaactcatctgcctccaatggctttaaaagaaatttataaatatgcccttcattaattgaatcaataatatctttcacatccatgaatccagttaaaataatacgaattgcatttgggacaatagatattgtttgctttaataattcaacccctgtcattcctggcatgcgctgatctgagataatcaaattgatttttttagaacatgattcatctttaagtatatttaatgcttcaaacccattttctgctttgattacatcatactcttcttctaagagtcttgttaaagcctcaagatttgctagttcatcatcaattaatagtattgtatattttttatctttactatctgttttattaagttctctaagcttgtccttatttataacaaatttcatttatcttctccttactgaaattaaaatataattttagattatggtgccttattgattttattattaatatctttagtaaggaatatgaatagttatagtcgatccttcccccactttagattcaacatcaatagttccattatgtttttcaataataccatatgatatagacatacctaaccatgttccttgtcccattggtttagttgtaaaaaatggttcaaatattcttgatattgtatctttagtcataccacacccattatcacaaaattcgattataatttctttgttattgtcaaaaactcttattactattaatccattattttcacatactaagtcattttgcttttcaactatagcatgacacgcatttacaattatatttaaaaatacctgatttaattgtgaaggatagcacactatcttcctatgagtttgaaagttcttaataaatttaatttgtttagtatattgagttttaactaaccttattgtcgtttccaaagcttctgaaacatctatctcttttttaacagcctcatcaagcctagagaataatctcaaatcgttaactatggttgttacttgattagatccatctagaatattaattattgatttagaaaatttgttgaaatattgttcgaaaaaatttaacacatcatcatccgcatcatctaataattccataagttcttctttaaaattgtataaatccatatccagaacttttgaacttaaatatatgtaattaatgggattattaatttcatgtgctacccctgctactaaagtaccaagactagccatcttttctgattgaatcaattttgactgagctgatttgagcttattatgttgatcttctaactcagcaagagtctgcataagttgttttgttctttcattaactttatcttctagttcatcattaacgcgtttcaactcttcgctaatttttttacgttctgtaatatcattccaaacaaatattatgcattcaatacagtcaatttcaattatttccgttgaaaataatccaactctaacttctccatatttagtattccaagttatctcttcattacgcaacatacctccactatctaatatttgaatcacattcaaatgatgttcttcattttcccacaagttaaactcatgggagtaatgaccaattatctcttcacgtttatatccaaaagtgcgtaaaaacgcttgatttatttcaatgtatagcttatcactaaaccttacaatagcgattacatcggcgctataattaaacgccttattgaatttctcttctgaagatttgagttcacttattgcttcattcctctgctgaatcatattatataaattttgagacatattattaaatttaatagccaattcccctatttcatctcttgaattaataaataatctgtgagtcaagtttccatttgatatctcatcagttcctacactcaactcatatatagacttggtaacaatacgggaaacaatacttattgctaaccaaagaagtaaaaccattaccaagattcttataattgtagcaattatgtaattttcaataacttttgatttataataccttgtaatacctatagttatctcacctattggtatttcatcttttaaaacattaaccttctttatgatcaaattctgctcagaatatatatcatcttttttatacttattatatatttctccatttcccttagctttaacttgaatataaccaatttcctcatcctcaaataatgcatcactaatttttttaattcctacaatatttaaattccaaattgggtcttgatagctaagtgctgctaatctagtgattgtttcaactttttgcattgaatccttatttattcctgcaaccaatattattattcttattatttcaaatattaacatggtaattataaccactgttaatgttgaaattgtaaatctgtgcttaatcttcatattcctgaatttcttttttacgctcataatttaacccttatttacccatatgatttaatactggaatgtactctttacttccaaatagatcttcatactcaaattctgaaatattatcctttgaaattataggcacacacggaccactttggaatggaaaatctatccctgccttttctccatttaaaattcttacaatcatatctagtgctattctacattgttggatagtttgatctgatggagaagctaatacagatcccttttctattagattaaaaacatcacttgtcatgtatgttgatacaattcttatatttttaaatttctctttgcatttagcaataaatttttcggcttcaattactgctggagcacaaccaactaaataatcataatcatcattattttccaaaacgcttgttatatgtaatcgctgcatatcaggtctagtgtctccataaaaaggattactaatatctatcttttgattatttttctttaaccttgaaactgcatctttaaagccatttaatgtatctaatgcccatcctgattcttttggcccaggaaaaaatgcaatttttatatctttacctgctgaatcttcaacaacatactctcctgctttatatcccatatcataataggaaactattgcttttgcgctaatatcaggactattaatatcatttactagtgcaacaataggcttatcataatgaacaatattctctacatctgaattaaattttgtattatctaatgtagcaaacactattccatcaattttatcatcctcagctaaatccattagctcctctttttggtttccaaactctatatagcctccaactgcatataactttaccttcactcctaattcctttgcataatttattattccataattcgctgagacccaatattgatcttcaaagtgaggcagcaaaacgcctattgtatattccttcttaggcttaatatgcctccacttttcttttacaacgcctctcatatcaccctctttactatttgaagcagcatcaatattataatagctatttactattaacttttttttacctatttgtgtaagaattctatcatcatttgtctccactgttgttatactcttcgatacacgttctctttccacgtattcttctttttcttttctgacaatatcattagatcctatgttcttgtgattttttatatatgctaatcccaatataaatactactgacgttatcaaaattgatagtcctaactttctattgatatattttccaactttcgtagcaaagcacatccttactttcaagctctctatggatattacctgcagtattactttaatcgtcattaaactccattaaacttgctattctactataatctttatgctatcttaagtttaatttttttactataatttgtcaaaacatactatatgacaatattctgcaaaatatattttatgctcagtataaataagaataaaataaaagcactataccagaaattccagtaaacagtgcctttgaaatactatatatttaattgttagattttaataaattcattttttaattctttagcggctgtagtaatatcttcctttgctataatagcagaaactattgcaagtccatcaattcctattcctttgaaatccttaactctatccttatttattccacctattacaactataggtatagatacattttctctaatttttcttaattcatccatactagttgaatctgcgtcttttttagtaccagttgaatacatcgcaccaactcctaaataatcagctccatttttttctgcttcaagagcttcatttacagaccctgttgaaactccaaggattttatcatttcctatgacttttcttacaattgctgcaggaatatcactttgtccaacatgcactccagccgcatctactgctagtgcaatatccactctatcatttattattaatggaatattgtgtttatctgtaatttctttaactctcacagctgtattatagaagtcgagtgatgaacaatctttttctcttaattgaattaatgtacatcctccaattatagctttttccacagcttcttctaaagtttctgtactcattaaatctctatctgttacaaggtagatactataatctattttaggtttcatgaaactcctctctccttcatattatattttagataagttcacacattaatgcgtgtatttcatttcaatgatatacacgcaaacattgtttattatatttcctttatcttattcatcttttcaatgatattagaagtcaaattgcttatggcatctataattgcaatatgaaaacttcctgttccaatcttccctgctttatccaaagcaatttcacccgatattcccattgaaatgataccagaaactgctcctataaaataatctgaacctgccccacaaaacgctccaattaatgcagttgtcatgcagcctgttcctgtgacgttagataacatcttagttccattttcaagtataactactctttctccatcagatataatatctgttgcacctgtaatggctacagtacactgaagttttttagctaagtttttagctacatctattccctcatcatttcctgttcttgcgtcattttctgaggcatcaactcccttagttgtagagcctaatccgcttataaatttaatctcagacatatttccacgtaaaacacttattttcacttcttctaataatctctttgttgttgaatttctaaattctgatgctcctgctccaactggatcaaaaacgactggaatatttaattcatttgctttcttaccagatgcaatcatagattcaatagttcgctcatttaatgttccaatatttattacaagggcagatgaaatcttagtaatatccgctgcttcttttatatcatcagccataattggtgatgcacctattgcaagtaaaatattcgcacaatcattaactgtaacataatttgttatattatgcacaagtggtttcttattcctaacttcatttaataaacttcctattttaattgatatttcattactcataaatatcttttagtaagaattcattctttaatgatccttactaaaatacctcctctcaaaagtaaaaatttttcaagtttcttttgcttgatatctatgttgcaattatgaacttgcatttaaaattctagtaaactaagtactcaataaaaataatactatagaaattcaactgcaacatatataattatacctcatataaatcttatttctggtcaagaagctccactttatcgccatttaaaattctgttagttgttcttactgcacacattttcccgcacatagaacagctatgcatatcttctggtggtacactttcaaaatattctctagcctttttcccatcaatagcaatcttgaacatctcttcccaatcaagtttttgacgagcatctgccattgcatcatctctatctctagcccctggaagtccattagcaatgtctgctgcatgagctgcaattttcgatgcaataattccttctctaacatcagataaatcaggaagtcttaaatgctcagctggtgttacatagcaaaggaaattggctccatgtgttgctgcaatagcgccaccaatggctgaagttatatgatcatacccaggtgcaatatctgtaacaagagggcctagtacatagaaaggtgccccatggcataatcttttttcaatttgcatattagctgcaatctcattcattgccatatgacctggtccttctatcataacttgtacatctttttcccaagctctttttgttaataatcctaactctataagttctgtaatttgtccagcatctgttgaatcatcaatacagccaggtctcatagcatctccaagacttattgttacatcatattctcttagtatatcaagtaattcatcatagtattcataaaatggattctcatttcctgtcatctccatccatgcaaatagcaatgacccacctcttgatactatatttaatcttctcttatcttctttaaatatcgaaactgttcttttatttattcctgcatgaatagtaacaaaatcaaccccagctttagcatgagctaacaccacgtcaagaaaatctttagcttttatatctaaaagatctttttcaaggtatccaattgcatcatacataggaactgttcctatcatagctggagaatattctataagcttttccctgaactcttgagtcttcccataattacttaaatccattattgcttctgcaccaaaatcaactgccatttttactttttccatctctctgcaataatcaaccgaatctcctgatatccctaagtttacatttatctttgttcttaatccatcaccaatcccctcagggctaagtgatttatggttgatattagccggtatagctactttaccttctgcaacaagtttcattaatttttcttctgaaattctttctttttccgctactattttcatttcctttgtaactataccttttttagctgcttccatttgtgttttataattcatttctttccctctcctcataccattattatttaatttattagttataaaattcaacttgagttctatagtattattcaatcattcctgctttcttatatagctcgtaaaaatggttagtagggcctacacctttaccaagctcaaaaccatgttcgattgcacatgttatatattctttaccacttctaaccgcttcctctattgtcatattcttagccaaatttgctgctatagttgaagataaagtacatcctgttccatgagtatgggtagtatttattctttcttgttttagaataagaaagctctttccatcatataacaagtctgttgcttccccttctaaatgcccccctttaactaaaactgccttcggaccaagttctttaagtttcaaggccgcttccttcatttcatctaagttttctattttcatccctaaaatttcttctgcctctggtaaattaggagttattaatgttgctaatggaaataattccttaactaaagtatcttttgaatccttcgataacagattaaatccacttttagaaatcataactggatctagaactatcactggtagtttatcaacttttctcaaagattttgatatagcttttatagattcaattttagaaaccattcctatttttatagcatctactcttatatcttcaaaaataacatctatctgagattcaatcatttcaggatttatatcttgaattccaaaaacccccatagtattttgagccgttaccgctgtgataacgctcattccatatactccatttgccgagaaagcttttaaatccgcttgaattcctgctcctccacaagtatccgatcctgcaatagttaatgctctaaacataaactcatcctttcacctataatatttcatttaaatcttatctatgttattagttgcttctccctttacttgaaactcattatctactagtatttttttaatgacaggaacttttataaaaaagtacgctataatcgctccaacactgcaacttgatataaacggaacaacatatacaaaaaccgcaacttgttttcctaacaccattgtagctataggataagctaataatgctcctaatattccagttccaattatttctccaattactgcaatacctggctttctaaattttttataaagaattcctgcaagtaatgctcctaccatgcttcctggaaaggccaataaacttcctgttcccataaaatttcttattagagatgtcacaaatgcattcataagagcatatactggcccaagtgttattgctccaactacatttacgaaatgttgtattggagatattttagcagctccaatcggtattgaaaatgttccaaaaataacagaaataccgattaacacgccacttaacgccatcttctgtgctttactcttttctttcattaaaattcactcctttaataataaaatcaataaacttactttttaatgtgaaataaatttactaaatcacctttacaatgacgtttaaattgattaaccttaaaagaagttaattattttgcataaaaaaaatgtatccacaagggatacatcaataaatcatgcacaaatcatatcaatacttacacaaataatattaatatacttccctacgctggtattatccaaatcaggttataagagtctaggaaatcaatctttccaatctcagccaaaatattagctcccctagttattcaattacaaaattttctttcacaatttaaaggttataccattaagtttcaaacgtcaagtatattttattattttgcttcattcaaagcatttgttaccgcactcatgatacccttcgaactataagttgctccagatacagtatccactgatgttgattgttttgaaattatgctcttaattatagtaccctctgctctttgataaaactttggagtatcttgattggatatagcttgtatacttgatatttttccatcagacacagttacagaaatcttagttgttcctcctctatatcctgttccacttcctgtgtatgtcccatctttatattcacttgcattattttgaactgtatttgaacttgtagtttcatgatttaattttgaactttctggtgcagattctgtttgtgaatttaaattgcttgaaactgcattactcttagctgcaattccagatttagttactgcattgccggcgaagttagtgaatccatatatacctaaaaatgtagccatagctactgatcctgttaacttagcatctaaatctcttccaagtacatttacattagcattatttctgtaacatacttcagtacattttaagcaatttatacaatctccacctttgacacaatttaccttatagagcggtaaccccattgaacaattcattgtgcaggctctacatttaccacaatcagcttttggcttattaatcttaactattccaatcttagaaataatagagaatattgcacctaaagggcatagatatctgcagaaaaacctctcaataaacgctgatcctattgtgattaatattaaaaatatcaatccaacaagtaaattcgaaaaaatagtagatacatcagttatttgaccaaatacatcccaagggcttgtgctttccagtatactgcttcccatagtccatgaaatagctattataaaaagtaatactaaatatttgaaatacttaagtatagaatcaactttttcatctactctaaactttattgtgaatattttttttgatataaaatatattaagtcattatatgcaccaaatgcacatatccaaccgcagaaccatcttcctaatactatagtcaaaagcataatagctataaattctattaagcttggtaatgcttccaaaaagttaacattaccattgataatcatttgatatacagtttttacttcactgaatgtcattgaataaagacctggtaacagaataaatgcaatcaattgtataatatgccttataatctgcgatttttttattttacttaccatgtttctttccccttttctaactctctatatttagcaataataattttttatgttaattatcattaatcatatttttccaattaatttccaatagaaatattattttcacttcattatctgctattgcaatttctttaattaagtgaattatagcaatagaaccttaatgcgcccttaatctaagctgagaattcgctgagaaatggcaattaaaacattttagaattaaggaaaaggctaaattgtacgaaaaatctaactaaaaaaagatagtacaaattgaatttatccctgctaataagttatattccaacttaacgaggtttgtttcaatcggtattatctcttcttatcattttgcttgatttaaagctttcttatttcctcaattatgcccttacctctatatttagctccagacacaatagctaaaaaaattcactatctgttaatgtaaaaatactttcatcaatacctgatgttttatatattttcttatcttctgtaataaatatagcgtcaatgccctctatagtttctataatcttcatagctttatcaataccaattatataaacaccagttgataagccatctccttcaattgaattatctgatataatagttgcacttataattttgctttcagatgggtatcctgttttagggtcaattatatgatgaaatctctttccatcttttataaaatatctttcataattgcctgaggttactattgatttattttttacgcttaatattcctataaattctcccctaggcttaaatgggttttgaattccaactttccaagctgaaccgtcttccttacttccaagagcaaaaatgtttccacctaaatcaattaatgcacttttaatattatactgataaaaaatatctcttacttcatcagctgcaaatccttttgcaatacctccgacatctaaagcttgcttatcatgttttagcattattgaattatttttgtcatcaaaaataacatcattgtaatttacaagttttaatgttttctctatttgagatttttctggaactttttcttcttttgtacctatgctccataactttactaatggccttattgtaggatcaaaagtaccttctaaaactttactgtattctatggcttttttaactacaaaataagtatcattatttactttctttcccttatttcctgcattaaaatttatttttgatatatcactactttctttgaaagctgacattctatcatcaatttggtttaacctttctagcgctttatctattgccattttagctttatttccatttgctcttaagttgatcaaagttccaagagcataactgctcctagttgcttcatgtttttcaattttaccagtcacaaatataaaaaataaaataactattattatcacaatcattaatataaaaatacttactgtacttataataatccccacctacctaaaatatataaatttcctcattgttggaattataacaaaaaagtcttaatgtatccttagttaaagcttagaatttgctgagaactatttaagactactcacccagattttcttagcgatatcttaaactaaagatgcgttgatattttaatcaatagaataacgatatatactaaaaaagatgttacaaaataatataataaatctattttgtaacatcttttcttatttgggcacaatcaaaaaatatcaaattcatctgccttattttctaattttaaatatattgagaatgttgtcccaactccaagctcactttctactctaatttttccacgattgctatcaattattgattttactatagagagacccaatccatatcccccttgttccctagctctgtgaaaatcacttctgaaaaatctatcatatattttatctaaatgttctttaggtatgccagctccattatcagaaatctttaaaactgcaaaagttttattttggtaattttctatatctgtagaaattgttataatacctttgtttctatcagtatgaattacagcattttgagttatgttaaatatgacttgtttaatttgatttttatttatatatacatatatattattcttcagatttaagtttaaagtccgatttctagaaagtatttgaagttgagggactatttcatttataacatcatctaaattttccttgtttatttcaacaattggcttctgatctaatttagttaacattagaaggtcatttaccaattttgcaagcctttcactttccatcaatatgctgtttaaagccaaatctaatttttcctgattttttgctgcccctcttaataatacttcaacaaaaccatgaattgaagttagtggtgtacgtaattcatgtgatgcatcagatacaaatcgtctcattttttctttgataagctgttctttttcaaatgatgcctctattctttcaagcataatattaaaggattttgataatctattaatttctaattgaccactttcttccgttagtcttgtatgaagatcagttacacttattccttccacagtatcagttatcttatataacggcttcaatgttcgattaaaaatagtgattccaagtattgttcccactatgagaatcataatcgaaagactaatatgcacatactcttgcctatctaagatacttgtaatatcgtctattggtgtactcagctgtattaaccctgatggtgaatctaaatccccaacttttatccatgcaaccatttgataattattgttttcatctcttactacttcatatgtatgttctaaattcccttgttcattacaaatctctatatatttctctctagaaagcaccggtactggtacctctttcctctttagctcatctggctcctttgaatcatcgtcgccgtcatcatcatctctaggtgtatctatattgcttctttgacctaacagctctccatttttatttattagagctacactcatatttttatcccataaattctttaaaatttctttagtatcactttcagttatatcctccatattttcttttgacattttcttaaagtctagattatgaaacctctcatgaagtacttgcacctttgttttgtataaataatttttcatacttatatactgaaaaagtcccataattcccaataataaaattaatatcacaagaaacctaaacaacaattgccatttcaaactctttatttttaatttatttcttaattttttcattgtgccaccatcttatatccaacacctcggacagttttaatgatattatgatctttgtctccaatcttatctcttaagtaccttatgtatacttcaacaatattatcttctccattaaaatcatatccccatactttttcaagtataagcgatttgctcaatgctattccattattcataagtaaaaaacttaacaaattgtattgggttggaggtagatctaatactttttcacgataggttatttcatgagctttatcatccactttaaaatttcctatataagtaatatcgcttagctccggaaaactatttcttatcctcgcattaatgcgtgctaaaagctccttgaagctaaaaggttttgccatataatcatcagctccaatatccaacccttttaccttatcatcaacttcatctaatgctgttagcataataactgatgtttttatagacttcttaataattgaacatacctcatatccatccattcctggcagcataatatccaatataactatattaggatttatttttcttgctagctctattgcttcattcccatcatatgcttcatatactaaatacccttcaccttctaaccccattttaataaagtccactatacttttttcatcatcaactataagaatagtaatctgatctcttgctcctaagttcattaaattcctctcctctattaataaaatagcttttcttaatttcaaaagtcttttaggtcaataatttgcaatcaaaattatttataaatctttttagacatttttatatagatagcttatttcaacatattatactatagttagtttagtaattttatagttaattatatacaaattcatatactggaacaataaattaagaaatttgcatatattattgtaattaaatttctacattctggccttaattaaatccttagattaatagatctttaaataagaatttattattgcaacatattatagataacataatcataaactatacttagactatgaaatatcctccaactagaaatgagtaatatacttttgtttaatgtttcattggtgattttgatggatgtgattctttggctataagttgttccaaatgtgctagttcaaagcttgttctttgaggctagcactttgggttcaactttatagccttagaatcacccatcagaattacctggaaactggaacaaaagtatattattcgtttcggtgagctatacgcataagtattgattataattggtctatctatcgtaagtttatatatgcactaaattcttccatataatctattaccaataaagttaaaatatttcttaattaagtgatatactaattttaataaatattatagaaagaaggatcaatatgataaaaatagtggccagaagtgttataaaaaatgaacaaacagaaaaatatctaagccttgcggaagagttaattgataaaagtagaaaagaagaaggctgtatctcatatggcttgtttcaagatattaatgatagttctatattcaccttcatagaagaatggaaagacgaaaaagcaatcaatttgcataacaacagtgagcattttacaagaatagttcctttactaggtgaacttcgtgtaggcaatggggaagtaaatttatacaaagaaatataaaaatcccaaagacaccttcgtaaggtattattaatcactagatacctaaagtaaacttaaagttatatacgtaaatactgaaaggaatatcattcatttgttccaggtttctggagtatttagcttttaatttccattagaagaagttgcaccatttctgcatgctcccgaggcaagctcgtgacaatcaataaatgaaacaacttttactaaggaaatatctacagctaaaaactcaatgtaacacttctacaaaagaatgaacttcctttctagtgtagactataattaaaaatatatattttactttaggttcggtatctatgtccgaaataaccaaaggcatatattaaatacttgaagtgatggataaataaagaaatagaattcatgtattctatttcgattgtttgtcaatttactttaagttctatacaatactttaatatgtgcattatttctttccaaatacctgttctttaagctttagtcctgttttagttacagctattccgcctaaagctgtttctctaagtgattctggcaagctttttcctaccttatacatagcacttaccgtatcgtcaaatggtatttttgaagctacacctgccattaccatatctgccatgcataaagcagttattgctccttgtgcatttctcttggcacatggtatttcaacaagtcccgcaactggatcacaaacaaggccaagtacatttttaattactatggctgctgcatctaaactcatctcaggagttcctcccatcatctcaataacagcagctgctcccattgcggaagctgacccacattctgcctgacatccaccttctgctcctgctagtgttgcatttaatccaataatcattcctacagcagctgcggcaaataatccatttataagtccttcttcatctaatccaagtttttctccagcacttaaaattactgctggtaatattccacaagaaccagccgttggacatgcaactatcttgcccatagaagcattaacctcagatgaagaaagtgccatagccatagctatattagttacatcacctgtcaaagtttttcctctcctagcataattatgtatcttaaaagcatctccaccaattaatccgctaacagaataaacttctttttccattgcctcattagcagccgaaatcataacgctcaaatttttcctcattttctctattacttcgtctcttgacaatcctttttcttctacctcatatcttattgcatattcacttaatgaaatattatgtttttcacatatttctaacaattccgtacctgtttttgcaaacattattattcaccttcctttgctgggcttattgagattacattatgtactaattctattttcttaattttctctattaaaatattattcactttattgtccatctcaaaaatcattatagcttcatgccctttttgctgcctaaaaactctcataaaagctacatttatattttcactatataatatacttgtaacactattaattacacctggcgcatctttatgagctattattaaagtttcatacattccagtaaaatcaaccttattattattaacttctataacctgaatatttccgccaccaattgatgatcccataacttcacaatacttcccatcaattgtttttataatgaattttactgtgttaggatgcacatcccctaattctgcctccttaaataaaaatttaacacctttttcttttgctatctccatagaatacctaagtttttcatcgcttggttccattcctaaaataccagcaactaaagccctatctgttccatgacctttatatgttttagcaaatgaaccatgtagtaaaaatgtcacctctgatacatctccacctgctatacttcttgctatcttaccaagtctcgctgcacctgctgtatgtgaacttgagggtcctatcataataggccctaaaatatcgaaaactcctatccctttcattgtgagaaatatcctcccttttatttattatatataattagtttttctttattaatatatttatactcctagctttttctatctaaaataatatcataaatttgattacatatatatgtttcaatttagtttctacatattaatcttaaattagcacttggcccactagaaatttaaatgtaattattattatggattataatttataaactataatccataataaaagcatcatcaatattaaatattgatgatgctttaaccaaacttttattagtttctatttttcatgtatatttcttgtcgcaactatatcaacgccagttccaagaacatcttttattacaacatctcctattttaacaggagcctttattgtcactttatttatttcttccatgcatttgaaattaagtcccttaggaattggattatttgttttaacaggtactactggtaattctccattgtctactttaacagtagaagttattactcgtactggatttgtaacttcatttattccatactcaatacctctattacagccattaccttgtacacttttattttcagcatctacttttaaatgacatcccttagggcaacatatacaaattaattctttttccattttattcaccatcctctaatgatattgttatatcacctttaactttctctaatagcaccttacttaaaactaccttttccatttctgatggtgctaagtgagctcttttaaatttagctataacttcatcattgcatcttacaactaatgccttattatgatatatgttatttactctcataaatacagttagtttatcatcaacagcttctgcattaactttttgtggcactgtataatttatatttgcaccatttattatgtttacatatttgtctttcttaagttcacccttaatgtacttagcagcagaaaaacctgcgtgttttgactcttgagttacaaagtcaactaagtcatgaacatgaactacattaccacatgcaaatattccttctactgaagtttccatactctcattaacaattaaaccattagttcttctatcaggttcaagtccggcattaaatgatatttcattttctggaattaatccaactgatagtagtagtgtatctacatcaaattctttctcagttcctttaataggtctcttattttcatcaacttctgctattacaactttttcaagtctcttatctcctacaatatctacaactgtgtgtgataaatatagaggaatatcataatcatttaaacattgtactatatttctgtttaatccatttgaatatggacacaattcgactacagctttaactttagcgccttcaagagtcattcttctagccattataagtccaatatctcctgatcctaaaataaggacttctttaccaggcatatatccttctacatttatatatctttgggctgcacctgcattaaatacacccgctggtctatcaccaggaatatttatagcacctctagttctttctctgcaacccattgcaagaattatagctttggccttgagttccatatagccttcttctgtatttattgcataaacagttttatcttttccgatttctaataccatagtgtctagtttaacttcaacattagtatcttgaatcatttcaatgaatcttcctgcatattctggccctgtaagttcttccttaaaagtatgaagcccaaaaccattatgaatgcattgatttaatataccacctaattctttatctctttctaaaatcaatatttttttaattccactattatatgcttcatatgctgctgcaagaccagctggtcctccacctactactattaattcataactcataataacacctcatccttctattttgtcttacctaataatatatatgaatctgatttttcttgaactacatcttcaagtgggacattacattctcttgctattatttcttgaactcttggtccacagaatccaccttgacatcttcccattcctggtctacatcttcttttaatactatctaaggatggtatccctatacttctctttattgcatctacaatctcaccttctgttatgctttcacatctacaaaccattcttccatattgcggatttttctttattaattcagctttttccttagccgataattccataaaatgaatttgttctctttttgccttaaagtctgattttttatctaacttacatcctgcttctttcaatatttctacaacatcaagagctatagctggtgctgaagaaagaccaggtgatttcattccggcaacatctacgaaacctttgacttcatcattttcttctactataaaatcacctgtatctggattagcacgaagacctgcaaagctccttattatttctctaaaattaactttattagttgtacgcattgaagcgtctcttacttcatttaatccttctgctagtgttccaacatcgcctttatcttctatatctctggcgtcaggtccaactaataaatttccatgaacagttggagtaactaaaaccccttttccaagttttgatggacattggaatattgtatggctaactacatttccctgagttttatccattacaaagtattctccgcttcttggtactatcttaaagctttccttacaaactaaattatgaattttatctgcataaagtccagctgcatttattacaaattttgattctattatttctccatctttagttgtaattttgaatgtatcatttttttctatcgcaacaacttctttttctagcttaatttctcctccattagctactgcattttctgctagtgcaattgtatattcaaacggacctactataccaccagttggtgcatataaagctccaaaaatttcttgattaaggtttggttccttttctagaacctgttctttacttaaaatttgtaaatcttttacgcctatttttgtcccattttcataaagagcttgtactgttttcatatcttcatcgttaaaagctattatcagagatccgtttctcttaaaaggtacacttaactctttgcaaagatcttcaaacatctcatttccagctacattatattttgccattaaagtaccttctttaggatcatatccagcatgaactattgctgaatttgctttgcttgttcccatcgatacatctttttctttttctaaaacaactacttttaaattatacttagttagttccctaaaaatagaatttccaataacccctgatccaattattgctacatcatacatattacatcctccttattaatagcgcataaaaaaagtcaagcaaaaaacaaggtgtaatccaccaacgttttcatgcttgactctatattctctcagcatttattttaaattatatatacattatatcatgtaaatgtatacttgtctactactcatcctaaattcttaattttatttactatccaaaatctacaacactactttattttaaaatattactttaaactatgtaccctagatggtataaacatttagggtacattataattcttaaaatttgtgattaggttaagctaatttgaaatatataaatacttattaaagtatcattctattcctcttcccagccttctgctctcttaacggcttttttccatcctttatataatttttctttcttctcttctgctaagtttggagaataagactgacttacagcccacttttcagctatttcttcttttgatttccagaaacctacagcaagtcctgctaaatatgctgcaccaagagctgttgtttcagttataataggtcttacaacctctgcccctgttatatcagcttggaattgcattaataaattatttctacttgctccaccatcaactttaagtcttgttaatttacatcctgcatcctcttgcattgcatctataagatccttagattgatatgcaatagattcaagagcagctcttattatatgatttctattagcacctcttgtaagtccgaagatagcgcctcttgcatacatatcccaatatggagctccaagtcctgtaaatgctggaacaacatatactccaccattgtcttctactttctgtgcaaaatactctgtatctgctgcatcagtaactaacttaagttcatctctaatccattgaataacggcaccaccaacaaatactgaaccttctaatgcatattgtactcttccatctataccaactgcaatagtacttactaatccatttttactatgaatcattttttctcctgtattcataagtaagaagcatcctgttccataagtatttttaacactaccttcttcaaaacaagtttgtccaaatagagcgcattgttgatcccctgccatacctgctattggaactctaacgcctcctgttcctccaagatttgtgtatccataaacttctgatgaatttttaacttctggtaacattgattttggaatgttaagcttttctaggattctttcatcccatcttaattcctttatattataaagcattgttctagaagcattagtataatctgttacatgaaccttaccatttgtaagtttccacactaaccaagtatctactgtaccaaataataattcacctttctctgctctctctctagcaccttctacgttgtctaatatccattttattttagttgctgaaaaatatgcgtccaaaagtaatcctgtattttcttttacatattcactaaattctttgtctagtttaagttcttctattatacctgctgttcttctacattgccatactattgcattgtatactggttctccagtatttttatcccaaactattgttgtttctctttggttagtaattcctatagctgctacttcttcttgagttatattagtctttgcaataacttcttgtaaaactccatattggcttgcccatatttctaaaggattatgttcaacccatccttggtttggataaatttgagtaaattctttttgactcactcctaatatattttgttctttatcaaagattattgctcttgagcttgtagttccttgatctaatgctaatatatactttttcatacaaaaacaccctgctttctaatatttatatattctaatatttacctagaaaaggttaaatttattatttatattttaggaaatgaatttaacaaatagttgacctaaaaaattgagttagtgttctagacgtaattttagcgacaattaaagccacataaaacatccatttatacagaagcaataatatttatttttactgcctcgtacaaattttaaatttactcagtccattaagtgtttcccaagtaaattcagttttatgtggctttattctctaattctcttcagcctacatattccaaatttcttttttagttgtagatacgcatgttgctcctgaatttaatgcctgcattacctcttccttagtttcaattagtcctccagcaacgactggcttactagaatactttgaaatgatttcaattacctttggaattattcccggcagtacctctattgcatcgcattcagaaatcatatgattttttacattgtttaaagaaagtgtatcaaatataaaaactctttgaactcctagtaaattatacttttttgctagttttacaacttgtggctttgtacttattattccactaaatttagtttcttctttaatatactttacaacaatttccttattcgtaaatccttcaactaaatctatatggattattcctattttatttctagatgttataatttcacttatctctttaatattcattacatctccaaataaaacaaatataacttgagcttctgaatctaatgcctgatttaattgttcttcattttttactgctgctataattggattttcttctaataactcttttatattcattggccctcccatgtaattgttttcttttttattcttagtattacatagttgtttgtctctgtcaattctaactattaattaacttttataatattccatgtaatattacataaaataatgcagctaaagttcctcctacaattggggcaacaacaggaatccatgcatatccccaattagaatctcccttatcaggtataggtaatactgcatgtgcgattcttggcattaaatctcttgctggattaattgcatatcctgttgggcctcctaggcttacaccaatagccaaaattaaaaatgctacaaacaatgttcccattccatttgatagattttgatctcccattcctaaaattgcataaactagtacaaatgttcctacaagctcagttataaaattaattgaagtattctttacttgagggcctgtacaaaatacaccaagtttgcttcctttatcttcagtagctttaaattgatcattataaacaataaataccaaaactgctcctaaaaatgcaccaatacattgtccagctaaataaatcggaacttgagcccatgccactttacctattactgctaacgcaattgttaatgctggattaaaatgagccccactataacttccaaaaatcaatgctggaattcctaccgcaaaagcccatcctattgcaattactattaatcctgctcctgatccacctgatttttttaatacgacattggctacaacaccgtcacctaataaaataagtaataaagttcctactagctctgcaaaaaaaattgtcataacattatctcccttctacttcacaatacttgtttattttttaacattttagaacggttaatattactagaaaacaactcattacataatattcataatttattttagtatgactgatttaatttaaaagttctaaatcaatgtacattaagtaattttggccataagtatagccacataaaactccttacattttaaacaatcatatatttctaactgtttaaaacataagttttaaatttacttggtaatcataagatttcttaagtaaacttagttttatgtggctttattctctatttctctatagcctacatttctaaaattttttcagaactgcaatgtaattgttttcttgttagatttagtatcacatatttactttatagtgtcaagcttagttaataatataacaattaaaatcaatacatattatttgctcattcattcttaattacttgactgccaatgcatcttatttcatatctaattattgtttcttattttcttcttttaatccttatttttacaatgaaacattgttaatattttatctattataaatttatcttaagaacacaagaactatagataaatgttcaaatttatctatagttctatataataatattagtgaaataacatacttaatttaatattcataaaaagctgatcctccgataaattctcttaacagagaattctttggcacttcatcaacattaatctctttgaaaaagttcaaaaacgattttaatcttatagcttctgaataaactgaactttcttccgttatttcatctagctcttttaatgcatatggctttaaaactccgagttcataaaccaatgtagaattaaatgctacatccgcaccttcttgataaacaaatatattatttttttctcctttctttatagatttccacatttttaaagtttcttcggccttatatcctcttgataatgaatctctaactattcttctcacctttcgtacatctgttgtagaaattctattatgattatctatatttagctgtgtcaatgccgatatatatattttaaatacattcctatttaaattgcttgaaattaaatttggatttaaaccatgtatcccctcaagtatcaaaactccatttttaggtaatttaactttatagtcattccattctttttccccagttttaaaattataagtaggaaggtccacttcctctccactcattaacctttccaaattatcattcaacaaactcaagtccaatgcatcaattgattcatagttataatctccattctcatctttcggcgtttcttctctatttacaaaatagttatccaaagacaatggtataggtatcaatccattcactctcaattgtatacttaacctattcgcaaaagtggtttttcctgaggatgatgggccagcgataagtatgatttttacatcttttctatctaaaacatcatcagctatattagctattttcttttcatgaagcccctctgaaaccataattatatttcttaattcattgttaagcactttttcatttagagtcccgacatcttcaattcctaaaatgtttagccatctttgagtctctatgaaaatttttgttaagctcttctcttctctaaattcagctaattcacttagattagtctcttctggcctctgtaaaatgaatcctgattcatacttaaatacatcaaatttatttatgatacctgttgaatatcccataggaccataaaaataatcataccgtccttcaagctcataaagatgaacatgctttatatcacaatactttaaaagcttaactttatcatccatcttatatccttcaaaaatcttaatagcttcttcttttgacgttctcatactcttaattggtacatttctatctattatttcttgcatcttaacctttatcttatcaatttcacctttacttaatggattttccttatgaacttctccatatactgccttacttatagcatggtctattgttatctttgattctggaaataaatccaatgctacctttataaatataaactgtaaagttcttgtgaatattttcattccaagttctgtatcgaatcctattaattctacttccccatcatcctctattacttcagttaattcacaataccttccatttaatttgcatatagctatgtctttaaccctatctttgtaattacccataattaattcataaaaagtcagtccttttttagctttaattttcttatctttaaattcaatccctctacactccatactattcaaaccttcctttatataatttgattatccctttagattttaatttcacaatttgaaaattaagctctccgtctctgtaaagtctcttattctaattgtattcaaatatttgggtaccataataatcatttcaaatatattatatacactatttccaaaaaagataaacttttttgttaagtctataaaataaaataccaattataaacttaccatgaaatgttcttatttagcatggctgcttttttctatggtgaactgttcttagttgcagcatagctgcttttttctatggtgcgtatattaattttatttttgcaaatattattttcgaggtgattttttaatgtttgtagtatcaatcagaactgctattttatatttattggttgtattaactatgaggctaatgggaaaaaggcaaataggagaacttcagccttatgaatttgtaataactattatgatttcagacttagcatcattgccaatgcaagacacaaggctcccattattattaggtattataccaattataacattgctatttttaaaaacacttttaacacaaataggattaaaatttcaatatacccgaaagctcgtggatggagagccctgcatattagtccataaaggaaaaattaattactcaacgctaaaaaagcaacaattaaatatagatgagttactagaagagttaagacttgccaattattttaatcttgatgaaattcaatatgcaattttagagaatgatggtcaaatatctatattaccaacagattataattcttctaatacatcaaattcaggaaatactgctcaaaatactgaagcaaaattgccaaaagtattaatttctgatggtgaagtaaataaaaactcactaacttccatgaataaagatgaagaatggatatctaatctacttaaaaagcacaatattaaatcaataaagcatgtccttattgctttatatgatacagaaggcaaatttaaatatcaactttttgataaatacgaaaaggaggatgcgcaatgagaaatgctataatatcaatacttttgtttctcctaaccatgtcatgcgtatattttttaaataagtctgtcattagtttatgcgataatattgaaatgcaaactgaagatatcgaacttaatatcgcaagtgacaaaatggaggatgcctattatcagtctcttgaattattaaatactattcaagataataatgttttaacatctctttatcttagccatcaagaatttgataatttgctaaatgaagctttaaggttatctacatatcttgttcataaagattcaactgaagcgcatacatctctacatttagtaaagcataatactgatcatctaaagaagttacaagctccaaatttcgagaatattttctaatagaacattgacatgcaaacttttattatatatacaaaaatttcgcatatataaacattcactttatccgcacaattatgcaccacaataattcatgcataaaagccagtactatttgcataaattattgttttttctgcataaacattatttattaatgcatattttaatatttttatgaatattttttcattttatacttgattattcttttgcaaaactgtataattataaacatcaattaggtattataaatcagattaatttattgattatatttaagaaaatagcattgcatgtatgtttatgcattttatatgattatttaggagggcttttaaaatgataaaatataacaaagtagttttagcttattcaggaggactagatacatcgattattatcccatggcttaaagaaaattacgggtgtgaagtaattgctgtatgcggaaatgtaggacaaaaggacgagcttgatggattagaagaaaaagcaataaaaacaggagcatcaaaattatatattgaagatttaactcaagagttcgttgatgattatatcttccctactattcaagctggtgctatatatgaaggcaaatatcttcttgggacctcatttgctagaccaataatcggaaaaaggttagttgaaattgctaaagcagagggagcagatgcaatttgtcacggatgcacaggtaaaggaaatgaccaagtgagatttgaaatggcagttaaatcatttgctccagaaatgccaataattgctccatggagaatttgggatattaaatcaagagaagacgaaatagattatgcagaggctaaaaatgttccattaaaaatcaatcgtgaaacaaactatagtaaggataaaaatatatggcatttaagccatgaaggcttagatttggaatttcctgaaaatgaaccacaatatgataagatcttagaactttgcaaaaccttagaggcagctccaaacgaagcaacttatataacattattattcgaaaaaggaattgctgtttctttaaatggcaaaaaaatgaacagcgttgaattactagatgaattaaataaaatcggtggagaaaatgctattggtataactgatatggtagaaaacagacttgttggtatgaaatcaagaggtgtttatgaaactccaggaggaactattctttataaagcacataaagatctagaagaactttgcttagataaggaaacagctcattataaagagcaaattgctttaaaatttgctgatttagtatataacggtcaatggttcactcctcttagagaagcattaactgaattcgttaataaaactcaagaaacagttacaggagaaattaaattaaaattatacaaaggaaatattgtcaatgccggcatgactagcccatactcactatatagcgaagaatatgcaactttcggagaagatggagtatacgatcaaaaggattctgctggattcattaatctatacggtcttccaacagttgtaaaagctaaaatgcaagaaaaaattaagaaagaggaaatgtaatgaagctttggggcggacgattcaaaaaaggcactgacaaattagttaatgattttaattcttctataaatgttgatagcagaatgtataaagaagatattgaaggcagtctagctcatgcttccatgcttggaaatcaaaatataatttctaaggaagctagtgatagaattacttctggtcttctagaaatattaaaaagaatggataatggagttatagaaattgatgaaacttctgaagacattcatagttttgttgaaggtactttgacatattacattggtgaatatggaaaaatgcttcatactggaagaagcagaaatgaccaagtaactttagatttaagattatatttaaagaaagctataacatcattaaaacaagatataatagctttggaagaagttctcttagaaaaagctaatgaaaacataggtacaataatgccaggatatactcatatgcaaaaggctcagccaattacatttgctcatcatcttttagcttatgctgaaatgtttaaaagagatctaggaagactttctgattgctataaacgtgttgatgagatgccacttggatctggagcactagcaacatccacataccctattgatagagaagctgttgctcgtgatcttggtttttcaaaggttacactaaatagtttagattctgtctctgatagagattatgctatcgaaacactttcttgcctttcaatgataatgatgcatttatcaagattttcagaggaaataattctttggtgtactaatgaatttagctttatcgaacttgatgatggttatagcactggaagcagtattatgcctcaaaagaaaaatcctgatgttgcagaattagttagaggtaagactggtagggtttatggagatcttatgactttacttactgttatgaaaggaattcctctcgcttataataaagatatgcaggaagataaagaagctctatttgatggattagatacagttattctttcccttaaaactttctgtggaatgattaaaacaatgaaagttaagaaagaaaatatgagaaaaggtgctggtcttggatttactaatgctacagacgtagctgattacttggtaaaaaaaggtatgccatttagaaatgctcatgaagtagtcggagaaatagtccttcaatgtattaaagataacaaaatgattgaagaattaactatggcagagtttaagagcttttctccttcatttgaagaagatatttaccacgctatagatttacttacttgcgtagaagagcgtaaagttataggtggtccttctacagaatcagtaaaaattcaaattgaagcattaaaaaattttatatcagaaaataaggaagtctaataagattagtaattataaagaaaaaatttaatatttttttccttataataatagcagccgtaacattctcagataacggctgctaagtcttaggctaagtacgccttaagtgtacattataatattccttgaggtatatgtttaactaagattcagatggaaatcctcctctaaatcaagttctacttcataaaaactttcaattgtctatgaaatttctaacacgaaattttatagacaattgaaatactatagttaagaattaacatacagaaaataaataatattattttgcaataatcaaataaacaagggggctatttaaaattggttaaaatcggaataatcggtgccacaggatatgtaggcgctgaacttttaagattattattatctcacccaaaggttgaagttgcagctttaagttcagtttcttttgaggggcaagagattagcaatatatataaaaattttttaagcaaaacaaatctaatttgcgagtctgcacatgatgttgttgaaaagtgtgatgtaatcttcaccgccctacctcatggattaagtgaagatattgctaaaaaagcactagacaacaagaaggtctgtattgatatgggtgctgattttagattatctagcgaaaaagaatatgaaaagtggtatggaaagaaattcacacaacctgaaatacacacagaaagtgtttatggccttccagaattaaatagagataagatcaaagaatgttctttaattgctaatcctggttgttatccaacaactatagaattaggactaatgccgttacttaaaaattcattaataaaattagataatattatttgtgattctaaatctggaactacaggcgctggaagaggattaactttaaatactcactttccagaagaaaatgaaacttttgctccatataaagtaggtgctcatagacatacacctgaaatcgaggaaacattatctgttatggcagaagataaagtaaatgtaacattcactcctcacctactcccaattaatagaggcatagtttcaacaatttactgcattccaaaagataaagtcgatcttgaagaaattcataaactatatacagaattttataaagatgaacgtttcgtaaatgtacttccacttggtgatacagcttcaataaaaaacgtacgattaacaaacgattgtcatatatctctacacttaaatcatagagaagatcaaattattattattagtactatagataacatgattaaaggtgctgccggacaagcaattcaaaacatgaatataattttaggttttaatgaagcagaaggtttaaatctaattgcaccagctttttaattcatataatttttaaatactaaaaactttaacagatttaattattaattatgcattgtgcatcgagcactgtgcattgactaagggggttataaatttggatataaaatatatagatggcggagttacagctcctaacggtttcttagcttctggggtacactgtggattaaagcaaggaagcttaaaaaaagatttagctttgatttattcagaagttcctgctgctgcagcaggaatgtatactaaaaataaagttaaaggtgctcctatttacgttacaaaagagcatttatcaaataaaaaagcacaagcaataataataaatagcggtaatgcaaatacttgtaatggtgatgatggtttaattaaggcaaagaaaatgacttcattgcaagctaataaactaaacttaaaaacagaagatgttttagttgcatctacgggagtaattggggttcctttaaatatagatgctattaaagacggtattccaatgcttactgaaaagttatcaaaagaaggttctaatgatgcatctttagctataatgacaacagatacttttcaaaagcaactagctgtagaattttatataggtgataagaaaattactatgggagcgatggcaaaaggttcaggtatgattgaaccaaacatgggaacaatgctttccttcattacaactgatctttctattgctccagaattgctacatgaatcactacaatcgagtgttggagtaacttataacagagtcagcgttgatggagatacaagtactaatgatatggtattaattttagctaatggcttagctgaaaatcctactataactgaaaaagatgaaagttataatactttcttaaatgcccttactgagttaaatacaattatggctaaaaatatagctaaagacggtgaaggtgctacaaaactattagaatgtcaaataatcggtgcaaagaatgaaaaagatgcagttgttttaggtaaaagtgtaataaactctagtttagtaaagactgcaatgtttggtagcgatgcgaactggggaagaattctttgtgcacttggatatgcaaatattgatttcgatcccgaaaaagttgatgttgcctttgaaagtaaggctggctcaataaaagtttgtgaatctggcagttctttacccttcgatgaagatattgcaaaaaaggttcttagcgaaaatgaaatagttattaaagttaacttatccttaggtgattatagtgcttatgtttggggctgtgacctaagttacgaatatgtgaaaataaatggtgattacagaagttaatcttagattataaatatattttaaacttattccaatgtacagttcttaatatgttaattatgaactgtacattctaaattgactgggggtattaacttgttgaatcatactgaaagagctgaagtattagttcatgcactaccttatatacaacgttaccgtggaaaaataatagtagtaaaatacggcggaaatgcaatgataagtgatgaacttagagaaacagtaataaatgatattatattaatgaaatgtgttggaattgaaccaattgtagtacatggtggcggtcctgatatttcagatttattaaatagattaaatcacaaaagtgaatttattaacggcttaagatatactgatgatattaccattgaagtagttcaaatggttttaggcggaaaggtaaataaaaatttagtttctttaatagagaaatttggaggaaaggccattggcttatgtggaatggatggctctcttttaaaagctaaaaaaatagaatctgataacgacttagggtatgtaggtgagataactaaggttaatacagaaatattaaaaactactataagttcaggatatatacctgttgttggtagcgtagctttaggagaagatgataataaggcatacaatataaatgctgatacttgcgcagcaaaaattgcatcagcattaaaagctgagagattaatactgcttactgacgttccaggagttatgaaagatccaaaagatatatctactctaattagcacattaagattacatcaaatacccaaattatgccttgaagggataataaaaggtggaatgattcctaaaattgattgttgcgttgaagcaattagaatgggtgttgaaaaagcaactatccttgatggacgtgtacctcattctattcttttagagttattctctaatgagggtatcggaacaatgatttattaatcaaaatattaaaatattttagaaacttcaaataaatttctctaataatagttaatgatctaaagtttatactggatattattaactattgaataatttaaagggggcaattttatgtcatatgattttaacgaagcaaaagaacacgttgttaatagctatggtcgtttagatcttatactcactcacggcgaaggcgtttatctttatgaccaagatgaaaataaatatttagattttacaagtggaattggtgtcagcagcttaggatatggacatgaaaaatgggttaaagctactagtaatcaattaaaaacacttgctcatacatcgaacatatttcatactgaaccaagtttaaaacttgctaaagaattaactgaaaaagccaacatgagtaaagtcttttttgctaattctggcgctgaagctaatgaaggatcaattaaactagctagaaaatacagttacgacaaatatggtgctggaagaagtaaaattcttactctaattcaatcatttcacggtagaacaataacaaccctaaaagcaactggtcaagagaaatttcataagtacttctacccttttacagaaggttttgattatgtaaaagcaaatgatatagaagactttaaagctaagcttacagatgatgtttgtgccataatgctcgaagcaatacaaggtgaaggtggtgttatccctcttgatacaaaattcgttcaagaagtagtaaaagcgtgtaatgagaaagatgttcttgtaatatttgacgaagttcaatgtggtataggtagaacaggtaaaatgtttgggtataataatttcaatgtagaggctgatatagtctctgtagcaaaaggccttggtgcaggacttcctataggcggaatactttgttcctctaaagttgcagatgtattcaagcctggtgatcatggctcaactttcggagcaaatcctgttgtatgttctggtgctttagttgttcttgaagagatttgtaatgaacaatactttgaaaaaatatataaaagaggattatttgtaagagagctaatagatgaagctaaaaatcctcaaattgtagatgtacgtggtatgggattaatgatcggaataaaggtgaaatgtgatcccgctctagtccaaaaagaggctataaaaaaaggattattagtacttacagccggtaaagatgttgttagacttctcccaccacttactataactgagaaagaattaaaagttggtatagacattattcttgaaattttatctagccttaagtaaattttactttggtatgaatataatctttatcgtatcttttggattttctccctaactgcttatttttcactttcttattgtttggaggcatatatatgaaaaaagacttactaaaaatggatgatctttctaaagaggaaattctggatattttaaatttagcagatcagttaaaatacgaacaaaaacatggcatagaacatcatcatcttaaaggtaaaagtttaggaatgatttttgaaaaatcatctactaggaccagagtttcctttgaaaccggcatgtatcaattaggtggaaattcactttttttgactgatagagacatgcaaattggtcgtggtgagccaattgaagacactgctagagttctttctagatttatacaaggcataatgattagaactttctcacaagatgaggttgaaaaattagctaaatatgcatcaattccggttataaatggattaacagatgaagaacatccttgtcaggtactagctgatttaatgacgataagggaaaataagaatatattagaaggtctaaaagttgcttttattggcgatggtaacaacatggccaattctctaatgattggctgcctaaaagtcggcatgaattttgcagttgcatctcctgagaattatacggcatctaagaaataccttaatagagctaaagagatcgcagaaaaagaaggcgttacttttacaattactacatctccacttgaagcagctaaagatgctgatgttataattactgatgtttgggctagtatgggcagagaaggtgaggctaatgagaggattaaagcctttgaaggattccaagttaataaagaattaatgactattgctgataaaaatgctatggtgcttcattgtcttcctgctcatagaggagaagaaatttcagctgaaattttagaagaacatgctgattcaattttcgatgaatctgaaaatagattacatgcccaaaaagctgtccttgttaaattaatgaaataataaaattctagttaatagaaaaatgatatacttgtttacttcgattgctaaaaaaattgcaaagaatttctatcatttcaagataaaaaatttttcaattcacatacgttcaaacagtaaaagttttttatcttgaaataatgaaactctaataatttttttctgatgcactctgcgcaaacaactatatcatttttttatatttacacataatttaaatatttattttataaattattattaattttacaggcgtgatgataagatataattatatgaataattgatttttaatttaactaatgataatttactcaacatatatttttagaggagataatatggatatggatttaaaagaaaaagtaaaaaaacttccttcttcacctggtgtatatcttatgaaggattcactgaataacgttatttatgttggtaagtcaaagaacttaaaaagtagagttggatcatattttataaattctaaatctcattctcctaaaattcttaagttagttcaaaatctcaaggattttgagtataaaattactgatactgaatttgaggcttttttgcttgaatgcaaattaataaagaaaattaagcctgcttataataggctaatgaaaaattctaagtcatattcttacataaaaatagttcttaacgaaaaatatccaaatattgaaatatctcatgaatcaaatgaaacggatggaaacatttattttggtccatattcaagaaaaaacattgttgaaaaaggactttatggtattaaagaatactgcaaaatacaatgcagtattaatcagcgaaaaacttcatcctgttttaactactctctaggattatgtattggaatgtgtttagatactacaccacgagaagagtatcttaatatattaaataaaataataaatcttcttaatggtaatgataaaatcattctccaggaaatggaacatataatgaatagcgcttctgaaaaatttgattttgaaactgccgctaaatatagggattacataagctcagtaaattatttgctagagaaaattaaaattatcaaatttactaaaaaaaatagaaatattgctttgcttgaatatttagataatgacatagttaaattttttcttattagaggaaataagatactctttagtgaaaaatatattttaaaaaactttgatttagaagcattgaaaggtattcttaaagataatattttattttactttaacaatgaagatgttccaatggaaattggaaaagaagaaatcgatgaatctcaaataatctacacatatttaaaaaataactctaatagctgcaaacatattataattccagaagaatggttaagcgtttcaaataatgatataaacatacataatatccttaacaaattgttacctagtataaaaaatgatacctaataataaaattgtgcctacttgttcgtaattgtacaagtaggtataattattatactaagttcatttaactaagtataataatttataaaaggagattttaactatggaattaatgaaagtaatcgcaatgcgtaaatctactagaagctataaatctgagtaaatcagtgatgaatctttaaatactattattaatgctggctgtgcagcaccagtagggatgggtgcatataactcagttcatctaactgttattcaaaattccgacttattagataaaattacagcagttactgcaaaagtatttggaaatccaaacataaacttcaatccaatagtgaattattaaaaattttatataaatttgttcgattaaatagtgaggtgtgaaaatgaaagtattacttattaatggtagtccaaaagctaaaggatgtacctataccgctttatgtgaagtagccggtgaattagaaaaagaaaatattgaaacagaaatctttcaaataggaaataaacctattagtggctgtattggttgtggtggctgctataaaagtggtgaaggtaaatgcgtatttagtgatgatatcgtaaatatcgctttagagaaggcaaaagaagctgatggatttatattcggttcacctgttcattacgctgctccttcaggttcaattacatcttttttagaccgattcttttatgctggaaattgctttgcacataaacctggtgctgcagttgtaagctgccgtaggggcggagctgcttcagcttttgatcaattaaataaatattttactatttcaaatatgccggttgtttcatctcagtattggaatatggttcacggtaatactcctgaagaagttaaacaagatttagaaggaatgcagacaatgagaatgcttggcaaaaatatggcatggcttctaaagtccatagatgctggtaaaaaagcaggtatttcattgcctgaaagtgaacctagagttgcaactaattttattagatagctctattttagaaaaaggatttaataaaagatgtattttcttaacttttattaaatccctcttacacttatcaattaattaaatatatattacaattaaacttctgtactctagttttaatttatcgcttccttattaaagttttaaatctaaacttactaattcaacatataacttctttagctatactatactaccttaatggctgtcttataattgtttcccattagtagaaattacatttttaaaccactcaaagctctttttcttatacctttttaaatctcttaaatctgattcatcacgatttacaaatataaatccatacctttttttcatctcaccttgtgaacttaaaatgtcagtacatccccaagttaggtatcctataacctcaacgccttcttccatggctaatttcatttgctttatatgtgctctcaaataatctattctataatcgtcctctacagttttattttcattcaattcttctctaacaccaatcccattttcagttacaaagattggcattttatatcttgcatatatctcttttaaagctattctaaaacctataggatcaatagcccatccccattcatttttctttaatagtggatttggtatcattccttttactatactctccgtatcctccggatcatcttttacagttgaactttgataataactaaatgtcaaatagtccactgtattttcttttaataactcttcatctccgtcttcgaatattggctttatgtctctacttttccacctacttgtcacatatgttggatattcaccattagcaaatacatcaaaatagagatcattaaagagctcttttacttttaagtttgctaatgtgtcctcaggtttacacgtcattggatatgttgtcatataagtaaccattccgcccatttttccatctggaattatttcatgcatcagtttagttgctttagcatgagctataaacacattgtgacatacttgatacgctaaagcttctttattaacattattacttacttttactccccacaactccatacgcggaataactaaattttgctcattgaatgttatccagtatttcactttatttttgaatctttcaaatactactcctacatatttctcaaataaatctacaacttttcttgatgcaaacccattatatttttctgctaactcctctggtaaatcaaaatggtatagtgttataactggttctattccattagttaataattcatcaaataaatcattataaaattttatcccttcttcgttaacttcaccttctccatctggaataattcttgtccacgaaatacttgtacgataactatttattcctaactccttaaacaatgctatatcttctttatatctatgatagaaatcaacggctacttcccaattagaaaaaccttcttttatttctcttttatctactatagaaattccttttcccccttcattccatgctccctcactttgaaatgatttaaccgcacttccccaaaagaaattatcaggaattatgtttatattttttttattcataaattacactctcctcttatctttatacaaagcatttaaggctttaatcacattttatatttattaaatctaactttcatcacctgtctatacaacattttttttgattatgctataatatatttaaataatttttatctattacgaggtgagtaaatttgaaaagtgattatattattaacgactttattgaaaaaattacttctggaaagctcttagtatcatctcgtattccatctgaaactcagctagcaatcaaatatcaatgtaatagacatactataagaaaagcaatagctcatttaattgaaaggtcatatttgattaaatcaattgatggctcaacttatgttaatgatgttaatcattataataacagcattctttttttatcctctctttctgattactacaattcggataatataaaatcaaatgttaatgaatttaaacttattgattcatctgaggaacttagcaaattattgcaggtagaagtaaattctcatgtttggcttataaaaagagttcgttatatagagtcccatcctattcatacagaagagatttacatgccatactccctatttccaaaccttaagacagaagattgtgaatctagtttactttcgtatattgagtcccaatatgattataaaattagtcacggtattagaactgtgagccctacaaaattaaatgaatatgagagtaatttattagatttacccaatgagtctgttgtaatgcagattgaaaatatagggtatttgactaatagtagaatatatgaatattctataagtaaatctagagaaagtaagtttcaatattattgtaggcgataaaactaatattgtataaattcgtattattaaaaaatttagaataaaaatatccttcaaatacttaatcccaaagttaagcatttaaaggatatctttattttatttactatatatgttctaaaaatctaatttactaatatttatcttagactatcagataccatctcaaataattttgtaaagaatgaattatattatttagaaattatatttttttcattttaatctatttcttactgcattttttacattggcttttttgattattatttcgctttgattcgttgtcatctgcaacttcttctgaaaattctgtcatcagttttgaacggttcattttattgctaactcttgcatagctatttttattcttttcagtgttcctaaaatatttcattatcatataaattgatgaaaatagagctatcattatcagtcctactataagtcctggtgcttgatcagatataagaggcatactaaaaataacaacaatcatacttattagtccaatccaagatgtatacggaaatccaggcatttgacatttcccatctggaggacatccatttcttttacggaatcttatgtgcgtcgccataattactgcgtaagtaaaaagtagagagaatccacttgctgttactagaaacagatatattctaggaaataacaacccaaatcctaatcctaaaagcattgaaattccagaaaatactatagctttgtaaggaatatcacctttatctttcaaaaacttaggagcatcaccttcatctgcaagtgatcttagcattcttgcaatcccaaacatagaagcgagagatgcagaaagtatagctgtaataagtactaaattaattacatttccagcccatgtaattcccaatctatcaagagccgcaaccattggacttatattttcgcttaaatctgctgtaggaattaacggaagtaatgctataagggaaattatatagagtgatataagacttacaactgtataattaattgcttttggtattgtttttattggatcatcagcttctgaagccgctaaacctattatttcaaaaccagcataagcaaatactactataagcattcctcctgcaatacctcctatgccacttgacataaaaggctctctcataagctctcctgcccctaccgctgttcttcctggaattattccagtaacaagtagaaaagatataattataaatgaaattattgccaaaagctttatagctgaaagaccactagtgagcttacttaatttatcagcccctaaaagattaagcaaagttacaccaacaataattatagttcctcctatagctattgatatattcggaatccattcattcaataaaattgatacagcggtagcctcactagacattgaaagtaccataccaatccagtaaacccagccaacaacaaatcctgttccaggaccaaacgcttctgatgcaaaagtcctaaaagatcctgaatgtggatttgcaacagtcatttcagataaagcataaagtataaagtatactaaaattcctcctaatatataggatatcaaaacagatggtcctgccgcattaatagccaccgctgagccaagaaaaaacgatcctcctattatgcttcccaaagccatcattgcgagctgccaagcagataatcctttgttttttttcttcataaatattctcctccgtactaaaacacctaagaaaagcaaataaaagtatttgcaaatttcttaacgatgtactaaataacttctagaatattattcctcaaaattcatataacatgtactttatctaaatataaaattttatatctattattttatttaaaataagttttaaatatgtaaattaaatccatctaagaataaaagataaaagttaatgctggtaactagcactaacttttatctcatccaaaattaaatataaaacttaattatttaattctaattattttcttctatttttcctactataaatatatatgataatgctcctattaaagctaaaatacctatcaaagctattgctggagtaaagttacctcctgatacaataatgcctattacaattggaataactattgatgataaagctccagtgcagttaaatacaccaccagctaatccaactaaatttttaggtgccaataatgatacaaatatccaagtaatagttgctaatccattaccgaaaaatgctatagccatgaacattactattaatggagtgctatcaacaaaatttgctccaattatagttgttgttaataataatccaataattattggagtttttcttgctactcccatagaaactcctttttttatgagcttatctgatacaaaacctgaaactaaaacaccacaaaatgcagccaaatatggtactgatgaaacaaaacctgactttataaaacttagatgtctatattctacaaggtatgttggaaaccaagttaagaaaaaccaaaatgttgatgatatagtgaattgaccaatatatattcctataagcttacggttagagaacatcatctttaaatcgctaaacttgaactgagctttctccttggtagtggaattatctacatcctcatcttctactatacctccaccttctttgatataatttagctcagcattatttatacgtttacttttacttgggtctctatataatgcataccaaacaattgaccatgctatccctacaagtcctgtaagtataaataagaatttccaaccaaacttatcctctaatataaatagtaatgggctcacaaatgctaatccaacaaattgagctgaagagtatattgcaatagcagatgctctttcatttgttggaaaccaacttgatgccaccttattacttgctggcatcactggggcttcaaaacatcctattgataaacgtaaacctaaaagtgatccaaatccacctacaatactttgtaataatgtagctaatgaccatataaataaactacatgcatatacagcacgaggcttaaatctatcaactaagtatccgctaggtatttgcaatgcagcatatacccatccaaacgctgaaaatattaatcccatttgaacagttgataatttcaaatctttagacatatgagatgctgctacagatatatttgaacgatccatgtaatttattactatatttataaatattagagctaatactaaatatcttactctagttggcttctcttcagtcaaattagtcttataattattatttatattcatattgtttattccttcctatctttaaataaattattctctatttagacgaattgaagaaaatagcggtttcaaaatattatgattatttttaatcataatacatagtagcttgtgcttacatctgttatgataattttctgaaacagtatagcggaaaataaccttgtaagattgacttgctattttctaattgcgccttcttgaagcatatcttagtacactctcacctcaattatctcagctttcctgcatccatttgttgattcaatggtaactctaattttatttgctaaaatcttacctacatttttaaatatttcttttcgcttacgattatttttcttagatgcaataacctcccatttattatccttccatatggaaaccttgtaatctttaactaattcaggcattacagaaaaatcagtgtaatggtgatgaagatttataagatcttcgtttacatcatcgttaaatgtaatatgaatttcgttaatttcaatatcattttcccattcaagttgtatccactcatctgtatctttaatatcttctgatatccacatatgaggacctccataaggtcttgagtaaccatctataattttaccaggagaatatgcatttgtttcaccatgaattctaaagcaaaattcttttctagccatttctttcatagaccactcaacaattggatttataccaatataatcatcaagatttgtattttttatagcctttttagtaaatgaaagtacacctgttaattgttcataagataaatgtattgtaactttatcattagcctttacaaccaaaaatagatttcttgccacttctgattctaatacaaagtcgctcttaacccattgatttcttcctttttccacttgtacttttttcttcttcaaaagatttttaggaatatagttttctgctctgcctgtatcccaaagttctacttccaatgtagtctgttctaagctagaaattagtatttctatatcttcaactctgttttctattggaaataaaattcctatatctgtagtcaacctatattcatcgttagaatttacgacttcaattttctttaatgatgtagatgccataatagatgctgatctagccttatcttccatgtcctcattttttattcctataatggatccatcttgctttaataaaatctgttgcaatttcttaatatgcttcatatataaatccctaggaataattttgtcttctacacacattgctgccgctaatccaacagcttctcctattgtagcgcaagttgccataactctagttgctccaaaagctatatgtgatgcactaatatttcttccagcaaacatcaaattcgatacgtttacagaatatgtggaacgaaacggtatatgaaatactccatcagcttgtatatttctcgagccacagctttcctcatatattcctttctcaggatgaagatctattgaccaaccaccaaaagctattctatcatcaaattcggtctgttcaataatatcattttgatttaaaacgtaatctcctataaatctcctatattctcttttacctggaattgacccaacccactctaatgttagattgtctgcatcataatttcctgaattttttatataatcccatattccatatactagtgtccataactcatctcttattatttcattgtcttttactatatcaacttctccgcctagttctatccaccaatagcagcaacctgagtcattggattttataactctattctttggaatactggttttacttatatcttttgcaaaattaggtggaataaatttaactggatgtccagcatctttagtataaaataatatagtacttcctaataaaattttatcttccttttctggcgccaataattcattatatttatatctggattctcttcctaaattatatttagcaccagctaattctccaataaatccatctccggaacaatctagatatacctcactttcaaattttgtcttagtttctgctccaattgtccaacctgtcacagattttattttattttctttttctccttcaattacatcgatttctgatacttctgtatttaaaaataaagaaatatttttttcatcttttaccttttctaatagtagcatgtcccaaaaatatggatttccatctggattgcgatactgattttctaaaaacaattctcccataattccagtttctctggcatatctgtttactccatgttttgttgctccacatacccatacacgaatttcactactagaatttccacctaaaattccgcgattttgcactaaagaaacacttttaccatttctagcagcagaaatagctgcacacacacctgctaaaccaccacctattacggttatatccttttttacatttttgtaattcataattcgctccctttatagatatattaatcctaatgcctacatctatttagtgttttaatatttacaatgcattgtatcattttttaataatcagcttcaaattgggcctatcactatcatatcccacactgattatatctttataatatattaggacattaattttttgaattcactaacgtatcatctgcatatactttatttcatatattagatataacaattattatctatacaaaatataaatatcttaaaaaagaaatatctagcattcacatattctgcaatcaaaatttctatataaatacatatataattactttaattattttttaaatgtttacatttcacttctattttcttataattcttctatggcataatcttcttagctcttaaaggaggcttattgatgtttgatttaaataatcttaatgtaaatattaatcaacatattttttgggataaaaaagaacattttctattggatgaagacatagattcgaactgggtactttacgctattgaagatggtgaatgcagttacgaagttgaatctcataaaggaaaatgtaaatttggtgatattgtaatttgtccacccggaataattttcaaaagagaggtcattaccactcttacatttcacttcataaacttttcaataaattctggagatgatacttcatcttttccagttggtaaaatatctgtatcagatttaaaaagacttaataatatgtactattatttaaagctatatagtcacaataacaatattgaattaaaccaatggaaaagctcattgataagcgatattatgaaattatattatatagaaactcagtatagcagctccccaaagaactttgttcaggatgaaattataaactattcattaaagtacttaaataaatatgcttatgaatcaattaaaatcaaagatttttcagcttcgctaggacttagttctgttcaatttactagacgattccacaagtgtataggaactactcctattgaatatataacttctttaagattaagaagagctcaagtattattgctcagaaccgaagatacattagattgtattgcttcaaaatgtggatatgataacggattttatcttagtagggtctttgccaagaacttaggcatatcaccttctgattacagaaaaaaataccggtaataaattcatataaaataagaatctaatatatttatatgtgggttgcacaatataaatatattagattcttaaaaacttgctgttaatcagccagcacaaaataaactatttagagcatttactttctcaaatataaagtaaatagcaacaaatcatagagcctagctatctacttttctatataattaatcacattttttactattaaattaatagttccatcgccgtttctttgtatctcaaacttgctagggtcgtggtatgtctcttcatttatatacaaatcaatttgtttatcaatattaagtctaactctttttagttttttctcaacccaagttttatccacagctacttcttcttgcaatccttgttgttttatataagttgaaaactcttccttcgcttgagggtgatcattaaataattcagcagaaaactcctctatattaatagagtcttcttcttttaatttagtttttattgcagtcctaatctcttctgctcttcctgcatcatttgtaacattttctctagtccagttttccgctgcttttacaaaagttttggtcatatctctttcatttgtaacaatgcttgcacctaagaatgtgtttataaaataatttgctccatactcatcttccttactacctttttgcttatctaaaatcattaagttatatttatcctcttctataattggtttaataaatgcagctttttgaattctttgcccacttcctggaagtcctgctgcttgaggtactatacctatacctattttctggtctataaattgaacctcatgagtaaaatttttaacgtaatccatcttaagtattcctaccattggaccttggtctgtagttaaagacactattattaaatctcccgacgggatattcacatttcctttcattattatgaataactgcctagctaattctttagatagattaactaagttattgtttactccagtcaaataatcctgagctacctctttaactatatttctttctggattaaactttccatatttaagttcatcatccttgaaacatttttctagatgcttatgtaagaaaaaatatatatcttcgtctaattccaaactatattcgtttaaaataggttcttcaccattactatctaatatatgaataactgcttcatttatattaatctcatttatgtattccatactttcaccaccaaataaatttatacattagatattataaactttaagtaaattaaaaaaaagccttaaagtatacaaaaaaaatggaaaagagtctgatataaaacttaatttcttatatcatcaatctcttttccacatttttaaatattcttaatttattaatcagataattttcctaatctaattatttatcttcaaatttacttacataattttttaaattcatctgctacaaattgcacctgtgttcctacaacaacttgtacgcttgtttttcctggtcttattattccagatacacctgctgatttaataactttttcatctacagcagcttgatctttaatttctaaacgtaatctagttacacaattatctatagatactacgttttcttttcctccaacaccctttaatattacagctgccacttgagtataatcattattcgcaagttttacatttagttcttcagtgtcatcatcttccctaccaggtgtctttaaattaaattttgtaattgcaaaacggaatgttacataatagattactgcaaatactaaacctattggaattaacattattggattttctgccataggcgctttgaaacttaagaaccaatctacaaatccagcactaaagttaaatccagctcttactggtaataatgtacatacaaatgctgaaattcctgttaatccagcatgaagaacatataaacctggagctaagaacataaatgcaaattctaatggttctgtaacacctgtgaagaatgaagatattgctgctgctaataataaaccatataccgctttcttcttcttatctttagctgtatggtacatagctaatgctcccgctggtaatccaaacatcattactgggaagaatccagtcatatacatcccagttactccttgtgttcctttacctgaccagaagttaccaaggtcgttaattccagctacatcaaaccagaatactgagtttaatgcatggtgaagaccaaatggtattaataatctattgaagaatgcataaataccagatccaactgcacctgttgatacaatagcttcaccaaatgctactaatgcaccataaataagaggccatgcaaagaataatactatagatgcaactattgaatatgctgcggttacaattgcgacacatctttttccactaaagaatcccaatgcatctggtaatttaacacttttaaatctgttataacaggctgcacctattaaacctgataaaataccaataaattgtgtttgagttttagcgaatgctggcgctacctctttaacatcaattcccttaaacattgctacagctcctgtagataataatgttgtaatcataagccatgaaacaagtcctgcaagtcctgctgtaccgtcattatcatctgacattcctacacctacaccaattgcaaacaaaattcccatattgtcaattaaagcactacctgcttttagcataaaagctgaagcaatgttatttgctccccagcctgtagggtcaagccaataaccaagacccattaaaatacttgcaacgggtaaacaagctactggaagcattaaggattttcctaatttttgtaaatacttcatcataataatataattccccttccataataattaataaaatttattttaaggattgttatatccctaaatgcactataattcttatggacatgtatccttttcagcaaataaaaaagctgaaaaggataaattatattatccctttcagctaatgccctgatttaatcggttacacgccaaagatcgtattcttatacactcatattattctatagtcaatacccttttttatttttttattgttgacactaattgtatgaaataatataattagtacataaatgtgttactgtttaatcaggcataagtttgcgtaattcggaaacttatgcttttttattaccaataaataacagaatgaaaggaagtgactgttcctgtttaatcgggaatattaagtatgtttaatttttttaagaaaaattcaaaggactcaaataaagaagcaaaattagttgcacctataactggtaaaacaatagatttatcaaaagtaccagataaagtttttgcagaaaaaatggctggagacgggcttgcaatagatactactggagatacagtagtttcacctgctgacggaaccttaacattagtatttaatacaaagcatgcatttgcaattactcttgataatggagctgagttattagttcatataggtatcgatactgtttctttaaatggtgaaggttttgaacaattagctaaagctggaactaaagttaaagctgggactccaattataaaaatagatagggattttattttaggaaaaggtttttctttggtcactccagtccttgttacaaacatggatataatcaaggatttaaattcaaatattgataaagaagttgttgctggagaagatgaagtaattacttttactttataaaaaaaaaatggctaacatgtttttattaatatgttagccattttaattagagttttattgtagcttttctaaatctctctatatgcattgctagatatgctatttcatcatctgaaactttcttttctagctttaaaactaatatttttgctacacccttagatactttatatgataatttatattttgattttatttcttttataaaatcattttcaatagatatgtcatctaaaattcttttaattgcaaatctcaaatgtgtgagaaatctggcataatctaatgatgttttgtctatttttatttcagtttttgcttctacgtattcaattattgagtttatcaaatgtgtattctttatagtattggatagcttacctgaatttctagcagaatggatatgtaatgctatgaatccaatttctccttctggaatttttacctttttttcattttgtaaaacttccgcaactttttctgctaacgagtattcttgtggatataatgctctaatttccataagaaatggattctctatttcctctttgtccgaaagccttttcactgcaaaatttaaatgatctactaatgcaacgtgtattctctcatccaaattttcctttaattcatttgcaacatatgatatcatcttttcgcatagcacaaaaaattcttcatcaacattttcgattacttgtttaaagtttcttaggttatcctcatcttcaataacaaatatcttttcaacctcagtacccttttcaatggtatctccagactttctaccgaatccaattccctttgcaaaaagtattctttcctttccattcatgtttacggaaactatattgttgttataggattttattatcgttgctggatcaataattttactcatatgaccaccctttttattatttatagaactttctaatctttagcaaatcacttatgatctgaattaatacattatttagaaaatataaatgacattattaatcttataaaacgattctatcattaaccttattatttaaatactttacttatttttagccgttagtatctattatgattcttttaaaccatataaatctaatatattaataatagcttaatatattatttattgtaaagcacagatttaagaaatcttaagatataaatagaaagcagattcctaagaatctgctacatttcataactcactaatataataaatggactaatataaatatattaattaaaattccatttattactcaatatttaatatagagtattaagaatattctactaagaaacattataaataactatgctaaaatcctttattaaaattcctcttttacattttcttttcttaattcttgccttccagcaacatatacaaatggaagatatattaatatacttacaattaaacaaataagagctgtaactccacccatgattgagttcgtagatatgattgctcccaaaattggcggtgtcgtccatgttgccattattgctacctttggaacaaacccaataactgttaatatatatgctatggttaatgaaactataggagataatataaacggaataaaatagatcggatttaaaactattggtgcaccatatattactggttcatttatattaaatattcctggtgctatacctaaatttgcaatggccctttgttgtgcacctgcttttctacctaatacatatattgcaatcaataaagctattgaggttcctgctcctcccatatttacatatgaatctaaaaattgactatttaatatattttctggctgtaatccatttgttattgcttctgtattagctaaaagtaatggaagtaataatgcatttattactggtgctagtatatttgaaccatgtaaaccaaaaaaccataatacatgtaccaataatactattacaaatactcctaaaaagcttcctgcaattaattgtaatggtttctgtagagtaaagaataatgcctgatgtatatctggtacactcataactataaataattccttaattcccgctgctaatgccaaaattattattgttggtaacaatgctgcaaatgatttcgaaactgctggtggtactccactaggcatttttattactaatttaggattgccgattaactttacgaaaatctctgtagatactaatgatactatcaatgaaataaataaaccttgtgcccctaaaaaagttaatggaaatgctcctccatctggtgtcgttgcatataggatcatcgatgccgcaactgatactattccagctcctaagccatccttatcatacgatcttgctaaatgatatgatatcgtaaatacaactaatattgacataattgcataagaaccattccatatagatcctccccagcttttccaacctgctggcaatagccaatccatgaaattttgataccattgaaatcctatattattgaacaatactgcaaatgcaccggccattataataggtgttattgtagcaaatccgtcacgtatagctactaaatgtctttgcgaaccaatcttaaatgcaattggaacaaagtgctcctccatccattcaaaaaatttattcataattatttcctccccatatctaagatttatttgaaataaagtcaaaactcatccatggctctatatagtctagtataatatttacctaaacattactttctctcttcgctttattaatataataagcaccaattgtaggtgaaatttcatcatctactatatactcaataactatattttctcttaggtacttttcaaaagatttccttaatatctttgcttttcttataaccccaccaaccaaggcaatagagcagctttcaaattttaattttctatacacatttataacagtcttagccaaatctacgccttcattaaccaatatttcttcagctatcttatttccttcctcgcccaatattgaaactacttctgccaaagatgctatctcgtccttagtagaggaatatacaaaagttactacttcgcctattgatttagcacctaaccttttcataattctcgtagttaattctgatttgggtaaagaattttcttcttcaaatatcattctttttatagcatcaattgatattttatatccactcccttcatctcctaataagttgccccatcccccacaccttacacttgaattatttttaactccaaatgctatcgatccagttcctgctattgtcaatattccatcattcccccttaacatagcttttagggctatttcagcatcgttcataagtacacagtcagtcttaagttcattttttattgtatcttttataatttttgcattatctccgacttccgatcctgcaatgccaagatataaatctacaagttcgtcttctttaagaacatctattatttctcttattgaatctactatattatttagtgctttttctctattatttagcaaatttgcgaatccttttacagaagtaactataatatttccttgaaagtcataagctactgcttccgtttttgttcctccaccatccacacctataatgtatttcatatcatcactaccttttccttaacattaagtaaataagtaattaggctaacatatgttgttattaaatttttcatgtatttctataatttcaactgccatagactttaatgtcatactagtcataaagtgatcctgagcatgaatcataagtaaagaaacttctgttttttctcctcgtgcttccttttgtattaaatatgtttgaacattatgtgcttttaataattctgcttctgcttgttcaattaattttcttgctccatctatattcccacttttagcgcattgaatagcttccattgaataacttctaacttctccgctatgcactataagattcattattgtttcttccacaatgtttctctccttttcaattatttattttttataagatctagagctctttctaagactttttctccattcattgttccataatcaactgtattaattacttctacatatatattcttatccgataaattagctttaaattttgataataaaaatctaacctgaggccccagtaacaaaacatctatattacctatatattctttaacatctgcctctcctacagcttttatattacattcaatccctttttcttcagctgccttttccattttcgaaactaataaacttgtggacattccggctgaacaaactaataatatattcttcatttttaacctctccttggatattttttttactagcattcatctattacactattatataaagcaagttttataccaatattatatttatacataaataaatataaatcatctcataatcgcacaattcatgaatcgaagtgtgcaactttaaaaaaatagtgtgtaatttaacttacacactgctttggctcttacacagtaactatattttccttaacaattctcactatataagcgatctcattatctcctatatttatattatatacacgctccaagtcttttaaaattttcttaatcaatgaaaattcactattatacatatggcgataattttctaaatctttgaattttaattcttgaccaccatgctttaatttatctataagaaaagtgatatgaattaaaattcctatctgtgcatcatgctgaattctcacttttaaattttcttctatttttcttattacatctctaatatctgaaaatacctttattgaatttaattcatttaattcaatacttaatgcttttctaacttttagaaagtcatattcaatgtccactagattctccaaatagtttattccctcattcaagaatacatcttgtgctggtataaattgaacattttcaataactatgtttatagttcctacaactgctaatactacaaacttctcttttagcctatttacttttctaaaaaactcttccctatcagaaatattaagcggtataatttttactttttctatattcttcaaattattacttattcttatttttattctttctgctgctccttcacctgtaaagcatgtagttattataactagttctttattgtatttatagtcttccttagaaacttgcatagaggactttccaatatctctgcataaattatatattgaatccaaacttctcccattaaaagctttacttcctgcctctataacagttagtgttgtgaccatatctatggttttaatttttatttctaattcattactaattatatctccaaagttaaccaatgatcccatatcaacaagtaacaatatacctttttcattatatatttctttaatttttttcttagctttctctagcatatcctcagccttcatagttagtggcatatctagagcttgcacatattcttctcctattaaagaattagctacctcagccatgctgctagctgtacttgttccatgcatcattactagaactcgcgcctttttctctaattgttcactattttcatcattacatgcagccaaaaacatagttatatagcctatttcatctaatgggatatctatatgaaattctttttccgcaatttttataatatccatggccacagcaaattcttccctattttctacccttataatattaagcttaggatgatatatcttttttcctgaattaatcctttcgatgcttccctgtaaatgaagtgctaacccaaaataaactttctgatcaaaatccctatttaacttttcagatgctatactcaacattttttctgcaactgtagctactttaatgtttacaattttggcaatctcatcttttttaacatttgttgtgatattactaatatatcttctaaaatatttttccaaatcaatatttagaatatcatttatttctgtctcattaattcctcgtgcctttaagttttccatcttattttctattatcgaataaaaacttttattttccgagccttctatttgattttcatgaaattcaatattttttagtatactatcttcacttgaaaatcttaaaatatcagccatatcttgagataaattatctatttcttttctgcattctctaattctcattattcctttttgaattctaggttgcagatcacttttatctaccaaaatataattatttttcttaatcttataatttaaaaatgctttagcacaagctaattgtatatcactttttaattgccctatattattaggacagtcatatagtaaaaatgaaataatcgcatttttactaatatatatgctctttccgattcttatagattcttctgttatgaactcgtttaaaagaagatatctttcctctaattttctttctcttaatgtcggtaatactatcaccattggaattcttctagtaaatgttttcagaagatatgactgtggattctccgtagtagctgctataatctgcacttcagatttcacctttttctcagtatctccaagctgcctaaaatatcccttatctataaaagtaaataacatttcttgcccctgtggtgatagcctgtgtacttcatccaaaaagaatattcctccatcagctttctttaacaaaccttctctatcagtatctgcccccgtaaatgcacctttttttactccaaatatttgtgccacaactaactgaggattatctgaataatcggcacaattaaatctaataaaaggagcttcagcagctattattttagagtctttagcaaaattgtacattgcttctgcaaatagcgattttcctacaccagtttcacccaaaataagagcatgtaagcctctaggaggatataatattgcagctttcgcttgctgtacaggtaatttaagtgactgatttgaacctatgagcatttcaaggctatctatatttttcacgattatgtccgatttatttttaattgaattcatttcattcttgtaacttttgatactactatatataactggtcgtccttcttttttatttatccttttttccttatataattggtttaaatacctacttatatttgttcggtctattcctatataaaatcccagttcatctgctgttattcctcttcctttgatcttttcaagctcaataagactctttattacttcttcctttctaggtaatcctttcatttaatattatcccccactcataagtagtccacattaaaaacataaaatttgtccttataacttttaacctactatataaatgcatctctatatattgtcccatgtttttcgctttctaagatacatttgaaattttcctttgaattcttctacataaatctttgtgaaaatataactggatactaccagttttgaattcattatataataatatttttatttcttgcaaccatattcttcatattattataattgtttagataattctgactctactataaatatgccatataaatcaattttactagcacaacttttaaaattgctatattatattattatataaaaataaatatctactctttttaagtattatttattaactttaactaaggaggctattctatgcaagagttagaaaccaggatcgttgatattgatgttgaaaatataaggaaaattttattatcaaatggtgctgaaaaagttaaaatggaagatcaagtaaatgatatatatgattttgaagatggacgtcttttagataagaaaggatatgctagaataagaactataaatgatatgattaataataaaatcgtgtattttatgactaccaaaaaaatgctatcccagggcagatttaaagtcatggaagaaaatgaagttataattgataacaaaactatgggagaaggtatatttaaatctcttggattagttctgaaagaatctaataaaaaatatagagaaagctataaattacttgattgcttaattgaaattgatattaatgacaagagtttttgtcccttcccatatttagaaattgaaactacatcggaagaaaaattggaaacagtagtgaagttacttggatatacattagaagatacaacctctcaaacaatatacgatatattatctgaaagaggattgcttaataatgtccctaaaggaatataattaagtttttattccattaactgtaaatttactatggaattataagtttatataatgtaaaatatacatagagataggtatacttttaaaatgaaatttgtttagtttacttttaaactaaactttttttcttataaaaggaggatgtcatggaaaaatatgatgacataaaatatttaagtctgcttgctaagcaatatcctactattgcagcggcatcaactgaaataattaatttagaagctattttaaatttacctaaaggtacagaacattttttagctgaccttcatggtgagtatgagccttttgttcatgtattaaaaaatggttcaggggctataaagagaaaaattcaagaggtatttgaaaattctttaatggactgtgaaaaaagaagtttaaccacacttgtatactatcctgaacaaaaattagagattgttctaagagaagaaaaagatataaatgattggtataaaattaatctgtataggttgattgaattatgcagacatgtatcttctaaatatacaagatctaaagtaagaaaagcgctacctccagattttagctacattatagaagaattattacatgaagaatctgataataatgataaacagggttattatgatgggataataaatactattatcgaaattgaacgagcccaagagttcatagtggctctatctaaattaatacaacgactagtaatagatagattacacataatcggagatatatttgatagaggtcctagaccagatataatcctcgatacccttataaattatcattctgttgatatacaatggggtaaccatgatatattgtggatgggtgctgcctcaggtaatactacatgtatagcaaatgttttaagaatagcagctagatattctaatctagacgtcatcgaagatatttacggtataaatttattacctcttgcaacttttgcacttaagcactataaaaatgataattgcatagctttcgttcctaaaaacacagatgaaacattatatggagcctctgaaattgagcttatttctaaaatgcataaagccataacaattattcaatttaaacttgaatatgaaattataaaaagaagacctgaatttaatatggatcatagattacttttagataagataaattatagtgatggcaccataactttaaacaatataacttatgagctttgcgacaaaagtttccctacaatcaatattaataatccttttgaacttacgagtgatgaaaaaaaattggtttctaagcttcaaatttcatttataaatagcgataaattgcaaaagcacgttctatttttatttaataaaggaagactatatttaacttataattctaatcttttatttcacggctgtattcctttaaataaagataaaacttttaaaagtatgactattcatggtgaagagtataaaggaaaaaaacttctagataaatttgattctttagctagagaaggttatttcagtactagaggcagtgctgaaaaattatatggtattgatataatgtggtatttatggactggagcctgttcttctctttttggaaaagaagatatgacaacttttgaaagatactttataaaagacaaaagtacacataaagaaaagaaaaatccctactacaattttagggattctgaagaaatgtgtaatatgatttttgaagaatttggattagatccagctgaatcacgaataataaatggacatgttccagttaaaaataaatttggagaaaacccaataaagtgtaatggaaaactgatagttatagatggtggctttgctaaagcttatagaagtcaaactggcctcgcaggatacacattgacttataattcctatggacttcagctaatatctcatcaacctttcaaatcaattgaagatgcatttagtaaagaaacggatatattatcttcaacacaaatagtagaaaaactagacagaaaaaaagttggtgatacagacataggaaaggagcttaaaaatcaaattaaagatttgaaattattgctcaaagcctatagaaaaggattaataaacgaggtaagatagcagccattatcttacctaaaatctaaatatgtagaagaaatttatttcctactagtctctaactaaaattagatcaataagttatattcaaaatcttcattaaagaccacttgattataacctattgatctgattattttttattgcacttttacttcactttatttaatgctaattattcagcgcgccttatttcttcaaattgagctattaattcttgtactgctttagtaagattaccgactattgcatggcaacgattttcattatttaggtataattgttttcgtcaatagcctgtatcctatctaaatatatttccgcttataatgagtttttgtatctcatttgtgccttcatatatttgagttatcttagcatccctcatcattctctcaacattatattctctcatataaccatttccacctaacatttgcacagcctcagttgttacgtgcattgctgcatctgtacaagctagttttgctttagctgcagaaactgagtaaggctttccttcttgtttatccatggcagccttatataccatgtatttagcttgctctatttcaagctctaactctgccattttgaaagctaaatattgatttttccataaaggttttccaaattgctctctttccttcatatattgcttagctacttcaaacgctccttctgctattccaagtccttgagctgcaactcctattcttcctccatcaagagtcttcattgctattccaaaacctttgccctcagctcctactaagttttcaactggaaccttacaattttcaaatacaagttctgaaacttgtgctgatcttataccacatttattctcaatctttcctatagagaatccttcgaattccttttcaactataaaagctgataatccttttgctcctttgctcttatcagttaatgcaaatactaagaatgtttctgataaaggtccatttgtgataaagcattttgcaccatttaatatataatactcaccattcttatcagctgttgttatacatccacctgcatctgatcctgcatttggttcagttaatccaaatgatccgaatttttttcctgacaaaatgtctggaagatatcttttcttttgttcttcagatgctgcattaattattcctcctgaacaaagagaagtacttactgaatatgaaattcctaatgaaccactcacttttgatatttcttcaactgctaaaacataagataaataatctccaccagttccaccatattcctttggatatggaagccctatcaatcctaattcccccattttcttataagtgtctattggaaattctccactttcgtcatatgcaactactttaggtttaatttcgttttctgcaaattcccttaccattttcactattttttcttgttgctctgttaaattaaaatccatcttttaaatcccccttgtaatgtatatctttttaatttaaatataatttgaattttcaataggtaccctatcttaacgcttagagcccttaattttatataaaatatatttactcccttaatcccatcaacttatcataaaatattcttccattcattagtctaggtactccatccattttaggtttgaaatccattaaatccaatacatccttttttagatctatcccaggcgctatttctgtaaggtataatccatctttccttaactcaaatactgctctctcagttatatacataacttgttgatccatccttcttgcataatctccactaaatgtaatttgctctacatccttaatgaattttttagcttttccttcttgtttaatttctaatttgccatctcctgttactacttttaagcctcctgcagtgaatgttccacaaaataacactttcttagcattttgagttatatttatgaatccaccacatccagcaattctaggcccaaacttacttacattcaaatttccatgttcatcaacctgagctagtcctaaaaatgctatatcgacgcctccaccatcataaaaatcaaattgatatggctgatctataatagcttctggatttatactcgctccaaaagctgtgcatccttgtggtatacctcctattggaccggcttctacagttaatgtcatatattcaccaattccttcttcattcgcaactaaagaaataacttctggtatccctatacctaaatttactaccgtatctttctttaattccatagctgctcttctcgcaattatctttctctcatttaatggagctttttctacactgtttaatggaattctcatttcacctgttactgctggattaaatgggcattcgaaggattgttcatgctcttcgggagttgagattacaaccgcatctacatatatacctggaatttttataagacgtgggtctaaagatcctgcttcaactactttttctacttgaactattacttttccgccattattcttacaagcttgggctattgacgtatcctcaagtgtagctatttctttttctaatgatacattaccgtattcatctgcaaaagatcctcttaagaagcagacattaactggaattgatttgtataataatttttcttcaccttctatatttattagctttactagatcttcttttgttttttcatttaattttccaccactaattcttggatccacaaatgtattcaatccaacgtgagttattgtcccaattctttttcccgcaatatctctaaataattgagaaattgtcccttgtggtagattataagcttctattttattttcattaattaactttccaattttcggtgctaaattataatgacctgcaaccactctcttaagtaagccttcgtgggcataatgatctgaacctttccccttactatcgccttgtcctgctgcatgaaataaagttatattttgcggatgatttgtttcaatgaaacgtttttctaaagcacaactaagagtttcaggtgcacaactaccaacaaatccgccagttactaacacatctccatccttcactatttgtactgcttcgcgacttgttaaaacttttacttttctcacctatattcagtcctttcaagattaattaactgtcctagcgtcttaatcttttaacatcctttaaatagagcctttcttttttctataaatgcactcattccttctgtttgatcatcagttgaaaaacataatccaaataggtttgcttcaaatgcataggctgattcagtatccatatttaagccattatttattgctgatttagccaagcttactgcaaataatccttttttcattattttttgagctaactcaatagttttttccattagttcttctggttcgtaaactttattaacaagaccaattctataagcttcttttgcatctatcatatctgtagtaaatatcagttctttagctattccttttccaactaatcttggtagcctttgagttcccgcaaaacctggaattattcctaatccaacttccggttgtccaaatttagcattggtagaagctaatcttatatcacacgccattgataattcgcatcctccacccaatgcataaccgtttacagcagctataacaacttgtggcatattttcaatattagaaaataccttttgagctagcttagccatctctcttccctctattgcacttttacttttcatttctgttatatctgctccagctacaaaagccttttctcctgatcctgttatgataacagtatatatatcctttctttctgatatatcatttattacttgtcctagttccttgagtgtttgtgtatttaatgcattaagtgacttaggtctatcaatacaaatcactgatatcccattttcttcctttaccttaatattttccatttaatattcccccttcaagatatattgtatttatattaatatcttttataattaatattttttgttttcgatataatttatatggtggaattaaatttttaaactttaatcttaattaaactttagcttactagattcttaactataaatttaatatcgcaacatatattcatcactcatcactttatagttaaaggttttcatagaaacagactttaactacgtttgtttattatttcaaatgcatacatcattaattatttttgcactaatgattcccaaagtatattgctacaacctagcttctatattttcttcaacaaaatcatcattcttatattttctaaatgactgctctatttcctccaatgatttaccatatgtctccggtgcacatttatagataaatatacctcctataattgacgatcctataaacactatgaatgctcctgataaaccaaatcttgctaataatatagggaatacaaaacctactataaagttagctacccataaagcaaatgctgatattcccattccaaaacctcttaatcttaatgggaaaatttctgatattaatagccaagttaatggtccaagaaaggcttggaagaaagctatataaacaatagtacacattattacaacaaaaggaagcatagatgaaccttgtaaaacgtttgtaacaacagataacgctgtcatagctatagtagttccagttattccaagtaaatataactttctacgaggatatttatcaccaacacattttacaaaaaatatagctgctataacagacatcaacccatttcctatgttagcaattaatgccacctttgtaccaaatccagcttgttccaaaattgatgttccataatacatcattatattaattccagcaatttgttgtgtaatacctattccaactccaattaaaacaatacgacggatccaaggaatagataaatcagcaaatgatgccttgtctaaatgcttttccgcttcaatattcttatttatttcttctaattccgcttctgcctctgctttatcacgaatctgttttagaacttctaatgcttttgctgtttttccattagatgctaaccatcttggtgtttcaggaagtaccatcattccaaaccacaatacaattgctggaatagtagcaagtactatcatataacgccatacaccagaattatctgcaaaaaggtttcctaatacagcatttataacataagctactaattgtccagttacaatcatcatttcatttttagatactatacttcctcttaggtgcataggtgccaattctgctaaaaatgttggcacaataactgatgcccctcctacagctaaccctaaaacgaatctagaaacaatcataatatttgcattaggtgcaattgaacaagttatagttgcaaaaaagaatataatagctaacattcttattatcttttttctaccatatttatcagatagacgtccgccaattattgcaccaaatgctgcacctaatgttaatatacttgtaacaagcccttcattcataggtgtcaaatttaattgatctggtcgtttcatgaaacttaatgctccattaaacacacctgtatcatatccaaatagtaaacccccaaatgttgatataatttgtattttccttaaattactttttttcttaatgttataagaaccttgctccattctaattcctccttatctactttaaataattagaatcattcagaattacacaaatacttttataatttattttttcatattaatactgtttttcttaatatatttataaatgctttattctgatttcaatatattagtaacttatacctatcattagtatggtaactagatatattgcacactcttttctaagaaatactagttaccaaacttaatagattttgttcatttgaaatcttttatgaattttaattttaaaattttgttttttctttaatgtattttctagcttttattgcatattcaaatgggtttgcaattgctggatcctgttctgcttcaactaatatccagccttcataattgttttcatccaatatcttaaatattggctcaaaatctatacatccatctcctggaacagtgaatgaaccctctcttactcccattaaaaaactcattttttctttcttgactttttctaaaacatctgctcttatatcttttaaatgcacatgcttaattctattagcatatttatttaatattgcaattggattctctcctgaataaaccaaatgacctgtatcaaataacaaatatactaaattttcatcagtcatactcatcaatttatcaatttcatcagtggtttgtactccagtccccatatgatgatgataaacaattttcattcctttatcttctgctaaccttccaagcttattaagaccatcagctaatagtttccactcttcttcattaaaataatattttccatcaaatattggggtatccatttccccttgaatactgtgcccttgctctgatactactataacttttgcacccatttcatgtaagaagtccctatgatctataaattctttttcagtttcttcataaggcttagtagttaaaaatgaactaaaccaagcacttgctatttgaagatttcttatgtctaatgctttttttaaaacatttacatccttgggatatttatttcctacttcagtgcctttgaatcctgcaagagccatttcacttacggcttgttcaaatgtattttcttttcctaaatcaggcatatcatcatttgtccatcctattggacaaattcctaatttcactttttcagtattaagcataacaatctcctccaaaattctaatatattatttctgatatcctaactggtctattctcttttaatgatttagttgcagcctctcctattaacacagcttttaatccgtcatctgcacttactgaaatatctctattgttaacaattgcgtctatgaattctgtaatttcatctgcatacgcctgcatatacctttctaagaagaaaaacaatggcttttcagatgtaactccatccttagttgatatcacagcctttgaaatactatcattgcccacagacacttgaccaagagatccaaatacttcagctctttgatcatatccataagacgactgccttgaattatctataactgccattgctccattggccatttttaaagttataatagctgtatcaatatcacctgcttctcctattgcattatcaactagaacattaccagctgcataaacttctaccacatcactacctaaaagatatcttgccatatcaaaatcatgaattgtcatatctaaaaatattcctcctgatacctttacataatcaattgaaggtggttcaggatctcttgaagttattttaagaacatgtggttctccaatcttcccttccacaaccgcatttcttatggctttaaaattatgatcatatcttctattgaaacccacttgatatttaacctttgatttattaagttcatctatcacttctttaattcttgccaaatcatgatcaattggcttttcgcaaaatacatgcttacctgctcttattgcttctatagagatttttgaatgagtatctgtagatgaacatataagaatagcatctatttctggatcttctagtatctttttataatctttatatacaccttgaatcccaatttctcttgcccaatttattgtagcttcatttaaaaatacatctgctatagcttttacctctgcatttttaacatactttgaaatactttctccatgaacttttccaattcttcctgcaccaataattccaacctttaacataaattatctctcctttaatattttcttgcatttttaagttgattttgaccatattcaaaagcttcattaacaaattttttttctgatacttcagctaatcctacatgccaccatgattcatatccatcagtcatggtttttggtaaaactttaatatcaattaaagtagaaattttttgtttttttgcatcactcaatgcaacttttaattcctctaaagtcttagctgtatatgttttcactccgtatccacttgctgccttagcaaaatctataggaattaaacctccattaagttcttctgtgtcgttatttctgtatctaaactctgtagcaagattccctattccattagacatttgtagattattaatacatccaaatccacaattatcaaataataatacatttatcttcttaccttcttgcaatgaagtaataagttctgaatgtaacattaagtaacttccatcaccaactagtgagtagacttctttgctaggttccgcaattttacaccctagacttgcagctatttcatatcccatgcaggagtacccatattccatatgatatgaatttctagaatcagtttcccacattctttgaaggtcccctggcaagcttcctgatgcacccactacaattgcattatcatcaatgcattctctaatcaatcctagagctgatgtctgagtaataactccgctagttaattctttaaattcttccaggcttctttcatttcttgattttataattggagtgaaatcttttccatattttatattaattaacctatccatctcctctctccatgcttgttttgcatttttaatctcatcttcatatgatgaaacataattttctttttctaataaattactaagtttctcaatacaaactttagcatcaccaaccatcttattggaatccaatttacttgcatgaaattttgataaatttattgttataaaatctacttctggatttttaaataaagatttagatgatgtcgtaaaatccgagaatcttgttcctattcctattactaaatctgcatctttagcaattgtatttgcagccaaatttcctgttactcctattccacctaaattcatatggtgacttcctcttatagcactttttcctgcttgcgtttctcctattggaatattaaacttttctgcaaatctttcaagtacttctccagcttctgaatatctaacaccaccaccacaaattattattggtttctttctcttagttattaattcaacacattctttaaactcttcatccacagctatcggtcttgttattttatgaatacgttttttaaagaaatattctgggaagtcaaaactttcaccttgaacatcttgcggtaatgctatgcacacagctccagtatctgatggatctgtaagaactcgcattgcattaataattgcagacattaattgctctggtctagaaactctatcccaatacttacatactggcttaaatacatcattagttgtaattcccatattataagattgttcgatttgttgaagtacaggatctggctgtctgctagcaaatgaatctcctggaaacataagtaatggaatattattaactgttgcagtagctgctgctgtaaccatattagctgctcctggtcctattgatgttgagcatgctattatctttcttctattattttgtttagcaaaagctgatgcaacatgtgccattccttgttcgtttcttccttgataaacttttaagtttcctggatcttcatcaagtgcttgtccaagtcctaaaactattccatgcccaaatatagtaaagattccatcaataaatcgttcctctttcccatcaaataaaatgtattgattatttaaaaatcttactagtgcttgagctgttgtcattttaatagaattcatctctttacctccctttactcctcaggccatattttagcattcttattccaaagccatttatgttcatctacatctattctatctttccaaggattattttctagatgcctaatcatccaacaataatacattgcatatcctggagcagatgtttgcggatgtacatctcccccaattattgttgcaaagctattatctagaatcttgtatgctttatctccatttaagcacaatccaaatccttgtggtttatcgaacttataaaagtaaacttctggttggggatggtaatgaggaggatagcttgaccattttcctggatatgttataacttctccaataaccatattggaatacggtgcatttttataatcaaatattgttcttaccactcttctagcggtaccattccaagtcccttctccaaagatttcactcttacattcacttggtgaatataactttggttcaaaaaatcccaaattttcagtgctttgaattaatatctcactatcttcactggcttcaacagtaactccaacattcttaggtacatgtaagcaccatggatcatcatcaaatactgattttctttcaatagacttagaattttcaagccaatttattttcacttgtcctgtcagaagtaaaacagctatttccttatcactttttagatattctcttctttgatttttttctaatttttctaccgttacatccattaacatttctttatttttaccattaatttgacataatatattctcgccattttccaatctatccaaattataaaccatattaactcctcctcttaagctctagctaccatatcaccatattcttctttttcttcttttataaaatttcttattgcttccactgtaggcatatcttgcgagcaactatgactagccactaacattgctgctgatgcacttccaaattctaatgaatctataatgctccatccttctaataaaccatataggaatgctgatgcataagcatctccaccaccaaatgatttaagtagcttaaccggaaatggctttatattgtatgactttccatcactagtgtaagcagtagatccttctttaccatgcttaattactactattttgtttccgtaatctaaccatcttttcgctgtttcttcatctgaatttttctctctagtaattaatttttccattaaatcaaattcttctcgtgagcccattataatatcgctttgttttccagcaatcgaatagtatatagctatttcatcactatttttccaattataagctctataatccacatcaaatattacaactgtattattccttttagctaattccagcgctttcaatgctgcttctcttgatggacttttggcaagagctgtccctgatatcactattgccttagtattttttatatattcctcgtcgatttcatcaacattcaattctaaatccgcaattccctgtctatacattaatatactactctctgttgggcttgctatttcagtaaaagttaatcctaaattttctccattctttgaatactttatttgagatgtatctatcccttcattatcgaaataattaacaacaaattctccaaactgatcctttgatactttgccaatgaatccaatctttttacctaatcttgcaagtccaactgcaatattagctggtgatcctcctaaatattttttaaaagtgctactttcagataaaggcttgttaatatctataggattaaaatcaattgcgactcttcctatgggtactatatccatttttcttgctttatcaaatttaatatattccatttatagttcctccttatgcttatttgaacttccaaatatttctatatgctttttaacattttcgtaggcagccttaatctctgtttcatgtaatttaaaataatcataatcttctaatctcttgtttaattcttttacgcttttcttaactaaattaaatgtagctgttgcaatatttattttttttattcccattgtcgcacactttttaaaatcctccgctgatattccagatcctccatgcaaaaccaacggtattggtatgttattttgtaaatttttaagtacgtcaaacctcaaattaggctctccactatatactccatgagcgttgcctattgctacagccaaagcatctatttctgtattttcaaaaaactttttagcactttctaacttagtgacttgaatctctatttctttacttccatcttcactgccaccaacatgtccaatttcagcttcaactgatgcattatataatttcgccatgcttgatattttattagttatttttatattttcttcaatctctaaatgtgatccatcgatcattactgatgtaaatcctaaatctaaagccttctttacattctcaattgtagctccatgatcaaaatgtactgctactggcacttttgagttttcagcagcttttaccatcattggaccaataagttctaaaggtgaatattttaatcttacttcagctatttgaagtataattggagattttaattcttctgctgcttttatagctccaataaccatttccatattagcaacgctaaaacttccaactgcataattttcttttaaagcactttttaaaagtcccctcatatctactaatggcatttcatttacctccagagtgctttatatatagaaacaatatcttcatgtgtaatatttttaattgtattgcttggactaccgctttcaattgcatcatcagccattttatctaaattatcgaaaaacttgtcccggtctattccatactcttctaatgaaggtatttgaagctccttacacaaaccgtttacagcatcaacaaattcttttgaagcaatttcatctgatgtttcctcattaacaatttttatatttctggcaagttcagcaaatctagagtaagcaccgtctagtacaaatgtaagacattccttcaacaacattgcattagatattccatgtgccacatgaaataatgcacctattggtctgctcattccatgcactattgttacagatgaattgttaaaagcaattcctccttctaatgccgcaatagacatttgagtacgtgcttcttcatttttaggatctttaaatgctataggtaaatatttaaatattctttttacagcagaaattgcaaatacatcagaaagtggttgagatttttttgatgtatatgcttcaattgcatgtgttaacgcatctattcctgttgctgctgtagtttttgctggagctgtcattgtaaatataggatctattatcgctaacgtcggaagtaatgaacttccctttataagcatctttacatcattttctgtatctgagattatcgtaaattgagttgcttctgatccagttcctgctgtagttggtattgcaaccactttggataattgatttgttatctgttttcccatatagtctgatatcttcccggcattactagtcatcattgcaatggctttcgccgaatctattgggcttcctcctccaatagctataagaaaatcacaattttcttctttaaatatttctacccccttttctaccattaaatcagttggctcaccatttatatcactatatattttgtaataaattttctcttcctctaatatgttagttaacatttttacgtttcctaaactgaccataacgctatcagtaacgattaacgctttcttacctaataactttagatattctttactattgatgagagctttccctcctgttaatattttcttcggcatcatgaactcatttgacattttagtcacctcactaacttttgattaactattgattactttttgattaacttattgttactttatgatttaattataaatatgtttttatcacttgtcaataattacatattgattttgtaacttttttctaaatataaaattaaattctgtaattgctttcacttttaaattctttggtttataatattaaattaataatagtaattctattttgacttataggagtgaattttaatgcgttctaaaagaattgatttaatagaaaaatacatatataagcataaaactatctctattgataaactatgcgaagaatttaagatgtcaaaaaatacaattcgtagagatatagacactttagttgataaagggataataaaaaaggtttatggtggagtaacaataaacaataataataaagaacttttgtccttcgaagaaagaactataaaaaataattttgccaaatcatctatcgccgaaaaagcagcacaatttgttgaagatggtgattctatttttatagattcaggtacaacaacttttaatatgattgaatatttaaaagacaagaaaaacattactgtttttacaaataacttaaatgttatagtccaagcaattccatatgaaaatatcgaaataatttgtctttctggaaaactaactagaaaaacatcttcctttactggcttaactgctcctgatattttatcagcttataacttaaataaatgtttcatggcttgtactggaatttcactcgaaaacggtgtcaccaatacctctccagacgagtataaaataaaaaaagcagcagtatctaaaagttctaaatgttttttattagctgatacctcaaaatttgatgttgtatctttgatgacgttttgtgatataaaagatattgattatatgataaccaatgattgtcctccagaaaagtatgcagactattttcataattataatattgaacttatagtaactaatgaaaaatagagatagcagtttttaatctgctatctctttcatgaatcttcttattatacatttacaaaacccttaccacttatttcatatatatcttctctaactttttctaaaatcatttatagtaatacccaattctaagataatcatcacttatatactttgtaatactaatttgcaaaagtctttccatttaaatttcagaaattatttcaatcaaatcatttactttacaatcggcttctgactgatctatgtagtaatctcttggctctaaagctgcaactgttacccctgctgcttttgctgctcgaattcctaatgccgaatcttctactgctagaacttctgtttccaataattctaatgcttttatagctctaatgtagatctctggatctggtttgctttgcacacactcttcaccactaattacaaaatcaatacaactggcaattccacattcttctaccatccttaaaatttcttttctttctgaagatgatgcaatagctattttgagatttctatcttttaattccctaatcacttctttaactgaaggattcaatatttcttgaaaacaaacttcatgttccttacaatactttgaatattcttcttttaaaatattacgtttttcatcatcatcaggcactaacctttcccatatcatcccgtttgttgatccaatgaaatcttcaatttttcttgtagctggttctatttttaaatcatcaaagaatttcatccttcttttaaaataaaaactttcagtatccactaaaactccatccatatcaaaaattactgcttgtttcaatttctttcctcccaaattaatcgctcaatacaatatcaaaaattaatctaatttctaaatctgatatctttattgtatattccttttcaatttcactgaatgcataccttataatatctatctttcttttttctctttgcacaaattccttaatatcttcctgcatgtcaacatcttcttttcttaaaattctctctaccatacaggatgcatgaagataaagtaagaatcttttattattagacattttaagccctagtttttcttccattttatcaactgcatcttgtacaaaattgagtactttatttacatctaaaattgttagcttctcaattattttctttatagaaaaattaaataccaaatcttttttcaactgctcttcatctatattgaaattgcaccttaatatattaatgaatgaatcaatatcctccccaccaatcaaatgatccaatcctatatatggaattccttcaacttttggatctacagttcctacgatagccagtacatcatacatttgaaatggcaattccttttgtttattttgatacagcttatgataatcgtatgacataattacaaaagaagggtcctcatgctttaagctcttttgtaatatatcctggatttgaattgcacttcccatacctgtatagcaacaagttaaaatagcttttttctttttttcaactggataaactaattgtttattaatttgtacattctttaaaatctgatcattaatttcgataatatttttatcttgtaaaagcatacttccaatttctaataccaatggtgttgagacaaaatcaattaataataacggacctttaatcttcttttccaaacgatttctaagatcaaaaagtgatcccatatcaactaacaagataagtccattttctgtactgttattatcaataaaatctaatattttctcctctatatgatcaattgtagtatcaataggcatatcaatagcttggaaaaagttcttccttaacatcctattagctacattcgccatactacttgctgtagagtagccatgagctaaaacaatacttttaatttcatttttcaggctctgtatattcatgctttttagataaaatgaaataaaaatcaaatcttcatcaagaacctgaaagtctaagcgttcactcaaatgtgtaagcatacgcctggaaagccataaaatattcttcatataactttcaatgaaatttataatttttgggcgaatactattccaatcaggatgattaattaaaatttcttgctcttccttaaaataaagcaaatatgctattgaaagaattttatttccatcctgttcaaatccataattttcttccatatatttaaaagtagattttatattaaatgttaatacagaaaaaaatgattgattgttggttacttctgtattaaatgttaattcatcaagtaataaattcacatttttgaccatctctttagtataatgatcaaacataatttctccggactcaacctgtttaaatccttcaacaaattcaaaatatgtttttttaatgtttttctcttcatcactattaatattcaatagttctgggtgcagataatcataaatcctatcctgatatctacttgatatttgatgatataaactctcctttaattgattttcatttccaatcggtaaatctccaatgcgaactttaataatctcttgatctttcctcttagcatagctgcttccacaactgtattttacaatatttttaattttccctacatttccttcataattactaaaaagcaaaaaggaaattacctgctttgtaaccttaatagtatgtttcaagatttcactttcttttaaaaagaaactatctattaggtgaattttttcttgttgaggtctttctgcaaaacttggaatattaacaataacaggaagtcttctaataaaagtaggtaagaaagtagattggatagattccgtagttgcaaaaattaaccgtacttttgcttccttttttatactattatcaccaatgggagaatactcatttgaatccataaatgtaaaaagcttttcttggccttcttctgttagtctgtgcacttcatcaagaaataaaactccaccatcagcgctttcaagaagcccctttttatctttatctgctcctgtaaatgcaccttttgtataaccaaataataaacttgataacaattctggattatgataatattgagcacaatttaaagaaataaatgaggacttgggatttattaatttttcttccaagcaataatcataaatacattttgccagatatgtttttccagaaccacttgaacctaaaagcattataggaagaccattttctggataaagcactgctgtctttatttgttcaatttgttcttttaagcttccttttgccccaattacattactccatatatctgtttttctaacgtttgaattttctttccataattcatctaaagtattatattcagcctgtgttggggtaaaatataatttagagaaagtttctttatataaaaaaattactggatactctttaatttttataatcctgccttgttttacttctttgttaagataactacttactgtacttctactaagctctactttttcagcaattgaattggccgaaaattcttttatattatctttagaaaattccttggtagcctcttttaaataattagatatatctattgccattctgaatgcccccttagttaataaaagttaaccttattattttataacatacatttagaataaggcatatgaaaaaataataattccaaaatattatgcatacttttaataaaaatgtactactccccatagtagtaggcctcttaagataattacctatataggatagctaaaaatagactaaaatatatttattatttttaaatttgcctaaagcaaagaaatcgaaaaatattcgatttccttacctgagtcatttttttgtatttaggattataagtagaacctgataacatacgtttaacgtaaactttattttaatattctaatttccacatatatcttcttttagttagtggatgctgacgtgcataagaaagttcttcagcatatacacggaatactgctgtaattaacattggattaaaataatcaataactgtttttgggataactgaagataatccataatctaaagcatcaacaactgttgtttttgcttcaaaacgctttaagaatgttaacgcacgggcatccattggacgagtgcttccctcattcattaataaaataaatggtacatctttatctactatttcaaatggtccatggaaaaactctcctgaatggaaacttcctgaattgatccattgcatttccatcattaaacaaattgatgttgaataagcaacttcagcggttgcaccactgctcattaagtaaatcattgaatcatttttataagcttcagcaaatttccttgcatctgctatcgctgattttgccgctgaatctgctaaatcatatatcttgctgaaagcaacctgtgcatcttcataatctttatatccttcatattgctctaatatctccactgcaagttcaagcgcataacccatcttttctaattttgcgccatagctttcagcaaatctatgacagataacataatcagcatcttttgtaagagccgaattctctgcacgagttaaggatattacatgtgcaccatattctttagccttagcattagcttgtactgtttcaggagtactaccgccaagtgaagcggatataacaattgcagttttatctaatgaagctattgtaccataattgaattcgttagcagtataatgactaacacgtaaatttttcgaattattttctaaaaaatattttgctggatataattctgcttttgaagctccacatcctacaaatataacacttctaatttcttcttgtttttcttttatttcttttataatttgttttggattcataataaatccctcctatatttttattttatatatatttacatccttttaaggaatgttttcaatttatttaaaaatacctaaaatgctcaataatattccacctagaatacaaattgcaagcatccatcctgttgatactttctttcttaataaccaatacataaagaatgttatgccaagcggtatactctgtggtattatcccatttaatacatcttgtaaaacaaatttttcaccaaactgcactggagttgtaattccaatcatactggccatcatggatccaataaccataagtccaacaatagaacaaatgtacattactttatccataagcccttcattatagagctttgttaaatatttatttcccattgaatagccaattttcccaccataatatgtaacaagaaatgatggaataaatgaaataattattgctaatattggtcctaaaatactaccttgttgcgctaaattaatacctaatccaaaagccaatatacgtacagttccttgaaagaaagagtctcctactccagataatggtcccattaatgaagttttcatagcattaatcgattcaggattaaaattttctttgtcttcatagtattgttcttccattgaagcacttaatcctaaaacaaaagcatttgtttggggtgtacaattataaaaattcatatggcgtttataagcttctttttttaattcatcatctttaggatctttatatatgttgtctaaaataggagcaattccatataaaaagcccatattcatttgtctttcatagttccatgaagcttgaattgcccaagaacgccataagaacttcatatacttccatttatttggatcattttgtttttgtatattttgcatttttatacctccaatcaatctaaaatatctaattcatcaactattttttcatttttaaatttaaattcagccaaaacaaatgctacaatacaagccgaaatagcaacaccagtcacacttaaattagaatatgctgtaatgaaaaatcctcctagtaaaaatggaagcatttttgttgacagcatagtgctaagcaataaagcaaatccataagctgttagaattttacttgataaatttagaccgtttgtaatccatgacggaatgacttctacaatattttttactaaatctgttccaaaataaattgctaaaaatattggtacaaaatacattagtgaatacaaaaatgttccccaaacaatatgaatattacaggcctttttatattccccattttcaattaacgagtcagctttatgagttaagtttgcaagaatagttctcattaaaactccaagcatttgtccaagcaccgcaattggaatcgcaatagttagtgctgcttctgaatccgcatttgataaaatagcaaaagatgtagcaataatggatgccatattcatatctggtggtgctgctgcccctatgtttactaatcctaaagaaattaattcaagagcagctccaaccattaatcctttttgaatatcgcctaaaacgagccctacaagcgtactaactattaacggtctttctaaattcattctgcctaaaagtctagagtctaaaatacaaataacaccaatgaaacctaataatattgacttaattaacattcttgatcctcctttttatattttagaagttaaatcttctctctttgaagtaggaacttgttgcatatataggttaatccccattgctttcagctttttggtatcttctaattcttctggatttaggaaaatagcattactatattgctttgaattttctttatttgcaattcccccataattaatttctttaatactagagcagctcttacagaactctaatgcttccttagtacctctaaaaacaatcataatattatcttttaattgttcaactttagacattctcgctaatatatcgtttaccgaaaatatatttaaagttactccaactggttttgataagtttaatgaaacttttttcatctcatcatttgcagtttcatcatctacaacaataattcttgaaatccctaaactttttgtccatgaaaaaactacttgtccatgcaataaacggtgatcgattcttactaatttaatcataaatcttcctcctttatatttttacattcattaagcaatttattgcagtcaactattccatgctgactttcttcaataatctgctgcaatagactttcagaaatttcatttgcttgagtagcaactgaaataattataggtaaattcattcctgaaataacatgtattttaggatattcttttattaaagacatcatttctgtattaacgcttccgccaagaatatctgtgaaaataaatatatctgcttcaatgtatttttctcttactattttttctactgtttccctaacgtttacttcttcgtttctataagatgaaaaagcttcaaccatagatacatctccaattatcatacccaaagtatccttcattccctttgccagatcaccatgactagctaaaataatttgtatcattaagattcacctccattctatgtaattattattagcaataatcatgccaaaaaacagtttgtattcaaaaacatcctaaattggtcatttatatatacattagtaaataaaaccaacagttaaaaaaagattaattgaagtgtttgagcaaagtgttgaaaaaaataagcctaatgaaaagtataattaacttttcattaggcttatttttttctatttaatttttgaaattttattttaactccataattataattataatgaacgtaattatatcttatttaatacttacagtcctaaattcaatcctatcacttctatggtgtgctgttgaaaattcaaaaggctggccattgtctaaaaaacctacctgctctacttccaatattggaaagttattttctatttctagatattcctgttccaactcatttggtaaaatagctcgaataatcctatgagcactttttattttaagtttaagatttttttcaatgtaaccataaactgaactcgttaaaatatcgttttttatgccaggtataaggcctattggcatatatgtatactcaattacatatggactatcatccgcatatctagttcttattacataatagacaaaatcatcggtagtaatctttagcttagttgcaatttcttccgttgggtgaattacttcgaattttataattttagatgttacttttctatccttatgagcttctgaaaatccttcaaattgttttgctagacttaattcctgaaccccctcttcatcaagagcttttacaaatgttccagaacctcttcgctttattactaacccttgaattactagttcatcaacagctttttttattgttattctactaaccccataatattcacacatttctttttctaaaggcaactgttcattaggattatattcaccattcaatattctatttcttatgtcttcagcaatttcctcatattttgccattatattcacctttctccttacagtataacttatatacatctttatcatatcatttatatattaattatatcatttctatacattattaaacacttaaattaagtttaattataaggcaattatatatgttcaataaaataatatttacatatataaattattagtatcttcattcaattaaaatctactgtttataatgactttactagtcatggtaaatacatctaataaaaaaatcgctgaacatcataactctaacatacaattcatattaaaatatgatataaattgtacaaaaaaagaaatcattcttgatttccttcaaaataataaaaactatattaaaaaacttaccgttattttaatatagtttaaaattttaatttcacctattttacaattacttaattgcatttgccatttcttcatctattattactgttacatctttatgcatgtgtaacatagttgcaggattatgagttgtaatatttcctttaaataatccttttattgcttctgctttatcttgacctcttaccaacaatactatttttctagctttcattatttgaccaagtcccatagataaggccttagtaggtacttcctctatagatttgaaaaatctagaatttgcctctattgtagttttagttaaacctgttacatgagtttctgctattaaaaaatcatctggttcattaaatgcaatatggccattagcacctattccaaggatttgtatatcaataccacctaattcatccacttttttatcataattcttagcttcctcatcaagattttttgctaagccatttggaacaaatgtatttgctttatttatattaacatgattaaataacttttcattcataaaatatctgtagctttgaggatcttctcctccaagtccaacatattcatctaagtttactgtttttatattagaaaaatctatttctttatttctgttcatttctataatctttttatataaaccttcaggagtacttcctgtagctagtcctaggacagcatttgttttctcagaaattacctctttaaatattttagctgcaacttcactcatttcttcataatctttaactactagtaacttcattattattacgctcctttgatgttaattttttaaacaaaccctgtatctatatttatctcctctcgctattgttatggtatattcaacaatctcattttgctcatatgctattctttcaaactttaatcctgcctgcccttgaggtatttctaaataaacactttctaatttgtttattaaaacactttctattacttcttcagcagatgtaatattaatattaaaagtattttttaatatctcatataatggatttttttctatcatatccttagtaagctgcttaaatctttcatacggcaaataagtcatttcatatatcataggaatgttatccgcaatccttattctcgagattttatacacaagctcgttcttttctatatttaattttttagacactttgctgttggcttccattatctcaaaatttaataatttagaagtcgggttttttccacgttttttcatttcctcagtgaaagatgatacctttattaaatcttgttctacaactcttggcgaaatgaaatttccttttccttgaactttataaatataattatttttttccaactcatctaatgcttctcttactgtagttctgctaacagcatattttttgcatatttctctttcggagtccaatttttcattttcttccatgctgctttctattttttcaatgagaatattcattagttgaacatacaaaggaatattagaatttttatttatcgtactcataagtgcacctcttttagttctagtagttttcccaacaattatactattcttgtacacaaaagaaaatataaatcaaataatttaaaatttcctaaaacgcttcttttaagtactttcaattctataattccttaaataattaatactttccaagtggtaattaccactacaagaattataatttattcttttaattctgtcaacatacacttgaaaaattctttatacatgctatatactgaatatataaactgataatgtccacttactataatatatgaaatttgacttaaaaggagaagaaatatgttaataagaaattgtaatataatttacctagacaagatagaacaaggctcaattctagttgaagatgggaaaattaaagagataaatccgtccaatatagatacagacagcattttagatgcaaatggtctatatgtttcacctggttttattgatgttcatatacacggcgcaggaggctcagatacaatggacggtaccagtgaatcaatcaataccatttctaaaactataattaaacacggaacaacttcttttactcctacaactatgactgttgctgtggacgatataagaaaatctttagacgcaattaagaaggtaaaagaaaaaggttcagaaggtgctcacattcttggagtgcatttagaaggtccgtttgtaagtccgaaagcaattggtgctcaaaatcccaactatattttgatgccatctgtttcagcttacaatgatatagttaaggattatgaggatattattatatctataacattagctccagaagttgaaggtgctaaagaacttattaagtatttatcctcaattggaatagtctgctcattagggcatagcagtgctacttatgaagaggctatggaagctattaaatgtggtgcttgccatgcaactcatctttttaatgctatgactcctttaactcacagaaatccaggagtagtaggagctgtatttgacagtgatataacaactgaaactatttcagatggaattcatatttcatatccagctttaagaattgcttacaaacaaaaaggtactgataatgttttattaatatctgatgctatgatggcttgctgcatgcctaatggtaactactccttaggagggcaagatgttattgttaatgatggtgaagcacgtttaaaaaatggtgctttagctggttctgttcttacccttgataaagcagtaaaaaatgtatacaaaaactctaatttaccactttatgaagtaataaaaatggcatcttataatggcgctaaacattgtaaagttgaggatcataaagggcagatcaaggaaggctatgatgcagacttgatattgtttgatgatgatataaatataaaaaaggtattagttttaggtaaggaagtatactcagaataactattatagttttcagctgtatttccacttttaaaaactaatagcataaaattatatacgcagatatataatcaatctactgaacatttaggataatctattatcataagcaaagagaagactgagttattttaaaattaatgataaagtgatcaattgccaatctttaaatagtgcatctaagaatcactttccttttaagatagctcagtcattataaataatttactactgtaatttatagatttttttctctttgaagataattacataatgcacctagtttattagcatcatttccaaatacgcatgtttttaaaactggttttatttttccttccaaataactgctcataagtatgtcgattctcttatttatttcctcaacatattctggtctttcacttattgctccacctaaaataataacttctggatcataagtatattgaatgttatatattcctgctgccattataaaataatatttattaacttcattaattgctatctcatctccattattacacaagtcaaaaactttaaccccatcaaggcttccttcatctaatccctttaatttctcaacttttcttactaatgctgtggtagatccaaccttgctccagctagcaaatttaagttgtccctctaattcacagattattgaacagtagccaaattctcctccatgcttatgaacgccaccgtgaatcttcttatccttaactattgctccacctatacccgatccacatacaacaaatgctaaatctttattgtccttcccagctccaagccaacattccccaagtgctgcgcaattagcatcgttttcaagttcaacgtttaaatttgtcttttcatttaaaatctctttaaagttaggcccatgtatatatggaatagcacttgttcctcctattaatccactttcactatcaactgctcctggagcacttattgcaattcctttaacgtcaaattttcccttcatttcattggttgttattgataacttagaaaaaaactcttctttatcacttggaacattaaacttcccattttcaataaattctccattttcgttaattacagaccattttactgagctcccacctatatcaaaaaccataaattttctcattgaaaaatcacctctacatttaaatctagttataatataattcaaatagccgtctcaagattattgttttgagacagccatttgattgttaaatataattttctatctaaaatccgttattttttgctacttctttaatccatcttcctgattttttaattgtcttcttttgagtagctaaatctacagcaataaatccatatctatttttatatgcattagcccatgaccaacagtcgattggagtccatgtatgataaccaaaacaattagatccttcacttatccctttatgaagatatgataaatgttcctcatagaactctattctataatcatcttctataactccatctgcatttatatatttttcttccccttcaactcccataccattttcagatatgtaccatggaatgttgttataattatctcttatattaatcgctatatcatacatacattgtgggtatatctcccatcctctatatggattcattcttcttccaggcatttcataatcgtcaaaatacttattaggcatccaaccttttgaatcgtcgaatttttcttccttagcttttgctcttcttggttggtaatagttaacacctaagaagtcaattgtgttgttctttattatttctaattcttcttctgttgattcccatattacattatctttggttaaaacttcaactaaatctgttgtaaactcaccttttatagctggattcaaaaatgaattgttaaagaaatcttctgcgaatttagctgcttttacatcttcttcattttgcgatcttggatatgaaggcgttaaattaagaataataccaatcttcccaccattcttactacaatctgattctttaaactcttttatagcctttgctgatgccaaatttagattatataaaacttgcactgcttttttcccatcaactatctttggataatggaattgatataaatattcaccttcaactacaaccataggttcattaaatgttgtccaatgtttaactctatctccaaacaactcaaagcacttctttgcaaacaatgcaaataaatctactacatgttttgattcccatccgccatatttatcatataattcaactggtaaatcaaaatggtgtagattcataactggaaggatatcatttgcaatacattcgtctattacagcattatagaatcttaaaccatcttcatctacttctccagtttcaaaatcttttattaatcttgtccattgaattgatgttctaatactatttaaacctatttctttaatcaattttaaatcttctttatagctgttataaaagtttgatgctacattagggcctactccattaaaaaatgcttctggttctatatcaaaccaatgatcaaatacactatcatgctttttattaaatcgtccttcactttgtggacctgatgttgctgatccccaccaaaagttttctgggaacttgaattgtatactcatcttatgcctcctagatttctttatttaaattatgttattttctccatacgttaaatatttataaaatagtattttcttctataacattgcggcaccaataaggcctgcattatcaccaatttgcgctattcttatatcaacaatagatggatctgaaaccttagtcttagtacactcaataattttaggtagcaagtaagtattatatattaatactgctccaccaataactacagtttctggatctactacagctatcacattagctataccaattgaaatattcttaatccatttttctattacctggacagccttttcatcattgcttttatacagatcaaacacttcctttgtgcttaatgtttttccatatgcttctgatgctattctagctatatttacaccactacattgtccttcaagtccgcctttatttgtacctgcgtgactatacttgtcctcatttattatcatgttgtagatttctgctgtttgactatgtgctccatttataatcttcttatcaataattaatgcgccgccaactccagtagaaaccgttatataaaataccgattcgcattctttagcacttccaactaaactttctgcaagccctgctacattagcgtcattattaacttgaacaggtaatcccaatttctcacttagatattcttttatattaaagttttcccatccttttaaattaacagggtttaataatttacctacttttaaatctaatggtcctggtgcacctactcccactttttctatttcataactgctccattgtccctttatttgattaactaatttatttaagttataagctgcccccttttgcacttcgttttcaactttaaatatctgtactatacctccctccttggatataactgctgcccttaaatttgtaccacctatatctattcctataaaaaacgatattgtaatctccccctaactatattaataattattttgctatttactttattaatataaattactctcctgtactcaattatataacactatatatcacttatcaataatatgttatatcatttacatttaaataatattatttttattcacactctatgaattcaatctcattcgtctagttttactgaataaagaagatagacgatatatctgttataatcttatataacaaatatatcgtctattatttatagcttctctcttctctttgtagactttataaatatctcttttaaagtttctttgtcatcatcttttattgcatcttttattttatccaactctacttcaaaattttcaatgctttttaatagattctctttatttccaaggaaaagttcgctccaaagatcttcatttatattagcaattcttgttaggtctcgataactatctccaatgaaacttcctgtttctcttccttcaacatcactatttaccagtgctacagctaatgagtgcggaagctgacttgtgtagccaatcatttcatcatgatattctggagttattcttttaactcttttaaatccaattttataaatcagatcttctaccatgtttaaattttcttctttatttctagaaaccggtgttaaaatataatttgcacctttaaaaacttggctacttgcaaaatctattccttttttctcccgtcctgccattggatggccaaaaacaaaatctatattctccggtaatatatttacaatatcttcgataaacatttttttaattccagtagcatccgttattactgcaccatctttaaaattgcttttattatctataataaattgcttaactaatctaggatataatgaaataattataaaatctgcactcttaattacttcttctccgtttttgaagccttctcttattaatccaagttttttagctttttctaaagattcttcattaatatctattccataaacatcattatacccagcttcttttaaagccatagtaaatgatcccccaattactccaagacctacaactactattttcatatctatagctcccttatatagaattagatttgcttatcttcaatttttgctacagctttaactttactcattagcacatcaaattgatctggagtaagtgattgttgtccatcgcttagtgcattttcaggatcattatgaacttctatcataagtccatcagccccagctataattgctgcttttgccattggttctaccaagtaagcataacctcctgcatgacttggatcaacaattataggtaaatgtgataatttcttaattactggaactgcttgcaaatctaatgtatttcttgtaatagtttcgaatgttcttactcctctttcacaaagaattacattttcatttccacctgccatgatatattctgctgacataagccattcttctatagttgcagataaacctctctttaatagtattggtttatttgttttacctatttgctttaatagatcgaaattttgcatatttctagcaccaatttgaatcatatccacttcttcaacaaaagtatctaagtaatcagtagacataagttctgttactataggaagtcctgtttcctgttttgctgtttttaaaagttttaatccttcaagctctaaaccttgaaagctataaggtgaagttcttggtttaaatgccccacctcttaaaaagttagctcccgctgcttttactctttttgcgatttcaacaatttgttcttcactttctacagaacacggtccagccattattccaagtcttccaccgccaactattgatccctcaatattaactactgtatcttcaggcttaaatatcctgtttgctttcttaaaaggttcttgaaccttcataaccctatccacaccttttaatacttgtaattttttaggatctaatattgaagtatcaccaacagctcctactataaaatatgtgtctcctttagaaagatgggcttctaatccttttgattcaattaccgcctttaccttccttacatcttcttcacttgcttttgggttcataataattatcatcttaatctcctcctgtactactttttaattttttacttttcttttttctactatacttctgtactacaaatagatagctcaactccaaaattaattgagaactttctcctcagctaatagagtaggccgagcttcctatatataatataaactatttagacatctttttcaattctagcgccttaatagctaatatatatccatcttctccaaatccacacatctgtcctatacaagcgggtgctgttacagatttctttctaaaatcttctctcgcatgcacattggacaaatgcacttctactgtatcaatatttattccttttattgcatcatgaattgcataactataatgagtataagctcctggatttattattatcccatcataattttcaaagtatgccttttgaagttcatcaattatttcaccttcacaattactctgaaataaagttatttcatgtcctctttttttgccttcttctttaatatactcacatatatcttcaaaagatttagctccataaatccctttttctctaactccaaccatatttaaatttggcccatttattaccattatcttcattaatactccctcccttcagcatttatatttttttaactataatgtatattacaataaattatttagttagcgagttttctcaacataagttgtgatagtaaattatattaattctataagattacaatgtaagattttcaacataacatatatatgtacattgcaactgggtttctacactttcttctagtttagtacttggcttactagaatttcaaaaataagtttattattgcatcttatatacttaattcatttccaagttatctagaataacttcttttatttcattaactatatttccaatttctctatcatttctaattattttatctgcacataatctatataattcatagcgctcttcatacaacttaattattttttccctaccttctttaagtaaaggtctttttgatatatccacatctcctaaaagttcttccaatggtctatcaataaaaataataaacgattcttcttttaatatgtctatattctcttttctttttactactccaccacctgaagaaattatagcctttccctctttagctaattctctacaagctaaagattcaaaatctctaaaataattctctccgtgttcaaaaagttcaggtatcgttttagatgtcatattttcaatataattatccatatcaataaagttaatttttaattcttcgcttaccaatctgccaattgtactctttccgcatccaggcattccaatgaatactactttgtttttcatatgtgccacctacttaaattcattttcaaatattgaatataaaccttgagttagttcattgtctaattggcatccctgccatatttcttccgcctttatagcttgccctactagcatttcaataccaccacatacttttttatttgaatttttccctatttttaggaaccttgtctccctcgggttataaattatatctattaatgaattaaagttatttattatatcctcattaacaggagtatcatcaactttagggtacatgccaagcggagtcgtattaattaaaatatcaccttttatctctgatatttcttcataagttttaaattctattctttcatctttatctgcagaattccctttgatttttcttgaaactaagtaaatctttttaatgccatgatctaaaaggtaagtaataacagccttagccgctccaccatttcctagaaccatcgcaacattatctcttataacaatctcattattatttaatatagttccaaacccataataatctgtattgtacccatataacttattatcttttaaataaatagtatttactgctcctatttttttagcttcatccgatataaaatctaaatattccattacatcttgcttataaggaatagttacattaactccttttattttaagaagctttattgattctataagtttacctaaattctctttttcaacttcaaaaagcttatatgccccttctacttttaaatctttaaaaagcgtattatgaattttaggtgaaagactatgagataacttttctcctattaatccgtaaaattccaaattaatgcccccccttttagcagtatttcctgtatccaccaataagtttaaaatacgcactgctttgttcgattaaattcaatgcctttttaacttgttcattttcaagattcccctcaaaatctacatataagaaatatttccacgctccattttccataggtcttgattcgatcttcatcatatttatattattttctgcaaagtgtcttaataatttatatagagtacctgctttatgctcaagagaaaatacaacacttactttatcacaactgttatttaattctaattcttttgatataactatgaatcttgtagaattttctcttctattatttatattttcttttattatgcttaaattgtatatatcagctgcccttttacttgcaatagcaacctttgacatatcttgtaaatcactaacaagtttaacactatccgcagtactatggaaaggtatctttttccaattgctatattcttttaaaaaatcagtactttgttcaaacccctgtggatgtgaatatacttctttaacattatctaattttgttcctttaatcccaattagattttgatctattttaatgcactcttctccaactatatagaatccgtacttatataagagatcgtaaacctgtgaaatagcaccagttgaagaattttcaattggtaaaactccataatcaatttcttcattttttactgctaaaaatacatcctcaaattcatcatacgccttagcatcatctttcttaccaaaatgcttaatcattgcttcttctgaaaatgatcctgcaacaccataaaagccaactttactgtcacttttcgcatttttttcttcaaacttatctatagtcgtagctcttatatcttcctttacttctttatcttctaaatctttagaaatattcataatattaatgaaaaattgttttagcccttcggcataatctttattattaaggtatcctatattcttctcaataacttcatcttctctagctttattgaaaacaggtaaattattctgttttttatattctcctacctttattactatatccattctttcttcaaaaagtcttgttatctctttatctatttcatcaatcttatttctataatcatctatagccgccatttcatttctccttacttaggaacaattaaaaaatatttaatttctttaatgcaccttaactcattcaaattaacactttgctttcttaatacactatttgcaataaaaaaactatatattcattgacttagaattataattttttattactaaagcactaaatcgagtattccaattgcggttacagcttctattactggaacagctctttgcacgatacaaggatcatgacgaccttcaataacaagctctgcttcctttttttctgcaatatctatcgttctttgaatttttgatattgatggtgttggctttattccaaccttaaataatattggcattccatttgttattccacctgtaattccaccattattatttgtgtaagtttttactttattaccgtcataatagtattcatcattacaatcagatcctcttaatttgctcatttcaaagccttttccaaattctattcccttaactgctgggacagaaaacataagatgagctagagttgattcaactgaatcaaaaaacggattaccgattcccggatttattccaagaacagtacattcaatagttccacctacagaatcttgttctttttttgctttcaaaattgtctctctcatttcttcttctttttctgaaattaaaagtggtaattcctttgtttttaattcctctaaaagttctctgcttaattctatatcataaaaactcttatcgtggatatctccaatactcttaacatgggctcctatattaattctcttactttctaacacctgcttacatacagccccagcaaatactaatggcgcagtaattcttcccgaaaaagatccaccgcctctgtagtcgttaaatccattatacctaatgaaacctggatagtccgcatgacctggtctcatcaaatctttaagttttccataatccttagaacgcatatctgaatttctaattactgcgcaaagaggagtacctgtagtttttccttcaaagaacccactcaaaatttctggtgcatctgcttcttttctagctgtagataaattactttttcctggcgcacgtcttgccatttctttcataacctcttcaagattaatctcaacgcctgaaggaagcccatcaattgtaattccaatcccaactccgtgagattcaccaaatatagaaacctttaatttattcccccacattccactcatcaaacacacctcctaaattcttaaaatcatcccaaaattgcgggtatgactttgacacacactcataatctttaagtataataggttctttacacatgattgatgctatagccatagtcattgctattctatgatctttatgactccaaacttccacgtttcctttaagctcctttacaccttcaattatcaatccttcttctttttcaataattttagcacctaatttattaagctctgaagttacagctgctaatctatcacattccttaattctaagtcttcctgcatttataatttctgttgttccttcacttaatgcagcaactaatgatactaccggaattatatctggacactgagagccatcaattatagtagacttaagtccaagacttgcgcttccaattaaaccattatctttattattcaatttcagtcccattctttgtaatatgtcaattacttctttatccccttgaagagaatctagtttcaagtcattaagcacaatattgcttgaaagtgcgtcagcacagaagaagaatgctgcttgtgagtagtcaccttcaactctgtaatctatactcttataaatttgatttccctttataataaattcttcataattattgtttataatttctacaccaaagtctttaatggctcttaaagttaaatcaatatatcctttggattccatttctgttgtaattacaatcttagattctccatctaaaagaggaagcgtaaataataatcctgttataaactgtgagctaatattcccctccatcttaaactctccagcttttaattttccttcagtctttaaatcaagaataccatctttataagaatatttaattccttgttcatcaaaaattttgtaataagtgtctaatggtctcttccctaaattacctcttccaacaaatctattaactccatcaaataaagctgctataggtactaaaaatctaagagttgatcctgactcgttgcaatctatagttctttgttccttaactgaattagctttaatattttctgggctgttgattccacaaacctccagataatcttctttttttgttattttagctcccaatgatgacattgcttcaattgtagcaataatatcatcagaataatctatatttgtaactttactaacaccatctccaagagctgcgcaaattactgctctatgcgccatacttttagatggtggtatcttaacttccccacttaattttccaggataaatttttaagttccccatgattttacctcacttttttattcattgcttaagacatactcaaaaataacatatctgcttgctaacctattttttcatatacatcattaactaaaaaattctacatttgttttttctaaatatgattctccaatatttcttaataatactacttttaatacattatcaatatttttcttatctaatgctattgtatctaaaacttccgagctatcatctatttcaacttcataaggaagattgtattgcactagtatctctcttatctcttcactaacgccttgatcagttaatcctttattttctgcaatcttacttatttcatacattcctatagctactgcttccccatgtgtaaacttcttaaagttataatatgtctctatggcatgacctagtgtatgtccaaaatttagcagcattctctctccagtatctttttcatcattttccacaacgcatttttttataaagcaacatttgtggataattttttctatattgttcataacctcttctttattttttaagcttttcaaaaagtaaaagaattccttatcttttatacatccgtatttaataacctctgccattccgtccctaaaaaatctttcacttaaagtttcaagtacatttggatctattaaaactaatttaggatgataaaaacttcccactaaatttttacctctttctaaatctacagcaacctttccacctacgctgctatcaacttgagcaagaagtgaagttggtatttgaacaaaatctacacctcttaagaaagttgatgcagcaaatcctccaagatctccaattactcctccgcctaaagttataatcaagtcacttcttgtaattttaaaatctaatagttcattatatatcaaaggaagggtactaaacgctttagtttcctcacctggctctagttccattagcttaacatcatatcctgatttaattaaacatgattttatcctatctccataatgagaacctacatttttatcagttagtataaatatctttttacctttaaaaactttttggatttccagatttacttcatcaattaatccttttttaattatgattggataacttctttcaccaagttcaacaactaaatcttccatttatcaacactcctcttttacttaaacagttagcatcatgactaagattacgttataactcttttctatcttttagatacttgtaatgagtaattgttaatgccgactgttctttaatttaataaatttatatttctcttccaacagccgctgcaataacttttaactcttccataagttttgcaaacttacttggctttattgattgtggaccatcacataatgcattttctggatcattatgaacttcaataataagtccatctgctccaactgcaaccgctgcttttgctagaggttcaaccatccagtactttcctgcagaatgactcggatcaattactataggtaagtgacttaattttttaacagcaggtactgcacttaagtctaaagtatttcttgtatagttttcaaatgttcttattcctctttcgcacagaattacattttcattaccaccagccataatatattcagctgacattaaccattcctctatagttgctgataaacctctttttaataatatgggcttgttagtttttccaagttcctttaacaaatcaaaattttgcatatttctagcaccaacttgaattacatctacattttcaacaaatgtctctatatcataaggagacataagctctgtaactattggcaatcctgtatttgctcttgctttttttaaaagctctaatccttcatatttcattccctgaaacgcatacggtgaagttcttggcttaaatgctccgcctcttaataaatttgccccaatttctttaacttcttttgctatttcaatgatttgttcttcactttcaacagaacatggacctgcaatcattgctattttctttcccccaattttaactccattaatgtctactattgtatcttctggatgaaacattctatttgcttttttgaaaggttcttgaactttcataactctttcaactattccattagccgctacaactgaaggatctattgcacttgtatccccaactaatcctaagatactaacatctgatccaacaactaagctcactgaaacaccctttgcttctagttgttttgtcaatctttctatttcttcctgctttgctttttgctttaatattactaccattttatattgcccccttgcagatgtttaattatttgcgaaaaaaaatggaactcatgtataatgagttccataaaatatcaatgctgatatatattacaaacttatataaaatataaaaaactcattaaaaaggtatttttcagttttttgcaaaataaatagccagcgctaaaataaaagccccagaatgtaaaataaaaaaagctataaaatttttgcataactgattttacaatatccttttccatgattttctccatttctaaatttaataattattttcacgaacattaattacaatatttacatttaatctttttatcattataacaaactatatctaattgtcaatac

SEQ ID NO: 12 - DNA, 104055 bp, Clostridium beijerinckii
atctgaaaataattttttactcattcttttcacaaccttactatatttcttcttatcttttattgtacaaaaaaagaacctattgaaatagtctttttttagtgtctatttcataggttccattttaacttctggtgctggtcttttttatacatctaaaattctaaagagaaatcttaattcattgggaataaagaacactttaaagttttgtagaactctttatgagataagttgggaagatgtgagtttaaaaactaaaatgagaatacataaggatattttcaaactttcctacaaaatattaggcctacataatcgtacatacaataagaaaagattaattttaagaaaagtgattttttcaaaagataataacgctcttatagatagcagcccaaatattatacaattaagttcctggaaatatcaatctcacttgcataatagacatattcagtagccttttaaacatatatttttacataaaaaactacacaaaaatatacctttatcaaaataagtatattttagtgtagtttttcatatttccatattatattttgcttttatatcattaaattataatttaagtgcgtttttcagatatgctagatcctccaatgaatctatttcaaatatatcatttgattgtatctttttgatatgcacttccatgtccttaagattatctacagcaatactatcccaatataaatctctaaagtcccctttgtttattgcttcttcaactttattagaaataaattcgccatctttagcagtccaaaaagatgctcctgacattataaaatcaggtttatctccttcttttccaatttcaacactatgtattctgccatcttcatcatatttcaaaatccactcacctattatattttctttacaagctgaataatataatgatgtttttggtttacttttaggtaagaagttccttgtaatatagttatctgcatcaattacaaatgcatccctaaggtattgcctaactaaatacatagtatatatattattatagatatcgtatttatcattaaccactttgattaaattatatttcttaactatatcatcaaacttttcatggagatatccagttaatactataatctcgttaatcccaatctcctttaaatttattatttgtctttcaagtaaagacatcccattgacttctattaaagattttggagtattttcagttaatggtcttaatcttgttcccatgcccgctgccattaaaattgctctcatatctaccttctcctcagctaattaaaaatatataaatcatcttaaatttcaatacatataaataaacaagttatatcctaagcttatgtgatatctaaccagaattataaatttgatttataattaaagtttatttaaatattccttagctctattatatctatctaatccataagtaccaaaatcgtctccttctgcttccttaattagtgtccaaacagcccataagaaatcttggcatatttgatgaattaataatcttcttcttgaatctttatcagcatcttttcctttaaaatatagtctaaacattaactctatatcatcttctgaaaattcattttctaaagaaagagctgccaaatcccacatatcatcgttgatcccactgtattcccagtcgattaaataaattctgcctgcagtatccttaacaaagttttccgaaaccaaatcattatgagatggtacatagactctgttgcatctatttaattcttcttcaagagccataaccttttctcttacttcagcataatcctcaaaaaagtttccattatcttttgttaaaatcccttcatatttttcaagttccctaaacatactgaactcattatccatatgaaaatcagtacattcatgcaagtctcttaatatagctgtaacttgctttaagttttcttctttcttaatacttctatgagttaaagtttcagcattttctataaacttagatattttaactccagtttcaagattgaaataaggtacttctacattatagcctttctcagaagcaatcgccgaattaaacatttctgtgtttctattaatcatttgttccgttccaacacctgcgactcttaatatgtatctatcacctttaacacatattttataatttttgtttgtcataccacctgctggctcaatttctgtaatatcttcatctgttacttttaatgattctctaacaatagcttttatgttacttatctcataacttagctctcttcttcttatagttggataaagataattcttgattttttcatattccttagaactatctgcatccccccatgcaagatcatctattttaacaaaaccaatattataatttctagcaacatctaaaagtacatattcataatttaaatacggatttacattccctttaaattcttcaagcatcattgtatataatttatgtgatatcttagtaagtcctatcatttctccatcaattctattaaattgatgaatatctttagacattttaaataaatgattatcccttatttcaacaaatgcttcatcacctgatccactttcatttgtaaaaagaatacaatcacgatttggactttctgctaattccttaatagctcttttttcgaaaatcaaatcattttcaataagtaaaaaatcatcatctatataatctttagctaaagataatgaatgcattgttcctgtccacttataagtatcgctctttactaatattatatttttactatttttaaaagcttcttcatagtactgactttcatatcctgttactataacggtcttagttattccattttcttttaaaatgtttagagttctatcaataagcctaaagtcttcaatatccaacattcctacaggtttcccaaattcctctgccttacctgctgcaagtattacagcttgtttaactatttttttctcttcttcatgaatctttaatctagtactttttgcagaagcaatattttcttctaaaaacttcatgcccttttcagttactttatataaagttcctctattatttgttattctgtcaataaatccatccatggtaaattcttttaaaactgcattaaccttcccaagggatatattagttcttttagccaattctctttgattaatattaaaattatcattcagcgtttttaaaatttctatcctatcttctaacatattacacctaactcccctttaattaaacatagtatttattgttcgaattttgaactataattattatattccctaaaattccagttgtcaataaaaactcccttgtatatttctgccccaaagttcgcctctatatgatacttgtttaaaatcaaatacatttgttttaatttgaactcttaatatttttaaaaaacactaagaggaaagctaaactaacttttcgcttgcctaaatctttaatcagacaagcgaaagttgaaaaacctccctcttagtgcctttttgtatagaaatttctaaatccctgttatacacgtacgtatttgatttgtaaatataatcttacatacaccaatcataattcctttaaaactgtagaaatagcataatctttatttctatgagctatatgtaattaaaagtcatagcttaacaaaactataaatatttttagtacatagctccatcctgtccaaatttatatacaccatcatcaatatacatactttgattcacaaccatttgtccattaggagtaaagtaataccattttctatttaaatttaaccagccttttttcattactccatttaaccccaagtaataccagctattatttaaattcatccatccttttctcatctctccgtttgttggatctaggtaatatgtttgaccagtcttatcatcaaccttccaacctgatgctctgtatcctaaattatttaggtagtagtactttccgccagtagatacccatgcatttttaacttgtctgctttttttatcaaagtatactggtttcccatttactgttccccattcatcatacttagttaaatctacccaacaatcattgtaatcatcataaaattgatcatcatcactgctactatcattattattatcatcgttattccaatcagaagagtcaaccctataaacttctaaagtataagttttagtctccttgccatcttcagatataacctctatatcgatctccgttttctgagctcctttaaggctaacacttattgcagaatctgaatattcctctccattaacactaattgttgatttggaatcttctgctattggagttacattaatcttagatacattttgatcaactcgaactttagttatatcttctttaggatcaaatgtatagtctccttggctaagaataacatttttcaaattcgcattactaccttttgaattgttcttaattacaatgctatatgttttactagttttcccatcttgtgctgttacaactatggttatagttgtattcccatttgtatttaaaggaatttcatttgattctccagaagttaaatcataagttgcatcacttccattaatacttgcaataattgacttaacattatcatcttgggctattgctgttatcttttcagttgtatcttcttttgccacagtagttgtataatctaatttatcacttgaaaatcctgaattcccatcactatcagttaaagtatatcctgaaatttttaatgaatttaatgaagcattgcttgaacttgctcctggatctggtgtcacttcacctgtaaaattttccggaagataaaacacataactatcgcctacagtatacgtaccagttttgacttttacatcctgaccattctcatctttctttatttcaaccttatcataatatgcttgaacaaccattttctttctactatgagcaatattaacattaaggctagtacttcttaaaagatccttatcaggcaaattatttactgattcagtggcctcctcaagattagtactatttacatcatccgcaaaaaatacttttatatattcatgcttatcactttgatgacctgtaaaagaaactataactgaatttgcattaggcgacccataatacaaatcataactacgcctagataaagtaaaactaacttccccattattcgctttagttactcctggttgtgttaacaccacatcactattactatctgtagttttactaaattctaaattcattgtaaagttattatcattatttataacaacgacatctaatagatatctcgctaatatctgtgatgaattggttatatttccatctttgccctcataggcatctatctgtatctgattataatctgagctcgtatcaaaattaacatattgttttccatttttgagctgcgactgttcagttttagtcttccctgatgaatctttataattattagtcacagtatatgctacattgttactggattgagatcttattaacgtaggatttatacttatcattcctgcccttgaatctacgtatatttttcctttatattccgaaaaaccagacgtagtttttgtgacagtaaatgcctttccaatatacgctttaacatcatcatcgtcattaaaatcaagctttgttatacctgcattttttaagctataatctttctctgcatctaatttattgtatctaatttctactgcatatgccttcgctatctttacagtagagctactgtcattagtaactgagtttaccttaattactattaaatctgacttacttcgatttgataaatctccagataatttctgtccattaagactgaaacttccatcaacagcacgtataccatttttatataattcaacacctttatctaaattaatcatatctccaaaagtcatgatatattttaatgctgaaagtgaatctggcacatcaaaattatatcttaatttcatattaggatctggtgtcaccgtagtcgaatataaaaatggcactgtattattttcattttttgtggcatctaaaatctcatctttatcattaaatgcatctgcatcaccaacataagctttaaatgtcatttcacttatttggttagttgcataatccttaccattctctattgttattgttttttcatattttgtaactgtcttttctccagctggatccggagttgcatcttgtgttacagttccgtcagaatttttagtttctttatatattattgacaaagttgttattttaactgaatatttaattttattaacacctgctggtaaacctgttatctttactcctattctttctgaatcattttctacaggagtcggcccaccatttccagtactgttactataacttaaagttattcccatccctgccacagcattttgtccgtctgtattggcagtcccatcatcattgattagtatagcttcatttatagccttaacaactatttcctgctttgttactccagtaattgatgattttgaatctttcgcctgctgtatcaattcagcttgagtcttttgaatatttttaagagatatatcaaaattatcctcaagagaattagcagtatgtatctcttcttgagtagtgctatctattctacttggaagaggtgtcatagttccatctaaatttactctgctagctgtagcttctgcaggtatatcatccgcttttgccacttctgaattaaatccaagtggtataagtgatattatacttgtaaataccactattagcgctataaacctttttttaatcttgctcatcattctcgtcctccttaaattgtgcttcaaattcaaaatttagtttatatatagccgctcgcctatttatctcatcatattaagacatatcttagaattatattaaataaaaaatatctaaatttatataaatcccttatgtgttaatatgttataataaattactattattttactaattttaaatacattccattatttattatcgaatcatttccttgtgcctttagacatttatatcctttatatgaatgtattaaggcgtattcattaaatttacctaaaaatcatataatataaaataatgaataatcttatattaatatctaaataaaaaataaccttccataatataatacagcagttatatattatggaaggtacttttattaaacttctataatcttattcatattccctaaatgaaacactttatgattttcctttaaacgaactattacatttcggacatgtaatagaaatttttccttttcctcttggcactcttaatttttgcttacaatttgagcaagtgtaatatttatagttttttaatgtttttattctatttatattattcttgaaccacattactatgttatttttaatttttaaatacttataattctcatttcttctcttatatatatttcttgaaaatatcctaaacatacatataataacaggaatatatgctaatattgttaaaaatcttaaatcctttggtacgaaattcattatcaacagtagtataaaagataaaataagtaatgctttagataattcatctccaccatatcttccaaacataaatcttcttaacctatccatggacttcacctctcttgaattctattaatataaaatatagtataattaataagatctatcaacatttatattattaataatccattaattttttatgatatacattcgtaatcaaatcctgcaaaattttacaacctattagtttaaatatgaactcacttctttactgtaagtattattataaaaaataatacaatataccaaatattatatcagtatattgtattaaaacttttctcactatatttttatagctattaaattgccaattctgttcagcagtaaaatcatttaaattattgttgaaactgcattagcaattgctgttgcttctacatcttgatatgatgaatctgcacattttttagcttcatctgtatttgttataaatcctaattcaactaaaacagctggcattgtagtatttctgcatacaaataaattaccatctttagcacctctatttatagctcctgtactatttgtaagagatgatgctatagatgaagctacattcatacttttggaaagcctatcgtaactatatccaccaccaaaactttcatcttgtgattttgaactgtaataaacttcaactcctcttgcagattctgcatcagctgaattgtgatgcaaacttataaatagatcagcctttgaattatttgctatattaactctattagtaaggctttgattaacttctaagacttctctatcagatgatttcctagtcatgattactgtatatccatttgcctcaagcttttcttttaacttatccgcaacctgcatatttaaatctctttcagaatatgtaatgccattattagttgaatatgcgccatcatcaccgccaaagttatgccccggatctataacgatgactttaccgtttgtacttccaggcattctatctcctctttttccatcttcacctatctgccatccatttataactgtattcttagccattgctcctgaaacaggcaataaataataataggcatttccagataaaatccagcctgttgccatcgtgccattacttcttaaatagtaccatgttccattaagctgaagccaatttgtcgccataactccattggaatacaaatagtaccagcttccatctggcttaatccatccagtcagcatacttccatcactattgaaataataccattgtccactaattgaaacccatccagtcttcattgccccacttgaatctaaaaaatatttcctaccatcaatcaagttaaatccagtaatcatacttccatctccttgaagatagtaccacttattgctatcttttatccatccaagctgcattgctccacttgatttaaagtaataccattttcctcttaaaaggctccagccttttgccatacttccatcactatataagtaataccagttaccatcaggcttaatccacccagtaactttagatccatctgagttgtagtagtaccaatttccatttccaaatctccaacctattgatgaagaaatacctttactaccatccggcgatgctgggattggcttggttgcttccattccacttggaactgttgtatttgtttgaggcttatcagttcctacagttttgcctgagtcgttatcactaccagaatttttagaagtgtcattatctgattttgatacaattcctgctgatactaataaatcattatataattgattaacctcttctccatatgtaagacttggagcccactttccacctaaagcatttaccgttactactgtaccttttatggtaataaaatcccttgggtcatatgaatcactccttggatatccatctacacctgcataaagtgctagatggtctaaatgagcttgaacgccttcatcccatgtgttgaatttttgatgagcatttggatcattatccaatccaccagcacttattttcaatccacatggattatggtagctttcatttataactcctccaaatttaccatatcctgtttcctttgcagcttgcacatatgccacagctggattaacatttccatgctctggcgaatacttccaatataactttgccagattaataaacgcatctgttgcaccttttgatttagcccattgttcagcctgttttgctgttactttcgtctctgatactatcttaatatcagtgatagcagcttttacgctagtaataggaattaatattaaaactatcacaaaagcaaaaaataatgtagtcgatctcttaatagccttcaaaacagctttcccccgttctatttagttctaaagaacaaaaattatatagacaaattttccctaaaagtagtttgcctattatatagtacaagcttttattctattttaggtactaatatatccaattatatggcactatcttaaggaaaattatcgaatataatcataaacttagcaacaaggctacataaatttacattttttatattctttaattatacaattcgctaaatattagtcttactaataataaatgcttttactaaaaccaacgattttgctaatacatactctgataaatagataaaaaccttgaaatgttattgaataacacttcaaagcctttatttaatacttatctactgtaaattttgtaattataatatacatattgatggtatgaactcaactatatccaactttagttttctccctggatcttagttaatttaatacaattaaattttaaatattaccagcgataacttctgctattgcttgagctacctttttttgactagctggatcagcgcatcttgctgcttcttctttattggttataaatccaacttcaactaaaactgctggtatattggtatttctacatacaaataaattttgttcctgtccacctctattatttaagccaagcttattagcaatattattatttataagagttgccatttgcttacttctttctattctattgctatctagttttcccccaaacttagagtcttgggcttctgaactataaagagtcagaacgcctttcgctgtctccccagctgaattatgatgtacgcttataaagaaatctgcattagcattatttgcaacatcaaccctatgagtaagactcgcaactaatgagccatatgaaggctgctcaccaagatttctcgtcattatcacattatatcctctattttgaagttctgtctttaacttatctgcaacttgcatatttagaactgtttcactgtaagtaactccatcaatagtgctttcagcaccgtaatctttgccataatcatgtcctggatctattactatagtctttttaccatttgaagaattacttcctgctgaagggctatttcctgaattatcttcatcgtcttgatctgttggagtattatttcctgaactatcttcatcattttgattagatgaagcctgctttttcccatcagagccaatcttaaatccatctattgttgtattagtaaccattcttcctgttgaagtatctaggtaatacgaatctccattagatgtaacccatcctgtcgccattgtaccactgtcttttaaataataccacgctccaccaagattaatccatcctttcgccatagctccggtttcatacaaataatagtaagttccattatcaataatccatcctgatgccatgctgccatctgtattaaagtaataccagtaattgttcaatttcatccaaccagtagtcatggttccgttatcattaaacatatacttcttattgtctatatttttaagaccagttaccatgcttccatcgccttgaagataataccacttagcattttccttgaaccatccagtttttatctttccacttttctcaaagtaataccacttattatttatctttgtccaaccattataagtagccatagctccagaatcatttagataatataatcctgatccatcaaattgaaatccagtttccatgacacctgaatcctttagtaaataccagttattatctacttgcctccaaccttttgccatagcacctgatttatctatatagtaccatgttccattatcttttatccagccagttgtcattttaccatcttcatcatttaagtaataccaatttttatctggtttaatccaaccgactgctttggtagtatctgatttgtagtaataccaagctccattctcatacttccaaccaatatttgatgttatactaacactattgtctacagtatcatttgagctttgaggtttattctctgtaataatatcagatgcatttggtgcgctaggcttactttcaggagttgctggatttggtgacgcatttgatggttgattatctggagttttaccattatcttttggataatctattccagcataatccattaaatttttgtataatgcattaacttcttctccatatgtagcactaggtgcccactttccacccaaagaatttaccgtagttgctttacccttaattgtcacaaaatgtcttggatcatacgtatcttttcttggatatccatctgctcctgcatatagagccaaatgatccaaatgtgcttgtacaccttcatcccaactttcaaatttttgatgtgcatttttatcagtatcgcctccaccagatggatttttaagtccacatggattgtgataactttcatctagaacaccaccaaaattaccatatccagtctcttttgccgcttgtacatatgcgattgctggatttacatcaccatgttctgatgcgtatttgaagtagagatctgctaaatcagcaaaagtatctgttgctcctttagatttagcccaactttttgcttgctttgcagtaaccttactttctgaaattattttaaaatcagtagttgccgcttgtgcacttaatcctggaattaaacttaatacaactgcaaatgccaaagcaaatgttgtaaatttctttttaatattcaaaacagtgtgccacctccttacatttgattttaacaaaaaacgtcatggcattaaaggcaaatttgaaaaaatgtggacttttttagaataaaaccacagttattgttttttatcaataaatttcatagctttaatcaatttttaatatgtaaatgtgttaattaattacaatcatatatctgttttatagtaaaattatatctagagttctaataaaacacattatcaaatatgcttagaatatataagctgaattataatgtatatatatcttcaaacaaaaatattttattgcgcataattaaaagagagcctgttttagtgctctcttttagtgactatggtgtctcctacaacctgcaagatcactcttacagtcatttaggttgtctattaaattgtctactaatttatctgtaagacacatttggttacataacagcttttcgttagtattgattaaatgacaaataaaattttggttagtaaatgcatatagaaataatagtaccgttactaaacgacttaatacggcttcttgatttcctacaaccattgtagacaaagttaggtcactaattggttcattacaatttgctccaagagtgtttgctccgggactttcaaagccaggatcacaatagttacagttactcattctcttcctctccatgtacaaagattttatataataataatatgagtaatcttgtcgttttgttactttataaataaaagtattattatttaataaatacataataataatttgaacaatatattttatcagaagtatagattataactgctagatatgttagatcgaaaggagaatttatgcttaaattattatttgcgaacgctgcaattcttatatcttttttatatttaggaagccacatactaaatgatgaatttataaaatcaaattctaaagtaaaattcaaattatgctttggcatgctatctggtttatctggatgtgtacttatattttatggaattaatttgactcacaatacaataatagattttagaattattcctgttataatcacttcaatttatggaggatttatatcaacttttataagtgtatttataataatactatttagacttactttctttggaataaattattcttctttaattacttctggaaatttatttatattactaataatttttaccattatatcaagatataagataaacttttcaaagaaatattttttgatgactatagttaacataatatcaacaataatttggatttcattagttttaaaagatatgaatcttatactccctgctctaggaaactttgttatttctataataatggtttctactgtagtttattatgagttaaactacatctctaaaactaataaaatgtataaaaaactcaaggtcgactcgagaaaggattttcttacagggcttaataatgtaagagcatttaatggactattagataaaacaattagaaacaccttacaaaagaaagaaaacttatcaattctcatgatagatattgatttttttaaacatattaatgatacctatggacaccattctggagatttagtattaaaacaacttagcaaacttttaattgattcttgtagaactttcgatattatctcaagaaatggtggtgaagaattcactgcagttttactagattgcaattacaaacatgcagttgatattgccgaaaagataagaaaaaatgtagaatgcaatacttttaaacttgacaataatgccacagccaaaataacagtttccattggaattagttcttatcctgatataacaaaaaatataaatactctcttaagcaaagctgataatgcattatatttagcaaagcgcacaggaagaaataaagtatgctaaaatgaaactgagattcaggtgtagattaaattcacctgaatctcagttttatttaagtaataaatctgctgttagatttaaaagcattatctatattctaagtattttaaaagcaatatttgatttatcagaaaaaattgtgtagttgaataaagttttgttttattttctcctactgaaattggatgtgtatagaattgaagactaatatcactgatagaagctaattcattatttccaacctgagtaatagaaataattttcacatctttttcctttaacttttgcgcaaactcattcataaataaattgtttccagataaagataataagaaaaaaatatcttttgaagataaagcatctaaaataatgttagtttcttcccttccctctatgacatatattaacttattgccaaaaatcatgctacgctttaaatcttttgctgcatttttttgcactgctccagatccataaacataaattttatctgccttctcaactaattcaaatacatcgtagaaatctctttctttcataatttccatggtcttctcaatatctttatatgttttttcaatttctttattatcgaatgaatttcgctgcttgtcttcccattttaaatgaattttcatttcactatatccttgtaatcctaatttatgtgtaaaacgtaaaatagttgtatgagaaacattacatttagaagctaattcttgtattgacatggtttggcactcttttttatggtgtaaaatatacttccatatatacaaatcactttcatttaatttttcataattttcatcaatcaacgtttccaatttcatgcttttcttccttcttatttttttgtgttttatattccatatatttcaaaaataatatttcaattaaaataaagtatgacgttaaagattcaaaatctatgtcattatatatacttggtataagagctgtagatgtatatagattataatcacttaatttagctaaggaattatcctttaactttgttatagatataatagggatatttttaattttcaagtttttagcaaaatccataataaattgattctcacctgatactgaaataattacgaaaacatcttcatccgtagccaaatctactatagcatttgcttcagtataaccacttaagtcataaaatatttttccagcagttaaaaaagtacgcttaaattctttctttatcgacgactgtaccattcctattccatatacatagagtgttctggatttatcaatcaattcaaaaatatctgtgcaatccttttcctttatattttttattacttcattatatgcatcacaaacagcctctacattattaacattctcttttgacttttcattgtcaagctttaaataaacctttaattccccatatccctttagagataatttttgtgaaaatctaagaatagtcgttctagaaacattacatttatgtgctaattgatctatagcaagagtttcacactcttttcggtgcttagaaatataattccaaatatataaatcattctcatttaattgcttatggtatttgtttataagttcatctagtttcataatattccccaccactattttctactttgtttcatgtttctttaaattctactctataatttatcttttgtctattattgtaaatactcaatgaattaattctggaatttagttggaataaaaactaaaggctaatatatcttttctaaaaaaaagagaaacaagtcctcttgaactcatttctcttctttatataatataaataaagttttataagctattgttttttattgatataggtaatatattctaattactttaattcaggccaataacctttgttagcctcaattaaatcatctaatattaattttgcaactcttgcacttggtactgtcttcgaaagagtaagtgattgccataacttttgataacttctttctatccatgcttctactgctaatttttctacacttacttgctgttccattaatcccttttggaactgaggaatacttccttgacatattctttcataaccattacttccaacgatacatggtatttcaaccattgcagttctatcgaagttttctacagcaccttcatttggaactataagtaagaatctttcccttgtattttcagctattgcacatgctaaatctacaatatatgttgcatgtgcatccacttcaaaacctccgtctttgcttgtaccactttcaataatttttttacatattccaaatacatgtttttctcttccatccattacttcatttgcacgagtatattctggattcgaagtttccaccacataatctgagaataaataatattttaaatatgtgtttggaattgttgttggatctactgcaaatatatctcttgccttttgaaaagtgtgtacccagctttcatctacatgttgatttgtatctgataatgcatctgcaaatccatttgctgccatgtgttctttaatttgtggcattaaatcatttccatctttatcataaatttttgaccaccatccaaaatggtttaatccataatatgatacttgcatttcttttctagatttaaggccacacatacttgccattttttcttctaaatcaattggcatatcacaaatatttaatatttttgagtttggtcttaatcttcttgttgcttctgccactatagctgctggatttgaataatttaacatccaagcatttggcgaatatttttccatataatctagtatttcaataactcctccaatagaacgcatcccatatgcaatccctcctggtccacaagtttcttgtcctaccactccatattttagtggaatcttctcatctttctctcgcattgcatattttccaacacggatatgagctaatacgaaatctatatcactaaatgctgtttctggatcagttgtatatgcaaattcaatttctggagcatgttcttttaggtgaatttcacatgcctttgctacagtttcttgtctacttgcatcattgtcataaaatttaatagatctaattggaaatctgtccatatgttctaatagcataagtacaattcctggtgtaaacgtacttcctccacctgctactgtaattgaatacttcttctttgccatttttcttcctccaaaacctgcttattttttgctttgttatcttttctgagtacataatacacccgagaaaggtaccttacaatatatatgaagcctttagggaaataagcatttcaagtgtatttcttaacattttctgtgacttttcacaggaaatttctgttatgaaattatatatttttttaactagttgaaatttaaaactagattttacataactctaaatccttcaatgatatatgatttataaaataaaaagccgacctctgctacgcagaaatcagcttttaatttatttaaaaatattgtttgttgcatattaattctaaaattagcagataagcaaatgcatactaatctatcactataattccacctgaaatagtactaaaagactttattccgtttatttttaagacattctttaaccaagaattatatgcttttaatgttcaatcaataaaaataaaagtgaaattatataccatacatttttaagcttaacttctccaactatctttacagtaacgcttcaaagtcttctcttactcgcgcaactttcaatccaacaataacttgataggattttccatttacagaacatccatgagctccaatagatttaaaataaggatcatccttacaaagagatggatcatttacatttactcttaaacgagttgcacaatttgtaacatcaacaatgttatctcttccgcctaatccaactaagatattttctgcaaatactgacttactactatcttttgaatcactttttttctctctatactctgcttttgaatgaaattttatatcttcttcttcatcttccctaccaggagttttaaagttaaatttcaaaattaaggtcctaaatactatgaaccaaattcctgtaaaacaaagtcctatagcaaactggagtaaatattggacccaatgatttcccattagaggaatccaatttaaagaagccatttcaatagctccaccagagaatattcctacaatccccacaatatacatagttgttgaaattgttgctgcaagtagtgcatgtactacaaatagcactggtgaaataaataaaaatgtaaattcaattggttctgttacaccacacaaaattgcagttaatgtaataggtattagtaacgccaataccttttttctcttttcaggttttgctgttgcataaaatgctaatgcaatacctggacatccaaaaattttagagtatcctgtagctgtaaatcctgcttctggtaataacgatttcaaagaggctttagaagctgctatttctggtaactttgttgcccagtaagaataaagacctcctggcactacaacattatcataataaaacggagaatacagtatatgatgtaatccaaatggaattaaagcacgttctaagaagatgaacacccatacacctaatgcccctgcaccttttacaaaaccttgaaaactatgcattccaagttgaattttaggccatataaatgccgcaagaactgctactggaatcataacaaagaatccgatcataaatacaaatgtagatccgctaaacgttcccaaccattctggtaattcagtatcaaaaaaacggttatgtaaataaattacaagtcctgaaatgagtaatgcaccaatcattcccatgtccaatgtcttaatattggctatcatggtgagaccgctagttcctcctacttgagcagagaaatcaactccaaaaaattcgccccactgtgaaatgatagtgcttagaaaataatgaaatgttaaatataatacgaatgcctccatgcaacatcttgcattttgcttttttgccattcctattggaagccctactacaaataataatggtaattgattaaatacagtccagccaccctgtaaaactacattccagcatttaaaccacaagttacttggatctgctaatcctcccataattgtctgtgtagtaaataatgttcctataccaattataatacctgcaaatgaaaaaagtagaacaggtgtaaacatcgctccaccgaatttttgaattttctgcatcattttttcttcatcctttctctgttttctacaatttcatgttaacattatcatttttcattatcaatattctgtagtactttaggaattaaactaatctttatgaaatttttcactttttacgtgaattttcacactattatgtaatactattgcttttaaataaaatataagtaaaattaacctatattatacttaatacaccttagttgaatcttgtgattttattttacgcattctacttaagaatacacatatcaataagaaagttgactagtataattcattgtaattatgttaacgttatataataattagaatacacgaaagagaggtgaatgactttttgaagattatcgtttagaaatattttctccttatatatcctaataaagtagaatatatctaaaaatatctttaatatagtcatatatttatgtttaatttttttaagaaaccattaactataattgctcctatttcaggaagaactatagatctaagcgaagttcctgatccagtatttgcagaaaaaatggcaggtgatggaattgcaattaactctactggcgatatagttgtcgcaccttgtgatggtactatatcattaataatggatagtggacacgcttttgcaataaccactagtaatggaattgaattattagtccatgtaggcttagaaactgtttcattaaatggtgaaggatttgaagttctaaaatctgttaatactaaagtaactgctggtacacctattttaaaaatagatagaaaacttatagaatccaaaggattatcactgataactccagttataatagtaaatcatgacaaattaaaatcattaagtcccattattggcaaacaagtttctggtggcaaagatgttgtattaaaatgcagcttataactataagttatgtgttaacttatcgaaagtacagattctttattgctataaaataattaagtcattcctttgtaatataataattcaacaaaacataaatatcacataaagaatgacaattcaccattattatctaataaatacaataaattttcaaaaaatttctatagataaacaattaattagacttctaattagaatgtgtttccatactagaaattacatacatttcgtgaaacaatcattgaatctaaactgtgagagttcctaatacaaggttatgcgttttttgcttgtcctaattttatgttagaattatgcaaaaattggcacaaccttgcacatgagaccttttattaaaaatttcatagccctatggaacaaaaatttattgaatttcggttaactatcccataagtatgatctattgtttgaatacctctattaactaatttagtattttaatatatctaatccttctgcatcatatatatctacttcttttattgatcttaatatttctttcttcgcaagatcaacatacccatgtttataatataattttccaagataaagtaatgcatatttagtgtttactaaattcagcaaattaactgctactgttaattcatcaaatttattatttataagcaatatttctataacttctaaaattatattcatatattctttatcattttcatcctctgacaacatacttgttgatttttgggttactaattttattaattcagaatatactcctaaatactttttatcataattagataaattctttgcgttaaaactatttactataaataatgaatcctcatatctatttagtaatacgaaacttaaaactttatacatagacaaaattacataatttgagctttttttatcattataatttatactagtacattctttaaaatctccagttcttataagacatcttgattttaacatgattgtattttcagtaacatttactgattcttcatattcttttatatattctaatgctatgttgtaatatccaatatgataaaataaatcagcaatagttccataatgaacctttttgtcttctggaaaaaactcttccattattcttttcatctcttccagtgatacgttttgtgcttttaatacatctgctatatcatataaaggttcaatataatcaggttttgatttcaatgcatcaacataataattataagcagtataataatccttatatttcatataagccttccccaactcataataagctctataactccatgttccgaatataaatttaaattcagaaggcggttcaccaagttcaatacatttgttcaatgcctttatttgaagagtaggtctatccatctctttccaaacaatcgattcataaaaataataatctgtacatttgggataatttgaattccctatacttataaattttaaagcttcatcatatttttttaatattaaattagagacaattattcgtaatatcaataatgaaccaaaacctatattgggagtaaaattttcataggctttatagtagcattccaacgctttattcgtatcatcttctgccccatattcatttcctaaattaaaataagcaaatttattattaggatcttttttaatttgctcattcaaaataggtatatttctatttcttttatctttagaaatgattcttttatcaaggtatccataatgatatatttttacatcattgcaaacagcattataatctccatctaccctaattaattgattatgaacttccccttcataatgaataccacgataatttttaaataaccgtggatttaaatttacagcaatattaccattttctatcacacttccatagtaacttaatgtttcaaaatgataaattgctttttcatctaattccatatctagtaatactttaaaggcttctcttccctctaaactcaactcatcatctgcatctaatatgaatatccaatcttttgtagcgtattttaaagattcatttctggcttcactaaaattattattccatttaaagtaataaatcttcgcaccataattttgggcaatttctactgttttatctgtagaacccgtatcaactactattatttcatcaacaatatctttaatacttttgagacatttaggtaaatattcttcttcatcttttacaatcatacacaaacttacttgattcttcatgcaatcctcctatcttatggaatatattcttaattccatagatatttttagtatcttatagcaattcaatattatctttgttttgaacatttttagttgcatttcttgtatcaaatatgaatatagaattttcttgaataaaactatagttatattttttatgggcagtggttataataactaaatctgcattccttaatacttcctgtgtcaattttattccataatgctcttctcctttatacatataagatgatatatatggatcataaaattttacttctgaaccttgcttttgaaaattttctattatcttaagcgctggactttctctataatcgcctatatcacttttataggcaattcctaatatcaagatatttgccctatttaaagctttattaaatttattcaatatagtagcagacctttgcactatatattgaggcataaaattattgatttctcctgaggtttctataagtcttgtgtgataatcgtattctcgagctttccatgttaaataatatgggtctaatggtatacagtgcccgccaagcccgggacctggataaaatgcttgaaacccataaggcttagtttttgctgcttctataacctcccaaatatttatattcatcttattacatataactgccatttcattaattaatccaatatttatatttctataagtattttcaagaattttttccatttcagctactcttggcgtagatacttcaaaaatttcgctatttaaaacttttctatataattctgctgctatttccgtgctatctcttcctactcctccgactacctttgctgtattagcagtattatatattgaatttcccgggtccaccctttcaggtgaaaacgctaagtaaaaatctttttcacactttaaaccagacattttctctaatgtaggtaatactaattcttcagtagttcctgggtaggttgtactttctagaattacgagcatcccttcatgcaagtactttccaactgattctgtagattctttaacatagcttatgtcaggttgttgatatttatctaatggagtaggaacacaaattaatattacatctgtgtctttcaaaaacttaatttcattactcgcttttaatcttctatttttaattgcaaactttaattcttcagtcataacatcgctaatataattttcaccattattaatcatattaactttcttttcttgaatatcaaatcccaatactttatatccactttttgcaaattcaaccgctaaaggcagacctacatatcccaacccaacaatacctatagttgctgttttattattaatcttataaatcaagttatccttatctaacattaaattctcccctggttagtaaatttttttcagttaaggcaaatgtatctattatttatttgaatgtgcctaagttcaataatataatatgtttttcttattaattagttctttgattttgcagtatatttaaaaaataagaatgggataacatataccaaagaaaagtatatgttatcccattcttattctttattattatttaactgttattatatagtttagctggatttccagcaaccacaacattgctatctagatttttgactactactacatcatttatcttgaacgttaactctataactacacataaagcataaatatacaattcatcttatactcttaataaatttaataaatttgctatgttctattgcaaaatttcctgaaacagcgcttccatctcctatattggtagtaacaacagctcctattttaatactcacattattacctacaataagtccatttgatatagttacacttacaccaatccaacaatcatttccaatgattgaactcccaccaattaatgcattagctgcgattaagcatcttttaccaatctttgctccatgtcctacatgtactaaattatcaatttttgtttcttctccaattacagtattatcccatggaaacattgctttatcaatacaggtattgtattgcacctcaacattcctacctatttctacaccgccacaatgctcaataaaaaaaattcttccttctttattaaactgaaatccttcacctccgagtataactccagatctaatcactgaattatccaatattttaacgttctctctaataataacattttcctctatagttacaccattaccaataattacattttttctgcttatacctttcctatcacgtattatacaattatctcctataatagtttcaaactcttctttattatataagttaagatctctgcataaacaattatggattaagtaaaaacttaaacgtggattctctgataaacaaatcccatatttattaggaagtattttagctattttagcatcacatattatacaagttacagattctgataatgtgtgtatatatttttcattattaataaatgttaaaatcctacttctcgtcttagagtttgaataatcaagattatcaaattctccatcattataaatactaatattctctatcttattaactaattcagataatttcatttttcaccttcctcctacttataaaaattcttgacacaatttatttctaatatgttttttactatttttatacatgatttctccaactttaagtccagcgcaatgtaaatcaattattggtttaggtcctaaatatgctaatgttttgcccattctataatttccaactttataatctggataaaaatttatacagttttcttttaaatcgtcaatatccactatcccagaatactgtatcactgttataaaacttgacaatgatttcaatttctttgatgttatttctgaattattcatgcctataaaacatttttctgaagtataatctgctacaattaaagcatctgtatttattaataaatcatggttttcttctaataaattttttatcacaactacatctgatgacaattttgataatgtggtgtatataatctgtccaaaattatcattacttacaattacaatcttacttttataaatctctatgcccacatcaaataacatcttcactgcaagtggaccactaaatttgaatgtatctaatcctggataattttcatttgttcccattacattaatagctttttgtttgcaatactctatatctatatcctcatttcttaattcccatgtttcacacatatatggaatcactgcattttctttcatcatatctattgtttctttatcaataggtcttacaaaacctaaattagttactatatcagcttgattaatattcctcttatcaaatgctatctctattttatctacaacatcacaaagttcagcaaatagcattgttttctttttcacctcatctttagatgcatactttgagtctttagttattgcatacacttttttagccccagccattgctgctattataggcgtatatataaactccccacatgcagcctcagtaaaaactataagtccacttaaatccaatttagtaaattttatcgctttgcatattagattaatacttctctttggatttatcattccattttctttgaaatacattattatattattattcatttaatattttctccaattctgatacaatataaattatctctttcgacaaaatattgttatgcaaaggtaatgctattccatgcttatgagcatatacagaattgtaaaattgacaattttcatacccatatttctctttatagtaaggctcttcatgtacagcataagcaccaaaattagtttctattcctttatcttttaactctataattaatttatctctatcaattcttttatctaaaagtatatgatatgtctgccaaacatgtttttcataacttttttcttctggtaatgttataaacttcacatttttaagcaaattattatacttatttgctaattcaattcttctctcatttattaattctaattttttcatttgtactgttccaatagctccttggatatttgtcattctataatttaaacctgcctctacaaagcttattttcccgtttttatagttcagtccatgatttctgagtattctaatgttttctgctaatttagaattatttgtaactacgattccaccttcacccgttgttatagcttttcttggatgaagactaaaacaaccaatatctccaatcgttccgacctttttccctttatattccgctccaagtgcacacgcagcatcttctatgatttttaaattgtattttttagctatggtcactattttatccatatctgctgactgtccaaattcatgaacaggtattattgcttttgttttatcagtaattgcattctctattttatctgtatctatacatagactatctagtttaatatctacaaacttagttatagcacctacaatctctactacattagctgttgctggaaaagtaaaatcaggtactataacttcatcatctgcctttattccaatagcaagcaaagctaaatgcaatgcagcagttccactgctaacagcaaaacaatatttagcatttaaatattcttttaattgattttcaaattcttctactttatctccttgtaccaaatattttgaatcaaaaactttttttatttcatccaattcttcctgccctatatctggagaagcgagtttaatcatttagaacacctctataccacttaattgttctttctaacccctcatctaaatcatacttaggtacaaatttcaaaatctctttagctttttctatgcttggacttctaagttctatatccacataattctttggtacataaacaatttcagatttagactttgctattctctttattaattttgcaagcatagctatagtaatagttcctcttggatttccaatattaaatgcttgtcctattgctttctcattatctaagcataacattactcctgttataaaatcgtcaatatagcaccaagatcgtatttgatttccttcgccatgaatttgtatctgttcatttttgatggctcttacaacaaattgatgaatcgcgccttcaccaacctgaccatctccatatatattaaaaggccttattgttacgattggaagtccatactccttataaaaactataagctaaatgttcacctgcaagttttgagactgagtaagtccatcttgcttcccctacaggagctaaatttgttgtatgagcttcatcaactttatatgcataagatccaaatatctccgaagttgaaaaatctataaatatttctattttttgattttttaatgattcaagaatattataagttccaatcatattgaccttcatagtactcactggattttttataacagtatctattcctgcaatcgcagctaaatggattactatattaggtttaaattcatctatgacatgctttaaaaaattaaaatttaaaatatctcctttaactaattttatattatctttatttaataattttgtatttttaatcgagtttctctttaaattatcatatattaataattcattattactgctaagcttttcgcacaactttgtgcctataaagcctgcaccacctgttagaaatatttttttactttttatcatttattatttctcccattattatttgctatattatctatatatttttcaaactcttttacaaaatactcaaattttaaattattgctttctatttttctattcattttcacagtatttctaaagcttttatcttgaattaattttttagaataacttaataatttatcaaaatcacctgttttagggaaaatagtttttgcattattatataaatatgctggagccatataactagcattcattacatcaaatgcttcattattttcttctttataaaaagtaataataggcaattctgcataataagcttcttctaaagagtatcctccaccaggatatgaattcaaataaaaatcgcaactttttagatatgatgatgcttctaaattaaatcctgcaaaaatcaccttgcattcctggattaatttacttggaacatattcttcaaactcgctataatcgcctccaaatacaacaaggcatatgtcatctatttcattaataagcttaattacaaaattccaaaattcattgtttttatactttatagaccttccaattgaaattactacttttttcttcctatcaatattaaataaagttcttatattaagatttttatccactaactcagtatttattggtgagattaattcaaatatattttcacagcaattatcttttttaatatacgtgtaacaaaaatctaatttcttatcaaaataatcttccggctgttgaaattgaatttttccaataatttcacaaaccttttttaataatgggtataacaatattcctatcggtgcaaaatataaactttgatatactacataatcaaaattttcttcacttatataggtgtagaattctttaattttatcctcaatacaattgctaattggtacaaataaatttacatttaacttattaaaatattctatactttctttactattattaaattcattcttgtttaaaagactcaatactgaatatctatctttagcattctcagaactttctaaataatttataaagaattgtgttacactctgatgtatatccaaaccatttaatataaataaaatctttctcttattttcttttaaactcatttttttattattaaaataagtcaaataattctcatctaaaattctttccccgattttatccatttcctcgtatacattttgttgcatatatttaaatcttgaataactagtaaatctcctatacatatttccataataataattgaatttgaatgttaattcatatttacttcttataaaccactcacttaaatatttcatatagctttcttcatcattgatgcttaataaataatcaaataatgcttctgtattagtcatgtcatctgaatttaccataaattttgttttcattaaatcaacttggtcactacttttccttaaatgatctggatttatataattcaaattttctttagatcctttttcggacgaactaatcaatagatctttaatttttattaattgatcatttaatgaatatctttctttaataaatgccctatatacttttgaagtataatttttatcagaaatcatttcgacagcttcagttatcgtattccatacatattgagatggatatattactctagcccctacaaaattatgtattattggttttattcctttgcacatggcctgcattacgcttatattttgtgattcaagaacacttgtacataaaatacaatttttatcttcaagccatttatctagatcattctgccagccttcatatataacattattctctaatcctaattctctaaccatttgattatagtaaagtacatctctattatcttgaaaaactcctgcaatatataatttatatctattatcctcatcataaatagccttaaatgtatgcaataaaagcataggacctttcttataattaatatatcctacataagctatattaaatccattttctcgctctttatatgtccattttttttcatctattccatttgggataacactaattattttttcatctatgttaaaattttcaacaataaaatcttttatatgtgctcctactactattagcttgtctatactgttccaagtcacattattaatataatctgtaaaggcttcataactatgaagcctacatataactttcttttctctagctaactctaatttacttccatatgctattaattcatcacaccattcaaaccagcaaatatctgcccattgcataccatcttcaatttgcttatattctgttactataattttttttatctcatattcttgtgacagaccctcaataatatcgcctaaaaaactatctaatcctagccttacaaaaaacgccaatttcatcttatcttttacgacacatgaaatatcttcttttaaattttcagtatcattaattaattcatcctttgattgcattacaatattaaccaagttgtctttcattaaaccactccaaaattctgattataatattctactctctgctgatttaaattatgatttattatttcttattattgactttttttgaatcttacttctaaatgagtttaatgttagcgtattcaaaaaaataatagtcaatttatctgatgaaaaatatccatgacaaactggacttgttatttatttttacgtgccttaacttaatacaaattgatcaatagaattcttttaatcataaatttaagataatttacttcccccactaaattatgtattgctgtatcacaattaaaaaacaataatataatatactataaatatacaaaaaatctaaggaatcaattaaaggagatgttatttaatggcaagttttgatacgcctcaaaacagcactattcaaacaatttatgctacaggaactatccctgcacacaatgatgcaggttttattgaaatacaagccgttgcttctcgtaatggtggtcatgaaactttttataaaacatttcaagttgctgctagcgctacaagagctactgctgaagtatgggctggggctggtaactatcagataattattactcctaaattatttggtacccaatcagttagttcgacaaccgttataaatagcttcaaacattaataagaaccataatataaatttcatggagtctaatatccgactccatgtttttaatatgcctatataatttttataaaaaatctgcttcgcaaggtgtgagtttaacatacttctaaaagtcatccacgtatttgactgtattataattttctctaaagaattaaataatcttgactgatgaacttattattttttcattgtgttaaatataacatacagtatatcttaatcttctaattatctttgaaaataattccacataaagtactcagctatttgtataaaatttgaatagtatgtttattcactcctttttatagatctcatatactatattaaagtggaacctgtttttaagtaatgtgaagtaatactataatattgcaatagtatcggagaaatggaggttaataatgaatagtattacaattccagctattaaaagcctaagcattacaaataaatattctgataaaagtctaaatgaagataaaataatagtaggcgctgatggtaactataactactacagttatttgttttgggatatctcatcaatacctactaatgctacagttcataatgcaaagcttacgcttttcaaaactgataatttttattatgatactagtaaaaaattctccataagtccgctctatgaatacttcagtacttatacaacttataataattctcctaattatgatcattatactgtaataaacttttatccattgacagataatatatcagtaacaatagatattacaacaatagtttcgtcatgggtaaaaaatagtttaaaaaataagggtataatactatatggaagaaatgaagatatactcacaagcttcggatctgtaaaaagttcagacaactatcttatgccatttataatagtaaattatgatccatattcccccaataaatgtttgaaaaaggaatgtactaataaatattctaaggattgttgtaaaaaaaaatataacgatgaatacttcaaagatgattgttgtgagaaatatataaaaatatgcaaagaagaacttgaatcgattttatttaaagtttgtaaagaagcttgcggaggtaattgcaatccattcccctcaaatacctccattactagaacggtacgagtgacaggaactgtagctccaacatcagtttattatatagttgtagatttacaagtaactcgcgcttctagtggacaagtaaatcattattatgtatcagatgagtatgataattccttaaataatactcctcttcctatagataaaacgtataatattgctgtaagccctcctattcaatctggtgatgcagaagatgtgattttatatggttcctataaaggcttttagttcctagaatttatataataataatgagagcttttaaagcacataaaaaaaataatcatgacattttggacttgttattttctttaatctgcctaagctctcattatttttacatatttacttgtaatataaatctattaatagatagtttttagtcctcactttttcctacaccagataagattaatcccttattatgttctagtgcccagcttataccccagtcattttggaatataagaagatttctatccttaaaatctttaaccttcttagtatcagaagttaagtttaatgaatccatgttaacatccttattttcaatccatcttacatatctgtaatctaatctatccattttaacatcaacattatattcgctatttaatctgtattctaatacttcaaattgaagcacaccaacaactccaactattatttcttccataccaatgtgaatttccttaaatacttggatagctccttcttgggcgatttgagaaacaccttttataaattgctttctcttcatagtatctactggtcttactcttgcaaaatgttctggtgcaaaagttggaattccttcaaatttaaatttctttgatggtgcacatagtgtatctccaattgaaaatatacctggatcaaatacaccgattatatctcctgcataagcttcttcaacaatttctctatcttgagccataaattgttgtggttgagctaatttaatcttctttccaccttgcatgtggtatacatcttcacctttattaaatttacctgaacaaattctcataaatgcgattctatctctatgagccttattcatatttgcttgaattttaaatacaaaagcagagaacttatcatcaaatggatcaatagttccaccacttgaatttctagcaagtggtgatgtagtcatttctaagaaatgttccaagaatggttccacaccaaagttagttaatgctgatccaaaaaatactggtgttaattctccacgacgtacaacatctaaatctaattcatctccagcaatatctaaaagctcaatatcttccattaatttatcgtgaagagcatctcccaatatttctctaaacttaggatcatctggtgaaccttctattgcttcaacttcattttgaccgtgatttccaccattgaaagctataatcctgttattgtctctttcgtatactcctttgaattccttaccagaaccaattggccaattcattggataagttttaattccaagttcattttcaatatcgtctaataattggaatggatctttagcttctctatccatcttatttataaatgtaaagattggcatttctcttaaagaagcaacgtggaataactttcttgtttgatcttctatacccttagcagcatctacaaccataactgctgagtctgcagccataagagttctatatgtatcttctgagaaatcttggtgacctggggtatctaatatgttaatacagtgattattatagttaaattgcataactgaagaagtaactgagatacctctttgcttttcgatttccatccagtcagaaactgcatgcttagatgcctttctggctttaacagaacctgcaagtctaatagctcctccatataataaaaacttttctgtaagtgtagttttacctgcatcagggtgagatataattgcaaaggttcttcttttctctatttcttttatataatcagccaacgctaaatcctcctaaatttataatcaattaattcataaaatttctacggaaattattaaaagtactttatctacatcggacaagtcctcctaaattttatatatcattatttttaagtgacaaaccccatatggttttatttaaaatttataacttcatttatatgtacttatacgacttcattattaactaaattattatatcatatgaaatatattatgtacactttatgcagtatatttacttgagccaatccttcattaatgctagataaaccaatctgttaaataagattaattataaaaacaaaaagtaaatagtaacaaaaatttaattatttgtttagattaaatttatattttcataacatttttgtaacttttttactatataatgatttagtggaatataaactatattatattaatttctgttagtttcaaaacttttagataaattataagttttgttaacaaattttatttttatattaaatttttaattattagggaggaaaaaaattatgtttaaaagagcaaccaaaattacatctttattagtagcagctgcttcagttatgtctttagttcctgcatatgctgcagatgtaaagaaaattgattcagatgatggcactgtatataatgcagtagcttacaaagatggtaagttctttgtggatggagaaattaatgatgacgaagaagcttattatgtatctaatggaaagtttaataaattagaagatgtagattcaggagacgatgctgatttattcggagaaaaatatcttgatatagacgatggtgattacactgtagacttagataaaggtagtgtaactgatgatgataccaaaggtgatatagccgacgatgctgccggagatttaagaaaaaaaattaaggacgatactgatgacagatatgatgaagactttgcaaaaaacatgatagacgaaaataaagatgatactgaagatttaactaaattaaatatacttccaggcgctaaatataaatctccttggtattatacacagtataaagcagcagataaggctgtgaatgataatgttaatggattaaaaggaacagatgcatcaaaacaattttttaatgtttatactgacacaaaaggtggctacattgatgctgactataacttaggaaaagttaaggttacaaccactgctagtggtgcatcacctaaaacagaaacaatagaaaatactaatgataaatacgatgctgctggtaaggatgatgcactaactgcaagtgtttcccaagataaaatattgacacaagatgatgattatatttatagacttgcaactataaaagtaaatgtaactactggtgctggtgttactgctagaataagtgaaataaatggtgttgaacttaacccaacaaacccaaacgacaaaccacaaatatttaaagttgaaaatgatggaagaactgtatcattcaaggctattcaaaaaatatccaaggctcaagactctgatgatgttgatggagctaaatatgcaaaaactgtaactacttatgcactttctgatgaagatggtaaaaacctagatgctaaagacttattcttaaatactgatggcactatcaatgaagatactaaatttactgtagctaatggaaagcttatagcctacaatacagaaatgaatgagtataaaaaagttgttgtcagagcatattcattaaagacaaaaggcggatactactatgccgacgaagaagatgaaagtaaagaagattgtgaagtaagttctcaagataataagacatcagctgttcaaacagacgttgatggaaacctatggagattagatggtggatatatctataaatttgataatacagatgattgggacaaagtctacaaagttgatggatcttttgatgaactttcagtttatgataaagacaatatagctgcttggagcgaagatgatgatgtttattcattaataggtggaaaatcttctgatgataataacactaatcctccaactacaaccgctggatgggtacaagctgctgatggaacttggacttataataaagaagatggaactaaggctactggctggttaaacttaaatggagtttggtattatctaaacactgatggtgttatggctactggttggttaaacttaaatggagtttggtattacttaaatccatcaggagctatggctactagctggttaaacttaaatggaacttggtactatttaaattcatcaggagctatggctactggttggttaaatgataatggaacttggtattatttaaattcatcaggggctatgttatataacacaactgttgatggttatgtattaggctctaatggagcttggattagatagttttaatctaattattcctttataaaaggacaaggttttctatactgtcgtttatatacatccttatctaaacgatggtatagcttaccttgttattttttatgctataaacaataatatttctatatctaaattgatccctaactgcatatatttcatacttctctaatttttctattcctatataacactattttcaccttaaattctttattgatctcagaacttcataacctattctatatttctaattaattatcatttataaactcacactagattttatatacagatatcacgtcaagccaaagtaaaagttacctaataatacttaaaggaatgtatattatattaaaatacgaatcatcattacccttaattttcttataattttgatatttttccaaaaagagtaccaaaattttcacatatattttgtataatatagcgaaaaagttaaatatcacttttaatttcgaaaaaataaaaaaatatttaaataaaatattatataaaatggaggataaattatgctaaaaagattaactaatgcaacatcactactagtagctgcagctgctattatttcaatagtgcctgctcatgcggctgattataaaaaaatcgactcacaagaaggtactatatacagcgcaacagcatacaaagatggtaaattttatattgatggagaaattaataacaaggatgaagctgcttactacttagcaaacggtaaatacaataatctatcagatattgatagtggatcctcttctgaaatctacggttctaaatatgtgaacgtagaaaatggtgattatttcattaatttagataacggttctgtaactgatgaatctataaaagaaaatgcagaagatgatgctgcttcagctctaagaaagaatcttaaaaaagacaatgatggaagattcgacaaaactgaagctgaaacaattcaaaaattaacgaatgtagagcttccagggaataaattttcagatccatggtataaatttgaatattcaaaagacaattcaacaaatggagcaattactaaattaaatgtatatactgatgctcaaggaaactacattgatgctgattataatttaggatcactaaaagtaactacagttgcatcttcatctacatcaaaaacaataattgtagctaacacagacgatacttatgatgctgatagcactaattctattacaggaaaagataaaatatcagcaagcattgatgcttctactggaaaaataattggacaagatagtagctatatttatagaacagcgaaggttactgtaagtgccgctaatggagctaaaataactaaaattaatggaatggatgtcactgttgatagcggacatacatttactgtaaacaatagcacattgggttctggcactagtacagtaagtttcaatgtaattcaaaaaatatcaaaatcgcaagcttcaggaaacatcgatggagctaagtacgctaaatcagtaacaacttatgttatttctgataaggacggaaaaaatgagtctttttcctatgataagtatactgttgccaacggtaagttagttggttacacagctaatagttcaaatttaaaagttagaacggcaacattaacgtcaaaaaatggatattattatgttgatttagctgacgaatcaagtgaagatgttaaagtaaatggttctaaaagtgctgttgatacagatgtaagcggaaatctttggagattagacgccggatatatctataagtgggataataatgaagactggacgaaagtatataaggtcgatggttcttttgatcaaatttcagtttacgatgataataatatcgtaacttggaataaaaataatgaagtttattcggtaataggtggaaaggagacaattccaacaaccccagctgaaccaacaactcctgtagtaaataaaggatgggttaaaactgatgcaggctggactttctacaacactaatggaaatcaattaaaaggacaatgggttaatgattccggaacttggtactatattaaagcagatggcatcatggctactggctggatcaaggatggatcaacttggtatttcttaactggctcaggtgccatgaaaactggctggttgaatgataatggaacttggtattacttacaatcatcaggtgctataaagactggttggttaaatgataatggaacttggtactatctaagcgcatcaggttcaatgttatctaacacaattgttgatggatataaattaaatgcttcaggcgcttggattagatagaggatatcttaataattgggctatatcaaatctatttggtatagctcttctttcattcgatattcagatcttatttataaaatcaacctccttaagattttcttaagacacgttaagaaaatcttaagaaaatttaccacttaaaaaagtaccaagtactgtttaaagagttgtatattatagtgaatgacaaaatcttacctgtatattaataatattacatttaattgattattcattcataactattagctaaatattttaattagcttaaatactattaaattttattttcataagaggaggacaatattatgataagaggaatgggaaaggtaacatcactattagtagcagcagcaacagttgcttcattagtaccttttagtggcgttaatgctgctgagataaaaagaattagcgctgatgatgggactatctataatgcaatagcatataaggatggtagagcttatattgatggggaaatcaatgatgatgaagaagcttactatttagctaacggtaaatttaataaattggaagatgttgattcaggagatgacgcagttctatttggagaaaaatatttagatatatcagacggagactacactgttgatttagataagggtactgtaactgatgatgacattaaaggtgatactgaagatgatgcagctgctgctttaagaaaaaaaataaaagatgatacagatgatagatataacgaaactgaagcaaatactattaaagattcaaatcatggtgacctattcgatttaattccaggagcaaagtataataaagtttggtattatacacaatataaagccgctcaaaaatctatagataaaaatgttaatggattaaatggattggatgtagcccatcaaacatttaatgtatttactgacgaaaaaggtaattacattgatgcggactataacttaggtaaagttaaggttacaacaactgcttcaagtgcttcaggtactacattaacaaagacagatacaatagagaacacaaacgacgcttacgatgcagctgatggaattattaatggaactaatattagtggatctgataaattaagtgcaagtgttgttcaagatagagtattggcacaagataaagattatatatatagacttgcaactgtaaaggtaactattactactggtgcggctgctacaattagtgaaataaatggtgttaaaattgatccaaataatagcaatgatatatttaaagttgaaaacaacggacaagttgtatctttcaaagctattcaaaaaatttcaaaaactcaagcttctggtgatgttgatgacgctaaatatgctaaaactgtaactacttacgcactttctgataaagatggtaaaaagttagatgctgaggaattatttataaatacttcaggtaatatagttactacaactaactatactgtagctggaggaaaacttatagcttacaattctgaaattaataataatgataaagttactgttagagcttatacattaaaatcaagcagcggattctattacgctgatgaggaagatcaaagcaaagaagattgtgaaaacagcaaaaaccaaggtgctgctgttcaaacagatgttgacggaaatctttggagattagatggtggatatatctacaaatttgataatactgatgattgggacaaagtatacagagtagacggatcatttgatgaattctcagtttatgataaagataatatcgttgcttggagccaagacgatgatgtatattcagtaattggtggaaaacagtctaatagtgatcctgatgatactccagtagtaaaaacaggatgggtgcaagctactgatggaacttggacttataataaagaagatggaactaaagctactggttggttaaacctaaacggaacttggtactatttaaaagctgatggtgttatggctactggctggttaaacttaaatggaacttggtattacttgaattcgtcaggtgctatggctactggttggttgaatttaaatggaacttggtactatttaaatcaatcgggtgctatggctactggctgggctaacgttaatggtacttggtatttcttaaacggttctggtgctatgcaaactggttggttaaatgataatggaacttggtactatctatattcaaatggtgctatggctgctaatacagtaattaacggatatagattatctgcaagcggtgcttgggtataaattatcagatataaactatacgcttaataatatacgtaatatattaacctaaataatatgctcttttaaacctctcctaggtttactataacaaggctgtctcaaaagaaatagatacttttggagacagccttacattttaatataacaggattcaaattctaaatctaatataatttcgtttacataaaagtaaatataatctttaaattattgatcatagttattttggaggttaccctaaattataatttcctaatattaaaaacttttataataatgtatttaaaagttcaacttcattcgtaattatactatctactccaaccattatcacctttttcatatcaactaaactattaaccgtatatggatttacttttattcctgcatctttaatttctttaatatattcttcgtttaatatacttgaaaaatgaggatgataacaatcaacggaaatggctttcaaatatttaggtacattaactagtatagtttctgtcagagcacctaaagtgatctttttattattctcaagttttcttacttttactaaactagtatgattaaagcttgatattataaccttatctcttaaattatattcatcaatcatagacaaaacttttttctctagtcctttatattctatgacactattcttaagttccaaatttaatactttcaaatcagagtctgcaacaagctctaatagttctcgcagagttggtatttcctctccacctctgttttgaaaatattctgcttcttccatagtatatttcccaaccttatagctaccgacttgtttaccttcctcatagtttctttctgttgtcatatttaactttaaatgtgccatttcctgcaaagaatcattctttaaaagttgaatttccggtacacttttagttctaaatatctttagttcatctagagtataatctttaacaaaaccatggccatttgtagttctatctaaagtctcatcatgaagtataattggaactccatccttagaaagctgaacatctgcctctattccatcagcattatactcaatcgcttttttaaatgccaacattgtattctcatcaaactttccactataacctctatgcgcaatatttaaaatcttcaagttattccccccttgttaaaatataatttatcttacacaattcccctaatatacatatcttacactaaacataactatattaccataatgaatattagtttcatgattcttaattaaaaataatttataataacacactctatatttattatattttaaatatatttatagtttaatttctgcattttattctgattaaatacttagataagtaaaattttaaatataaaaaatacctgccaagaataagtttgttccaagcatattcttgtgcaggtctatacatactttttattgaccacttatttttatttctttagttcctataactcctgagccatcagttgcaactgcttttacaataacttttccatttgataccgctattagcttgccagtatcacttattgttgctgatccatcctcgtttacaactagccactttactttttgattatctgaattggtaggatatacctttttactcatttgtaaacttccacccttagtggttattgaactcatctctgtagttccagaaactggtcctaaaactactatattgtctacttttatagtagtttcatcacttgtgttttcatttttcttccactgagaatataatgtaatatctttagttatttttattctatcatcatactcgtagcttgtaccatcgccatcactttttgtattccattcaatgaaagtatacccatttttaactggtttatataaagtaagcattgtatcttcatcaacagtttttgtcctaagtaactcatcatcatcgtcctcagcctcaggatctttaaacttaactttatattgtttttttacttcctttgaagggtctgtaggaatatcctttgacatttttgagtcctcatcaattatttgatttggtacatatggaagtgtattatttccataataatcaaaacttttagtcggtattggataatcatttcctatacaagctccactatcatcaaggttatagatccttccatttataatagaagttcccttctgcattgcaccgttttctgaaaatatataaatctttccttctatttgaattacacctgtttgcattactccacttagatcagtataataccactctccgttgtcaagaatccatccagttctcattaatccataagaatcaaagtaataccaaattccgtttatttgcttccatcctccattagcataaccatacatatctgcataactccaactcccatcatagttttcaatccatgcagctaaagactttactggaactacagtaattaatgatgaaatagcaagacttactgcaatagatttccttaaatattcatacttcacaattaagttctcccccttatctttcctaattatttggtcaagtcataaaactacaacttgaccatttttcctttagtattttatacactctttaactatttggatttattattattgtttttgtaactgatattcctgatccatcatcaagagttgcttttatattaacgctgccttgttttaaagctgttaaatctgctgttaaatctccagttgaattaatagtcgcaagatccgtatttgttccgtctatattacttacagaccataccacttttttacctactacactagttggaatcatatctgacttaaattttactgtgtttccaacagctactggtgtgccacttaattgatttattgtaattccagatgctgcatttattgttacaactgactgcccgacaattccagacccatctgttgcagtcgcatttacagtaactgttccatttgatactgcagttaaaatcccgttgctatcaattgttgcttttcctgttgcaggagttactgaccaagctattgttttattaactgcatctgttggccctaccgttgctaacatttgcaacgtaccatttggaataactattgtggaaatatttcctgttcctgccacagttattgttcctactttaccacttatagttataggaagacttcccacaacttttgatccatctgttgcagttgcatttacagtaaccgttccatttgatactgcagttaatagcccattgctatcaattgttgctttccctgttccaggcgttactgaccaagtcacacttttactagttgcccctgttggttcaaaacttgcagtcatttttaatgttccgccatccgctatttcatttccacttccatctggcgcattaactgtaattttagtaattttaacttgtggaattacttttactgttatatatttgctaattccttttccattatctgcagtagctatcaccttaacatctccagaagatactcctgttaataatcctgaagaggtaattgttgctgttcccgttccattggaaacagaccagttcactattttatatgttgcattattgggatctacactagcgctcatctgcaatgttccaccaaccactacttctggagcttcatcaggacttattattatgtctgttacatttgtaatttgtccagctattcttacagttgcacttccaattgcggttgtgccatctgcatttattacacttgcttttactgtaactgttccattagtcactcctcttatatttatagaacttcctactgttccaccttcaatcttagcacttccgccatcacttccactaataacttcccaatttacagcttctgattttgtggtagcataacttggcaataaactagctatcaattcaagtgttccatcatcttctggtattgataaagccactccatcctttgttgctatattaatcttggttgcagctatattactatctatgccacttatagtgacttcaatagtaccactaataccagatccatcagtagcgatcgcttttactgttacttttccatttgattttggagttaattcaccagtattggcatcaattgtagcacttcctgtgttattctcaacagaccatgctaccgcaccattagttggattttttggtaatacagttttattcatggttacttttccagttcctgttactgaatctggtccatctatagtaattttagaaaccttaattttttgaccaattatagtaacatctttagttgcaactactccactaccatccaatgcttctgcttgtacagttactggtgttccatttgtatttgttaccgcctttaaaagtccagttgaactattaattgtggctttgtcttctccagacttaatcgaccattttactgatttgttagttgcagtagttggagttatatttaagttcaattgtaatgttccaccatcttctgtaattgcaaaatcagttttagttgtagtaatctccatatcggttaccaatatctttgtactttgtccgcttatcgttactgtcatacttccaacaacattattatttgaagttgcttttactgtaactgttccattagatattgcctttaaaagcccagttgaagaatcaatagatgcgcttcctgtattattttgaacttcccaagttacaccctgattgcttgcatcttctggagacacacttgccttcatttgaagagttcctccatcagttgttattgttgattctcctgattgaccacttactgtaaccttacttactggaaccactacatctgtgtttgtaactgtaactacctttgttccacttacatcagagccgtcctttgcagttgccttcaccataactgtaccagctgatactccagtcaatactccattgctatcaatagttgcttttccagtttcatcagaaacagaccatgtcacatctgcattagtaacattacttggtgatacttctgctgtcattgtaactgatttatttacagtaacatttgagtttccttttatattaatatcttctacataaactgatgtatcttctttccattgtgcatataatattatatcttcttctacttttatactatcatctgcatcgtagctctttccagatccattgcttttagcattccatcctgcaaaaatacgtccatccttagttggcttatataagtcaaatgacttaccatatttaacagttttagttttaagctctgatccatctgaatctttaagtaaaactttaaagcttcttccttcatttggattgtcatccgattcagttttatcctcaataacttcattaaatttcgagtcagttggagaggtaattaccttattgtcagtattcttcaatacctgaatgcaatttcctgaatcatcatactctttttctggagttggcattttagttccaacgacttctccatcataaccaatagtgtaaaactctccatttataactgtattatttgtctttatcgctccgttatcgtcaaaaatataaacttttcctgagatattaacaattcctgtttgaattacaccacttgaatctgcataataccatttcttattataattaatccacccagttttcagtgctccatcattttgcaagaagtaccatgaagagcctgctttgatccatcctgtttgcattttcccatttccatcaaaataatatatctgtccgtcaatcctcttccatcctgtaactttttgattatcttgcatataataaaaattcccttgataatcatttacccattcggctgaagcccttaatggaattagagtgaataatgtcatagaaatggtaattgctgaaattattttatttataaacttccatttcatcaaatctacccctatcttatatttttcatagtaccttatattaaaaagtacttttgtcttaccataattcaaacaactattataataaaatttaacagagataatatgtacttttgaacaattgaattcttatcacacaattatccaaataatattcctgaatttatcttattactctatttattatcgaagcttttttgaataactatatagatataataccattttacattaaatatcccatattgagtataatttaaaaatctaaggaggaaggttgccgtcttcccccttagatttaattcatgacttcaattaatataaggttccatctgaaccaaacacatattttgttccatctatatatcttgatcccgttaccatttctccattaatattaaaataatagtttttaccatcaataactacccattcattttttttcattacacccgtaccttcatctaaataataccaattattcttagaataaatccatcctgttttcattgagccatcatcatttgaataataccaatttccattagctctaaaccaacctatctgcatttctcctgatgtattcttaaaatagtaccagttactgcccaagttaagccaatcactagccgcctgtccattatcttttaaataataccatttttcattagacgatttccaagttgaagttgacattgatccatcattattaaaataataccagtactcatcaactttaaaccaatcctttaccatcttcccatcagcttttaagtaataatatttaccattataattgacccactccatctttttaacggctccatcttcaccaacataataccaatcatcaccatcttgtacccattggttaaacagttcacagccctttttcttatcgaagtagcacttcttaccatctacaatctgccaacctgtttccatggccccatcaattctattaaaataatatatttttccatttatcttttgtacaccttttaaactaactccatctttatcataataatatatatatccatcatgttttccccagcctttatcattatcatacctatcaaacactttatcccaagcatcatcaacatcattattcttatctttaagagcatcagtaagatcatctaaggagtcatttatgtcatttatcccatcacttattccatctatagttttatcaaactcatttttacctttatctatcaagccgccaatttgagtatttatatctggaatcatattgtatgtcccactttttatcattccctttatcttatccccaacattacctagattaactccatcaatcatcttatctaataaattcttttcgtaatctccaactacaacagcatatttataacttttatttgctgtgatatctccgtttttagttaatgataagcttaaaatagagaatttagttccatctatatccaaaggaaaacttaagctgccactcaaattagtaacaccattaaaatcaataatatttaaatctttatttattttatctgaatctccctgttttgcctttaacatattataaattgggttattaattacatataccttgttgtttacggaatcaataacattgatactcataccatcaccaataactttagaaccattatctaaattaattacttttgaataagccgttgtacctactgctggattaaatgtcaatgaaggaactatatcaatgctgctgtaagatgcattcctcacattagcactataagtatttacgcaatatgcgccatttcctaccacagtattaactattgatcccactaacccctttaccacaaaggcctgagctataacatcacctgaattatttttcccagtatactgatatatagggatattctgaaatctgctcttaatagcacttggtaatgctgcttgtaagtttttctccactataggttcgattacgtttttaagcgtttcctctggtatagtacctcctgtagccgattctgccttcgatacaactgcatttgttattggatctttcaaaacctcataaacttgtgctgaaatttcatcaactagcgaacccgacagattgtacgataacttgccacattcctcattgtcgattgactttgctcctttgctgctaaacatcaattttactccattttctaactgagggtttatagttgtgttttcagccattcctataagagtatctccatcaggaaccattgatcctatatcaattccagaaagagccacattattagtttggggattcaaaattattttcgaaatatcgttagtctctgctttaactggagtactaaaaacactatttggtattgtagctataatacttgtcccaattaatataagtgctaatattttattaattcttcttatcatgccaatcgcctccaaaatatctatatatattatatcatttatactgatgagtttaaatattctaacaatatatagatatttttaatgtgcattatatgatgtaaaattcattagccaaatagctctaattacataattaatgatataactatgtttacgaatttagttataaatatccgcataaaaataaccatatcgtgatataaaaattatatctttgatatagttattctaaaactctttaattaatttattctttaaatatttattattattattttaatttaaatttttgtactaattcagttaaatgcattgctatctgagcttgctgagttgctgcattggctacttgcgatatagctgctgaactagtctctatttctgattgtattttctcactatttacagaagatttttgaacatctgccgctgtactttgaagtgcttcatttatctgctcaactgtagcttcaacctcttgagccattgatactagttcctctgacattgagcttacaaaatcaccatcattactatacttttctccaatcttagcataatcctgtaactgcttattaacttcactcgacataaagttaagtatatcattactgttatctgaaagatttttaactgcatcctgtatcttagatattgtatcttggattgtaaaaacagtttgggaagattcctctgcaagttttctaatttcttctgcaacaaccgcaaaaccttttcctgattctcctgctctagccgcttctattgctgcatttagtgccaaaagattagtttgctccgcaatatcagctatagccccagccataactttaacttcctcaacaactcttgcatcttcaattgcctttattatatccttttctttttgttctcttatttgtgttgtatttgcaatagcaattttactatcttccttaactttttcagctcttcttttaatcttctcagcatttgtacttccatcggctgctttatttgccaagctttccatgctggaattaacttcttcaatagaagcagcaatctcttctgccgttgcacttgtttccgtcattgtaacatttatatttttggatgaattatcaacttcatcaagcttggctgatacttcttctacattcgcagatagttcctgacttaatccactcatattacaagcttcatttaaaatagttgaaataagattttttacattctcctgagcaatattcagttcccttgcagtagctccaatttcatcatatttagttatttcaacaccttctgaaaaatcatagcttgccaacttcatagcaaatttctgaagagtatttagtcttgaaattatatttttatgcatataaaacccagcaaaaattgctgcaattatacttatgatacataccactacagttgtcgtaatatctcttgccaatgtatctccattagcaataccattttttatatcactaagctgcttaaaattcactattcctgatataaataccaaaatagacataattacatacgaaacttgaagtttaacctttagtgatacattttttttctctttattcattttgtctcctcctatatgtacctttcaatctaattgcattcatttataaaatattttaataaatgtattcatatttatagatggtgattgactatcctacacaattttatgatatcattattttttcctacattcaactaatacaaacataactctacaattataacattatttggacatatatataaattttagcttatcctttgtacaaaaataaaagtgatatcctatcataagatatcacttctattcttaattatgcattattcaaatttatccattgcccgtcaaggaaaagcattccagtcttcataactccacccgcatcgaagtaataattctttccatttatattcttccatccagttatcattattccactatcatctaaatagtaccatgactttccattatataaccatcctgtcctcatactaccatcatcattcaagtagtacttatttctatcataggtcacccaacctttttgcattaccccatgatcatccataaggtaccatttacccttatattgtgcccaagctgtttgcatttctccaaagttattaaagtaataccattttccatcgtaagtagcccatgtattaaccctcatagctccattagcttcaaggtaataccaatatcctttgtcataaaaccaacctgtttgcataataccatctttatttaaatagtaccaattaccagaatcctgtatccatccagtttgcatatacccgtttatgtctaggaaataccattgattgtcatacttaacccactgatttttaatttgcataccagctgcattatagaatgtccaatttcctccaacaagtacccactggttagttccttctatatctcctctaattacacttagcttataagtagtcgttgtttttccatcttcagcagttacttcaacaactacaagatttgctcctatatcaagttttatgtaatcagattgtccattagtatactctttaccatttatcttaatctttgctttgtcattttgtgaagtatacataactcttactttttcaatatttctagcaactttaacactgtatagataagtctcaggatcaaattttggtgacattgttccgtctgttacagaaagactcgctaaattcacattgtcttttggatatcttcttgtaatatttaatacatatgtattgctatttcctttagaatctgtaacttttacatttatagtatttccaccttcatccaagcttatataaggtgaagttgcgccgctaggtactttctttccattaaccgtaattgtcgcattaacatcctctgctgttggagtaacccctattgatgtaacactattatcgacggttcctgaatattcatatattcctttattaaaagcaggagttagagttcctgatgtcagtgtcaacccagtaagctgagaacttctaaataaagctgtacgggtaactttaatattatatgtacttgtatcaccatccttagttgtaaggataacttcaacatcattttctccttcatctagctttatgctttggctcttacttccactttttacagtcacaccattgactttaatagtagatgaattatctacagctattggtgtaaatgcaattgttgtttgagtagttgttacttgaactgtatagtcatacgtatttgaattgaatgctggagataaagtacctgctgacggcactaatgactgtaattttgcctctccttttttagttataatcaacttatattgtctagagatattttgggttgtcacacctatacttataacattatctccaccagttaagtttacagtcgcctctgcagcactactaccgccattaatagaaaaattcattggcgtattattattgtcaaacaactgaactttcgccattttaacatcagaatttatatcagaaatatgatagtttccatttgcatctgtttgtgtaaaaaataaattataagttattttaccatctaatgtaacccttaaactttgaaatgaaagagaagaatccgcttcgaatttcattcttatcggataggtaacttgttttcctgagctatctttcataaccaccgtaagtgtaaaatcgctataatcagttattgtatttactacataatcatttcctccacttgagtttgctactggcttaacattcataaaacttgagctactttggacacttacaatagaataaccagaatcagctaccaaagtgaaattttgacctattggaagaaactcacatacatatccatctttctcgtttccatcaatatttttagtttttccgttcacatctcctatgtgaaattgcagaccttttatttgagtttcatcagttgcactagctttctgcaaatttactgtctgcataagtgtaaaaaatacagtaaaaattaataaataagaagtaatcttattaagattgattttttttgcactcattagtatgtcctcccatcttatgtttacgaaatttattatcatccatttctaatgtatttaaacaccagaaacagcatattcaagttcataaagtatataatctattactatatttattatcgaattttcctaaagtttctttaactaaataaacatagatatgttgcctttattcgtacttatttcctctataatatacaaatttccttggaaatattggttcctttttgacttttattctaatatgttctgtatttcctactataatgttacacaaaacttgcttttttcaaataattaaaagtcagatttagatatggtaattacccaaaattcacggaaccatcattattaaaattatatatatatccatcaatttctgcaggactagtcctcatagcaccatcctcattaaaatagtagtacttgtcatctttataaagccatccacacctcatattacccgcgtaattcaaataataccagttatttttccaatatacccattctccagctttcatgctgccatcagcatttagaaaataccattgattattttcatttacccatccagtattcatggcgcccgattgatctagataataccactgttttccataatatatccaccctgttctcatactaccgttacgctccatgaaataccaagttccattactggttatccatcctgttgccatcgtgccatcgtctttcaagaaataccacttatcattatctttaatccaaccagttttcattacaccattattatctaaaaagtaccattcatttttataatataaccatccagtttgcatttctccatttgcctccagatagtaccacttatcgtcatcttccatccaacctgtttgcatatttcctctactgttgaaataaaaataacttttatatttattatcataataccaagtattcttcaaacatttacccgcagtatcattgtacctccatcttccatttactatcacccattgattcggctttattactgcattaattgtatccttaacattaggtgttactggaatacctaagtacatatttaaagtataattcccaattctttgagtatcatcatccttaacccctagattaatagtatattttcctataccattaaacttaacctttatagaatcattgcttaattgctttccattggctgtcattgaatagtttccatcatctggagttgcctgaagttccattatatctgttccttcatctaactctatattataaaaattggtgtttttatcaaatccaatattactatcatttatattgatatcctttagataaacagcatcttttcctcccttataaatatacacattataggtagatgttgcatcgctcctattatctaagacttctatttctatcttatttttaccttttactaaaggtacgacttttctataactatcatctctagttactatctctccatcaaccttaaccgtatctagtaaatcatacggtttagccttaattaatacttgatcaatatcattaccaacatctgtgacatatgagtatttatcttctgaaaaatcgagatttcctccatcacttaaataaatatcttttaaagaaggattatcttgttctgcataaacctttgtcataagcaaattcaaagagcttgtctgtaaaaatgaaacgctataaatgataaaaaatgttaaaattatccttctgaccattttactcatattctgccccccttttgtcaccacttaatatttctaaactaaatctctatatttaatatataaatatagtataaattctacagatactcacttctatatgtatattaataaactgcgaatccaatatgattaattctatttttatatttcttctaataataatgttaccattataatactttactgtaaacgcggatgaataatcttaaatcttaattttatattaattttattttaacactttagtaaaaatactatttaatgataccacaaaaaaactgctcataacgatttaaataaatcattatgaacagtcttaatttccttatatttatgttgaataaagaaattattcaacaataaatttttatctttagtattctgttgtagtaagtccaaatttataatttggacctctacttattttaatttattacttaatccaagctcctgatgctcctaatttatatccatcaacagttgtgttagctaacattgctcctgatgaatttaagaaataccaagttccattatcatttaaccaaccagtagacattgctcctgatgattgtaagtagtaccaagttccgttatcatttaaccaaccagttttcattgctcctgatgattgtaaatagtaccaagttgatccatcttgaatccaaccagttgccatagttccatcagctttgatgtagtaccaaactccaccatcgttaacccattgtccttttacttgagttccatcagtattgtagaatgtccaacctgcatcagtcttaacccatcctttatttacaactggagtaggatctgttggtgttgttgtaccttttccaccgattactgagtaaacatcatcttctttactccaagctacaatattatctttgttatatactgacatttgatcaaaagaaccgtctactttgtacacttttgtccaatcttcgtcgttattccactcgtagatatatccagcatctaatctccaaagatttccatctgcatctgtatcaacagcactcttactaccattttcttttacatcttcgcttgcttcatcgcctaaatcaacatagtaataaccattctttgaacttaatgttcctgtagcagtttttacatttgtaccattagcagtataaccaactaattttccattagcaacagtatagttatcataaacaaaatcttcactctttccgtcttcatcagaaattatataagtatttactgattttgcatatttagctccatcgatatcacctgaagcttgtgcttttgatattttttgaatgacattgaagcttacacttccagatactgttgtatcaaaagtctttgcatcaacagaaacatctattccatttattttagctattgtagatccattcttaactgttacagtaacttttgctattctataaatattattagtatcttgtccaattactttagcgttatcactatcaacacttgctgataattgatcttttacagtttcaccagcagcatcatatgtatcatctgtattgcttatagttgctgttttattagtagttccagatgcagcagttgtagttactttgattgatcctaagttataatcggcatcaatatagtttccttgagcatcagtatatacatttaatttagtgtttgtaccatttgttgcattgtcttttgtatattggaatttataccaaggagctgaaaatttgtttcctgcgatttctgcatcagataaatcttgcattgtttcggcttcgcttgaaacatatcttttatcattatcctttttaagattttttcttaaagctgatgcagcatcatcttctgcattttcttttatagattcatcagttactgaaccattatctaagtcgacaaaatagtcaccatcttgtacatttaaatatttagatccataaatatcagtatctgctccactatcaatatccgataaattattgtatttaccttctgctaaataataagctgcttcgtctttgtcattaacttctccgtcaacatagaacttaccatctttgtatgctactgcatcatagatagtaccttcttgtgaatcgatttttgtgtagtcagctgcatgtgcaggtactattgaaataatagcagctgcagctactagtaacgatgttgctttagtcattctttttatcatttgtatattcctcctagagtttcattttttggtttattaataatttattagtttaaaaataatatcttggttaaaaaatattattttggtttacgaatattattatagcaactttatttatgcttgtctacgtctttttgtatttatttggagctttttgtcgatatttttttaataaaatattagtacttgctgaattttattcttttattgtaaatatacatacttaactgtaaaattaaggaccagatttctataagatttacttaataaaataccaatatttgagcgcaattatatcaatctccaattaattatcttcatatatacgttacctgattgtaattaatatattaacataagcattatatatgaaaacaggctacaaaagcttgactttaaagctttcctttaggatgctaaaaactttacccgtatttctattataattgaatttccttaacaattcctgaatcattttaaattataagctgaaaaatcatggaattgatgtagtataaattcattaattccactttgctataatgaaatgcaaaattcgacatatagttttctactttataatatcttatacttgtaggcgtccatgaatcctaattcattaagacattatataaaacatcctttaaagtatctaagaaaaatactttcatcaataaaatcatgattctaatttctaaatacaatactcaattgatgaagaaaccttatttaaagcagaaaagactatcttttaggcatgccaataaaaaatataggttatgcgcctaccccgtactaagtgcataacctatatttataatttctattaaatatatgaacttaaagttttagaaaatttgtaaatatacttatctaataagttaaccctttatatttgatatctatatatgtaactaaacttttcactttatttcattaccatctataagaaagtaaatgatccagctaccttcttattaataaatactgctaatagcttcgaggctattttacttttattttctttactccctccttaatgattctactggatccaaccttgcagctttatttgctggtagtaaacctgctaatgtacttattacaatacttacggtaactccaagtattgcgtattctctttttattaaaaccacacttactgcaaatagtttatttgacatgagatttattcctctcatgataaaatatgcacctattaaacctattgcgccgctaaaaaatcctattaaaaaagcttctgaaacaaaaattctacgtatgtcttttgctctggctccaattgcttttattattcctatttctttagttctttctacaacacttatgtacataacaactattatcataatcgctgatacaattaaagatattgctgcaattcctgatagtacatatgttaatatatctatcatttgattaaacatagatgccatttgttcctgagatgactgtgaataaccaagttcattaaccttttgtttaatttgaggggtatatttgctatttgttgtgttaacataaaccacattaggcttcaatttatagccgtcatctgaatataacttttctaaatcagcataatttaaaaaagcagatttcatatttgcagttaaatctccacttgttgttgtataaacaccacttacaataaaatccctatttaaaatcttttgatttgcaagcatgcgtaaattcactttttgcccgataatatctttccccaaattatcgcttaatgctttattaattaatacttccccatctttaggtaatgttccagtttcaacattagccgccgttatatttgaagatattgttgaaacattcatcaaattattagttttattattgtatactaatgaatttgctccaagagaaattatactatatcctctttccacagaagatacattttctatttttgataatgtatcaatatcactttcttcaaatggtttagtagaattaacatccggtttctggactgttgttacatctaaatttatattctcatcttcttcactaggcatattaacttctattactaatgggtttacataattattcatggtcttattaaaataagatttcactccattgcctaaggacagcattaaaattatgctcattattcctatactgcctcccacagaaacaaggatattacgaggaagtttttctttcatattaacaagtgctaattttgcagatgatattaaactaagattttgcttttgctttccaatattatcttgtttttctatattaacttcattatctaattctatgaccttgttatcatcaattatttctccatctgatattttaattattctacttgaagcagatgctactctttcagaatgagtaaccataattactagctttccctttctagaaatatccttcattatttctaaaacttgaattgtagtttttgaatctagactacctgtaggttcatcagcaataattattttaggattatttattaaagctctagctattgcaactctttgcttctgaccacctgataattgacttggtttcttatttatatgattctctaaacctaaatctcttaatatttcttttgcacgttttaatctttctttttttctaacattagatagtgtcattgcaattgtaacattatctaaaacagatagatgaccaattaaattaaaactttgaaaaataaatccaacttcattttttctatatttatcaagctcttttcttcttaactttttaatatctttttcatttacaagtaattctcctgaaaaatcagaatctaatccaccaattaaattcattagtgtagatttaccactacctgactctcctataatagaaactaattctccagcattaaaagatagattaatatcattcaatacatgaaatttgtcattatcttttaatctataatacttattaatatttctcaactctaataaagccatttttcgtatactccttgttgattttataactatatataaccaaactaagacctgaacttatgcgtatacttcgccgaaatcataaatattttgattccgaaaagctatgaaaatatcgctgaaggttctaagcagcaggttgtatccactttagcatgctccaactttcagtttgacaagctaaaatggaacaacctacagctaagaacctttaacagctcattttcaaatgttttctccacaaatatatttataatttctagtgaagatacaaacttaaagttttagcaactttgtaaatatgttcatgtaataggtctaattcttaattgagttatctatggataaacaataatttaaattctattttctcaaaattatctttttcaatagtctatattcttttgttatgtataatcctatagcgtaagttatagttccaataataaatttaaatattgcacttactaacatattgtttattactattttgcttattaatatatatcctccaaccattaatacaccgataataagaatgttttttaattgtaataaaaatgaaataaagcttttttcaaatacatgcgttataagtacatagaaacattggataaagtttaatataaatgctataactaatcctaacgataatataattaaacttctattcattatccctgtaactattgcacttacagtgaatattgctgatactactcccgtagaaaataatttattaacatacccagtggcttgaaatattgatccaatacttgataataccatttgtatcacaattgtcactgataatattctaaatattggtattgatgcatcccaattagtaccatacattatgcgtattatttcatttgcagaaaagaagcaatatacgcttataaaaattcctaaataagcaagaacttttataacttttatatatgtttcataaattatatccttttgattctgatattcagataatactggatgcaatacaggcgttattacgtttgttaaattttgtactggataaagcataagcttatatgatttatcataataccctaaagttgatgcgcccaagaacttaccaattaatatgttatctaaattcctcgtaaaatagtttataaaattaaataggaattgaaagcttgagtaattctttatcttttttatagaaccatatgaataacctttacttatttttaatttacatgccataaaacacaatacaaaaataaataaactttttaatatagaatcaaaaactaatgaataataagagaatcctttaaaggcaagagatattgtcaaagttccaactattacatttacaattatatttattattcctacttgtttaaatttttgagctttatataatatagcatttggtactatattacatatagaaaataacacagaaaaagataataatcctcccaatcttatatatatcttatcattataaaaataagctataaaataagaaaaaaagtaaaatccaattgctataactatagatccaattatcgaaaacttaaatatatctgaaatctcattttcatctaaagatttattttgtattatagcgggtcctatccccatatcaccaagcatattgaaaaatgatataaatacagttattactgcaattataccaaaatctgctggcatcaataacctagctaacactgaatttataattaactgtgcaaatatattgctatatttagatatgaacgtaatcattattccactttttaaatttgaatactctctcatgattcctccggttataactacctacaccatacatctattatttttctataatttgaatccactgtttaataatattatctatcttaaaatctttagctctttttacagattctaatgacatacttgttcttttctcatcattttctattaacgatataatctcatcagcgaatttgttaatattataatccccaactaaaactccatttatgttaggcttgcttattatttctttaggaccagaattatcaaaagccactactggcaatccgcattccattgcttctgtgatagctaatccaaagccttcccatcttgaagttgaaacaaaaattgaagattccaaataatgatctttaacattatcacattgaccaagcaatattacattattttttagattatacttttcaatatgatttatcagactttctctatcaggaccttctccaactatttttaaaatccaatcacttttctttttgtgaattatattaaaaatttcaataagaagatccaaacccttttgcttctctaacaatcttccaacaaaaattatactttttttatcacacgaagattttttattgcattcaaaacttaaagggttataaatcaccttacaatctatccctaacttttcttcatatttaatcttgtcatcataagttaaaactacattgcaatttaattttggtatatatcttttaaacaactcgtcttgcttccaataatatttacctttattatttaagtacgcatcataagaattatgcatccatcctatagttttaccaattaacttatcacttattttcccaagaactatactataataaccttctacacctatgataacatcataatttcttgtatttagatactttataaatctgtcttgaacttcattaggacaatatccataaagcaataaatcactcataacagaattgtttaaaattccagttatagaattcacctctctagaaatcttacagataactttgttagtaaacttcttatgtaacagccccgaattaaactttatacttacattagaattcaaattatacatttctctattaactttaaaagttctatctgtacaaattacatctactttattatttttacttaattcactagctaaaacagatactactctttgaactcctcccaaattaaaaattgtagtagttataaaacatattttcataatttctccttataaggcacattacctattttttattttcttcaaaactggatataaaccgcaattccataaaaatagctttaacttatcgtctttagatatttcctttaaaaataaaaaatctttatttttcacacttaattcatcatatttacttttcttaaaactttttagattattcccctcatgtgcattagtataatgggctataaaatgagataatactttgattctaaaaatgtttaagcttttcttatctacttttatatttttatcttctatataatttataatactgctcatagcaaaatagtaatcttctgcgagcttagcatttttcttatgaactgttgatgttgctctttgtctatagtaatacaatggtttatctataaaagctattcccttgctagaatgtattgctttaaaaactggaaatgcatcctgaatatatctatgaggttcaaacttaaacttaatctgttttaataattcagttctaaaaaacttattccatagttgaccttgcaattcataattcaacataaggttcataacctcataattgttatatatttttcttggatctactctatatttctcaatatagtttctgctatctttttcatcataatatacgtaatattcacttattactatgtcaacattaactttttctgctctattatacatattctcaagcatatctaattctaaaaaatcatctggatcaatatatatagtatattcaccttttatataatcaaatgctgtgtttctagcaacagatacaccttgatttttttgatacaatatagtgaagtcttcaaatttatcttcataatctttaactatatccatagttttgtctgttgatccatcatcaacaatcaatatttgcaaatctttatacgtctgcattaaaagactatctaaacattctttaatatactcttcaacattataaactggaataataatacttatcatatatttgttctccttgaaccactaagatattctatactaaattatttattaccacttttttgattattatcagcattcatatataagttttccaagtttcttgatattgctctagcgctaaaacctgacttcataatatcttcagaggtatcctttctactatatccatctttatatttcagaattatctttgcccattcctctggtggactatctaaagaaacagatttccaataatgagttatctttatttcattacttatagcatcagaggctacagccatcaatgctgctgcttgaacttctatcccaaccactggaagaccctcataatgagatggaaaaacaaatatatccgacgcttgtagaatgttatgaatttcattacaaagtccataaaatattactttatcctctaaattcagtgatctaaccttatcctcaatcttttcttttaattctccctctccaattagcaatagcactgaattactatattgcttattcacagaattaaaaatatctattaagaaatcatggtttttttgatagctaaagcgccctacatgagttaatacaaatttgtcttccaaatttaattttcttctatattcttttcttatcccttcattataaataaactttttttcatcaataccattatttataaccttagccttttcatctcttacatcttccttagagaacatccattgtgccgcattagttgagcatgcaaattcataattaactacatatttccaaagacttcttataatgttctgtattcctaaatgtaaatgataaaacctcttatctctacttattctatcattatgtgaatgcataataattgtaggtgttttacatattttaaaaacaactgcttcaaaaaagctttttgcacgatcgccgtgtatatgtactactgagtattttttatctttttgcaatctatataaatctataaaagatttcagccttttaatcccattatttttttctaaacatattatttgtccacccattttctcaacactttcatcatagaattcagtttcttctttattcttatatactacataatcaaacttaactttatttaaatgcatatttctatttatatttaatataaaggcttgaattcctccagctcctaatgaatccacaacttggagaactcttaacgttttattttccataacaaccttccttcatctgatatcaggcactataatcatcattcacatatatgaaatttcgctttctaagattcatgagtaaattcttctcatgaaatcactcttcacttatgaatagataattaatttttatcttattctatactagcagtagcacattcttgcgaatcactgtctataatgttgtttcctagatacgtagcaatcacagcaaaagtaaagcagcctgttacatccgtaaatatagcttctgcagtagatgctattaaaatatataatagcagcaaaaatgccgctgattgaatttctctattatactgatatcttttctgtattgatttaaatatattcaatataatccataaaaatataattaaacccaaaaagccaaattgaccatatacataaggccaaaaagtatcaccaatatacgaatgagcggtttcctctaatccactaactacatttattccatattcataatatataggcgaataataatctccggatatttctgatgcaaaggttccaaaaccacttccaaaaggtatatatttgcaagctagtttataacctactataaatagcgctggccgagcagctgtaagataatatgatgcatattccattattttgttatacgtcgagaagattcctatgacagcaagtatcaatatatatcttatttttatagatttagcatatttcataactaatttcataaagaaatatcctaatatgaatacaaatgctttatttcttaatgtaaaaaacaatatagctattgattcaaaaataataaaattatcaaactttcttctattatcacttaatattacacataaaaatattacaattgctgaaaccaaatatgttggatgctgatatagaaatttataacttctcattccatatcttatatctgatgccattcctatatcatgaattatatttaaaattaaaaaagtaaatattatatttacgtaaattcttgatctttttgctaccttttctaacaacaaatctttatctatattatttgatacaattagcgtaaatgtgtaacagactacaaatttacttatagctaaaatatctttatatatagcaatcttctctggttgaattttatgcattacgtttcctgctactcctacaagcagcaaacaagaaaataaaattatagatttgacttcactagaatacatgcttattttattttttccattaaatatataaaaaactgatagaattatcagcataaatgtgaatagctcatcaatataccccaattgtggaatatacgcaattagacaattttgaaagataaaaatgtcaaataatacattcaaaacgaaaagcatctgttactcccttcttaggtataatcaaaaaataacaaatccatctgctatgcctatttcccattatgctatgttagcagattacccttatagcccgctatgagaccaatctgcttccttgcctaacgaaaaataatcatagcattttggacttgttgttttctttcatcttcctaaatttaaagttctatatatagattacccaaaagttgaaattatatattcatctttggataaatataaagaaaataacagattaaagagatgatatatatcatctaatagataagattttgattgtggttacagttctttaataagtttaacaggaactccaccgtaaacccctttattaacaatgtttttagttacaactgaattggcagcgacaatcactttgtcgcatatatttaccccacgtgtaatagtagaattgcatccaatccaaatattattacctatatttatttctttagtattatatccttgagatattattggcttatcgctaatatcatagcgatggtcatgatcaaaaatccctatattaggtccaaatagacaatctgatccgatacttattttttctaaagatactactttattattagtattaaaaaatgtattctctccaacataaatacttccatttatacattcgaagctgcaataatcttcgatataaacattattgccaagagataatacatttcctttacttattcttatttttacacctttacctatataaagtgattttaaattcttaattttaaactcaattctattactatatcttatttttaatacaataattctcattaatgatcttaaatacttaatgccttttccaatcatcatttatctcacctaacttaaattataatcaaaaaaataacaaatccatctaccaatcctgttttccattatagagggaactcgacttgttacgctccatgagtaagcgattcacaccaaatcatagatttgggttctcttcttaccagcagattttactaatagactcgctatgagttcaatctgcttcttcacataatgaaaaataatcatgacattttggactcattattttctttcatggcttaaaatttctttatattctttaagatgtaatttaaaatatatctctttattgaatttagtattgaaaatttcaaagcaattacccttcatataagaatatttttcttcatcttcatataattcaagtattttttctttaaagctttcaatatctttagcctctactaaatacccattatatccgttttctatttcttcatttgttccatctatattggtagctacaactggaaccccttgtgaaaatgcttctagtggagttagaggtaaaccttctatataggaacatagtaataatacatctatatattttagatattctataatgttatccttagcccctagcggataaatataatcttctagttgctctttccttataagttctttaatattacttagctctggtccatcacctattaatacaaactttattttttcattttctaatgcagtactttttgcgatagaaataaaatcatagattcctttgtaatctactattctacttacctgagctgctataaagtatccttttttctttagctctaaaagcttatcatcaacttctttactatcatgctcagtttctacagtattatatatagtttttatattcttttcttctaaaccagccttttcaattaaaattcttttagctgcttcacttacagttattgttttaatgccttttaaagatacattcgttaacttaaacttatcttctatacataaatgttgagtatgtattactttaactttagtaattttcgatattaatttagctaataatgttgtcattctatgatgactatgaattatatctatattttcctttttcaccatcttatatatggctattaagttatttaatataatatcgggattcttggaatctgtatttaaaatattgtagtgtttaactcccattttttctaaatccttagttaattcaccgcccatacttgcaactataactttgttactgctattgaataacttacatagttgaataatacatttctcaactcctccaaggcccatacctctgttaagatataatatattcatcaataatctcctttatttatgaatgctgctctacattatctggccgattacattatcaaactttctaatgaagtcatttttattagaactatatgtattacattttgccgataattctttataattacttattacgctacataaatcttctatatcatatactccaatgatctttgaatttttatctaatcttttggtaaaaagtatttgatgatcatcaacatgttcatcaaactctggatctcttggcactacaattggaaccttattatattggagaggatgaaatatacttcctggtcctccgtgagttatgattatatcactttttctcacatattcatccatttcatcatatccaatcattttcttgtattcataatttttaggctcataattacagtacccaatttgagcaaatacttcttctttaatatctccactttcaattaatttatccaattggataaataatctttccatgccttgttcatgtgttcctactgttacgaatatcaaaataatccctccaatacttgtcctcttgggtaaaacttcttttgttcttcccattgtaatataaataaatcgcttataggatagactatcttccccgttatagttggtttttctatcctatcatacacttcaatataaacaacttttgcaccgaataatttcccaatatagaaaaatggaattgcgggtgctgcaccagtgctgacaataagatctggtttttctttaagtaatatttttattgataaaaatgtatttttgattaaattttttatatttctatttgtaggaaagtagcaccaatattttttttcatctttaagtattgatttagaatcttccttttcaaaggttacccaaaatctctccttatctttccaccactcttttaattggattaaatgagttaagtgaccaccacttgatgttataaaacataccttcataatattctcctccttaaccatttaaaaatttaccatgccatggttaacattctttaatctataagctcagatggagttaccatgtccatctgaaaagtttcatttaattacccttgctatattaccattgctgtttttattttacttaaagctttttcttctaaattcaatacagattttcttccaattgaataataatctatttgtctttccttagcctctttaattttataacaatttctaccgtcaaatataattggagtatacataagcttttcatatacacttagatctaaagatttaatttcattccactctgtaaatatgaatgtcatatctgcatactttaaagcttcttctggagtacttacatatgttattccacttggatatacttttttgaaattctcaactccaactggatcatatgcaattatttcagcaccttcatctaataatcttcttacatttggtatagatggagcttctcttaaatcatctgttccaggcttaaatgttaatccaagcacagccacttttaatcctcttaaacttccaaatttattcttagcttgtctaaataatttatatttttgattttcatttacttctattgttgcttttattgtttttaattcatatccattatcatttgcaagccaatgaagtgcttttgtatccttaggaaaacatgatccgccatatccgattccagcatttaagaatttatcacctattcttggatcaaaactcattcctttagctacatcttcaacatctgctccaaccatttcgcagaagtttgctatttcattcataaatgatatcttaagtgctaaaaagtcgtttgatgcgtatttaaccatttctgcacttcttctattcgtaacaacaattggttgattatagccttcataaacctcttttaaaagttcttccgcttttttagattcaactcctattacaattctctttgcatataaagtatcgacaactgcggttccttgcgctaaaaattctgggtttgacgctacttctatttgaatattatttttaacattttcctttaaaaactcttcaattctatcattagttcctattggtactgttgatttaaccactactaaacaatctctttcagcattttcagcaatttgtctacatacattaaacacataatctaaatttgctgatccatcttctctttccggagttccaacccctatgaatatcaaatcagcatctttataagcatttttataatctattgtaaaatctaatctaccttcatcgtgatttctttttaaaagttcatctaatcctggttcatatattggtgaaattccttgtttcatcatttcaactttacttttatctatatcaacgcaagttacattatgtccaatttccgaaagacatgctccagtaactaaacctacgtatcctgttcctgctactactattttcatacttacctccatatattccgtaattctaattgattaaatttatttgctcccatattactcatagctttagagacaatagatttaaactcattctctcctctaatgcgccttattaaggcataatcaaaaaataatacgtccatatgcctaaagtcacttaacttgcatgcttgtctccaaacagcacaaaaaatgttttaaatattaacttaatatcaactaaagtatttctttcccttacatacttaatatctagtttcatccaatcttcaaaatcaatatcatttcttcctgatacctgccagtaacatgtcaaaccgggttttacttcaagccttgtcatcatccaattatcaaatttttctacttcttttggaagagatggtctaggtccgactaaactcatatcaccttttagaacattaaacaattgtggaagttcatctatgcttgtctttcttataaatttacctattttagttactcttggatcatccttcatcttaaacataggtccgctcatctcatttttatgacacagcttatcttttagctcttcggcattagcaaccatagatctaaatttatacattttaaatacattaccgtctttaccaatcctctcctgagagaaaattacagatccttttgattcaagcttaattaaaactccaacaatcaagaatattggacttaaaactaataacccaaatgacgaacaaagtatatctgtaattctcttaaaaaaataatatttacctctattttctactttctcttgaaacacaaattctctcttactaatttctacttgttgcattttatcaccatcctatcataattaattattagctaaatattttaacttttttaatatgtgttcactatggtaaataacaacatttaataattactgctttatgtaattagacctaaaccgacaatttattgcttttctctattctctgtattaaatatattacaacgaacctatagtaagtttcaacgcacaataaacgctatattaagcaataaaaaggttatttgctaatatagcgttttatgacaagtatttaatttattttcttttttatggcagtcctataatttaagaacttactcattcccccaagactcaatataaactccatacaaacttttaatttatataaaataaacaaaaattctatctattaacaattcgaatttacatgaacatatatttattcataaaaaatatatgatagtgttttatacagcttgtagatatccaattcataacctagctcccgctataaatactgaaagtgaaaacattactgtttccactttctaatattgtctttgttacaaagtataacttaattttctaaatttgatatctatattttaatatttattgaatttaattagctatcaattcaacattatcaatttgtaaatttgtccattccttgccatcttgtataaatgagattattaaagtgccattagtaacagtgacttgttgcgaaatttcaacataggaatccccatgtggaattttaaccgaagctgcctctcctccaaaacctgataattctaattgtgatgaggtaggatttccagtattttgtttaaccattgcctttatcgtataagttccattaggtaactcagttactttttgttgtaacatttgttttccctgaccccagaaataacatttatcatttccagcaaaagcatcttcatcattaactccaaatccatctggattagctgctacccagcctgttgtatcacctgtttcaaaatctccatttgttattttcccaacagattctggtatgttagatgaacttgcaccttcgccctgtttaataaccttagcttcctttgatacaacatttccgttctcatctaataactgaatatcatcaatttgtaaattagcttcaccatttaaagtagatataaagttaaaagctacatttaattttccatccttaacatctatagttccttctatttttctataattatcgccatgttttatattaactttttcagtcttatctccagaagttaattccatagctgcataatctggaatccctgtattttgttttaccatagccgttactgtatattttccattttttaatcctacaactgtttgatcaatctttttggtataaggcttgttatcatagaaatataacttattatttccagatgctgcatctgtggaatctaagccataacttcttccggatatattccagcccataaatccatcttcaaaacctggatttgttaattgaccttgaacgcctattatatcattattcttatcaatattctcagaacttaatttttttaaataaatcatatcccaatattccaaagatggtactgtaaattctatataatttcctttttcatcgtttccttttgaaaattctaaactttgtgatttacaatcattagcatcaggtgatgctaataaaacactttgaatatcttgggttacataatatttaaccttaaaattttctgctttaattggtttagatttcgatccatcagcagctctccaagtattatcaaaaacacctaaaagatttaccatttgaataacatcataatttgaatctttttttccgtaagtccatattttattagcttcacctatattactattctcataaccttcaacttggatttcattattactatttatttgtccatctcttaataagttttcataagcaactataaagtcataatattttctttcccttgcctttaactcttcatccataacaacatttttattggggaaatactctttggtaagcattcttgtatcatcgcccaactcaagtctagatccacctgctgcaaagactgaagcccctgttaatagcactgaggaagtattaaattttccaggcttttcttcactatgcttatctcccaagtcataattcatatatgccggcactattaatgatcttccttttgtctccgttcttgcttgatccacaatacctttcaaggaattatatgttataattccatcccaaggccatacttccgtatatgcaccacttacattactactatttacatcttcgtgccccttatttccaactggattaaataatatatatttgtcaggaaattctttcttagctgcatttataaaatctttaaaagtagttgtaattgatactggtgttccatctgctttatacactgttccaaaatcacctacagtatccatatgccatccatcaaaatcaaatgcttcaaaaacttccttttcccttgcaaagagataatcctgccattctttatttgatggatccataaagtaaagcgcatctgtttcccagccgctaggcattgccatggtccactgttctccatcagttccacttggatccttgtataatccccattcctttttcacaccatcattttcatatccttgagtcgctccatatattaaattgtattgcattgaagaaattcctgcttcatgaccattcttaatatatccttctattgttgatttatatacatcatgttttgataaatcctgccatacatcttcaacatttgaaccttcacctgctataggatcatgatgtttgtcttgccaatcataatattgcagaccatttatatggaattttttcaactgatctattatatcttttgtattaacacttttctcataattagttagataaccgtatctaggaaacttaagccaacctgaggagacatctacagctgttgatgatgactccatgacttttccttcagaatctttacacgttatttcaagtaaatagcctttaaaatcctcattaggagctgtccagtttataaataactctttattttcatctttttcaattgaaaaattttgagttactgtatttccaacttgtgtatcaagatgctttgccgataactctatagttccattggatatttcatttcctgtataattgaccagattaatttttacacttacatttgatcctggattatacatagatttatctgttgaaacatcatataataaaagcttttgattaaatactcctttttcagaagtatttactataggcatttctataaaatcagactttgcatatgcggtatttgatataattgataaagttgataggattgtagtcgacataagtgctaaactacataaaacttttaatttttttcttgaattattcatattttcaccatctttcttactaaattaaaacaccatcagttccaagtttatatccgttcatagttgcatccgataacatttttccattttcgtccaagtaataccagtgcttcccatattttaaccagcctgtactcatgctcccatcagttcccaggtgataccagtttccgttattagaaatccatccaattgacatttcaccagattcttttaaataataccaattcccatcatcatttacccagcctgttgacatttctccatctgattgtaggtaataccaactactcccttcttgcatccatcctgttgccatacttccatcagaatttaggtagtaccattttccacttatgttaatccagccagtcctcataataccgttttcatcaattacataccatttttcatttactttaatccaagaatctttaacttgttttcccgattcatcaaaaaattgccaacccgactttgttttaatccatccacttttaattactgattcatcacttgaagtattgtctttatcactagtacttccttcgccaccattaccttcattgccattattttcagttcccaaatccttttcatcactagtacttgaaaattcattaatattagttacataaccatattctgtaccattatctccccaagcaattaaattgttaccatcgtaaacgtctaagttgcttatctttgcaggaattgtatacttttcatcaaagccatttccattaaattcatatatctttttcaagcctaatacccacaagtttcctttagcatctatagaataatatggtcttattaaatttcttatttcacctgcatccgtaactgttaatttttgtcctttaattctagtttcaatagatggatcattaaccttatatatcttattcctactaaccttcaaatcatcatcacgtacagtttcgaatccaacttgatttacttgtatcttattattgcctccgtctttattgaatcttataacatatatgtttccattcttagcgcatacatctaaattataccaatcattactaagtttaggctgaatccaagatagaaaatcagattctccattcatttcatatgctgtaacttctttaggtgtatctgctccatcaactttatctcctacagccttagaaatctttaaaatatactttttgctgtttgtaccatctggatatgcaatgcttatatcactatctgaagtgaattctacatttgcactaacatagatataagttgaatcctgtgttaataaatctgaccctacgtctgttaaattagctacaatgttctcatttccatatttttctccaaatttttctattttctctgttttagtttctccattaactgtatatataagtttaatgtttgcaaacttagagacatccatatatttgccagaattatttacaaagccataatatattggctccttgtcataatttattatagcgtgtgttccgcttgaagtttcttctccagtatttgtgtcagaaccagttgtgttttctccactatttgtccctgaattgttatcaccatcttcattatctgtttctgaaccacttggagcatcttctccactgctatttcccgaattacctctatcatcttcatctgtcgaagaagagttttcctctgtttttactaaaatattgtcatcataagatattattatatttccatctatctttgtatcagattttatctgaattactggctttccatcttgctcaataacttgtgcaccatatccacagtaatctcttattcttccagctatgtattctgctgttgcttccacatctccattataagtttttgcttctccgtcagattctaaattaccagattcatcagctgttattgaaaaccaaaattgataagtgtctccaaagcttgatgttacatcatcacccttttttaatgttatatttctccattcatgatctgattctgcatttatatcaatagttgttgtatattttacagcagaatctgttgtcgtagttccgtatactgattctactgttttagaaatataattatcagcaatcatatctcttacagcaccgttagaatttttcgtatcatccgatacatattgaatatttttagcaagtgccattttagattctattgaaatatcactattatgccccgttattacagttccttctaatttttcatcagatattatttggataacaggacttccattctctgtagtcacctctgcatcatatccacaataatcttttaatcttttagctatatactttgatgctgcagttatatcgccattataggttttttctataccatcagtttctttattagtaggatcattacttgttactgaaaaccaaaattgatagctgtctccaaagtctgatgttattccatcaccttttttcaatgtaatattatcccattcatcattggaatttgtagctaaattgattattgttacatatttaatagcttgtccataattataatctgcagtatatttataccatacatcaccaaaggaacctttattacttgaaattctatcacctaattgaagataatctgttatattactgccatatctattggtttcttttaatttttttactaaatctcttctaatatcaaatttttgatcttctatatcttccccttcaaactttcctgtttgcaaattaaatagatcttccttaccattattatctagttcaatatacctattatcgtactttatagaatcatcatatgcatctgaattctctagttcattatactttccattattgtagtatattgtttgttcttccccatcagttcctctatacccatcgtataaatacttatttgagtaagcaacagaagcattaaaattcccatccttttcttgcaatgcatcggaagcaaatgcaattggtgatgaactaagagtagtaacaattgttgtaattgttactagtgttattattttgttaattcttttaatcatgatattatctcccctactatgttatagttaaattagtatttatatataattaattttctttctaatatcttgattctatttaataaatttacatttaaaactaattaactataaatttatttattgttagatttaatttttcaaccactgaatttagttcttctacaaattcaaatattttttgaatttcactaatttgtccattagccccgaaggaaacttgttctgtagttgcggctgtttcttctgaaatagctgaaatattttccattgctattttagttttatctttacaatcaactattttattaattgacataactatatcttttaattggtatgatatttggttcattccttcaaatataactttaaaagcctcatctgcaccatcaactgcatccatctgttcttttattataattctagaattacttgcttcttttactacaattcttgttttattttcaatattattaattattttattaatttgatcagatgactcttttgatctatcagccagttttctaacttcatcagcaacaacagcaaaacctttaccagaatctccagctcttgctgcttcgattgctgcatttaatgctaaaaggttagtttgctctgcaatactaccaattaactctataatttcttttatatcttttatatttgtgtctaaagagtttatatcgctaacaattttagctgaaacattattggtttcgttggctttatctttcaatgtattaactgatataacagcttcttttttcattttttgtgtttcctctaatactaaccatacattttctgttttcttactcactatatttattccatcagataatacgctcatgaaatcaattccttcattaacactaacagcttgatccgaagcacctttagcaatttcactcattgtagctgcgatttcttctgaagatgagcaagaatgctctgaaacctgtgcaactattttggtgttattaaatacattgttagtaatagctttaacatcgccaattaaaacacttattttactcaccatctcattaaatgcacttattacttctccgatttcatctttactactatcttctatgtgcaaagctaaatttccatctctagactttttcataagtgaaactaatttttccaaaggttttgatatgcttcttgatactattaatgctaccaacatggctaccataaacgaaaccaaaccaattattatagtattatttgttagactattagattcagagtttatatacgtgtacggtataactcctactacataccagtctgaaccgcttaaaggtgcataagatactagattattaccatcacttgttgaaaaagaattttctatcttagcacttttatccttgcttttagctgattctttctcttgaattttctctataatacttttatctttatattctgttccaattagacttgattcatcacttagaataacaactccttgtgaatctaaaacaaatatatcagaattatctcctaaactaatgtctttaaacaaattaataaataatttaggatccaattcttctataactattccaaagtttttacctgtagccaaagtattcatttgaactgaagcgtagattttatatcctgatgaacttttgtttaatgaccatgtgaattttccctttgacttgctagataaatctgataatttcaacattaaatcgtcagatagttgatttgaaaaacttcctattttttctttgtctgcactgataattccgaggccggtcatatcacttttggttcctactttatttcttattaatttatttaactcattaattttatgataatcaacagtttgtccattttcgaaataatcctgaaaatcaggttcagtaaatattgacatagcgaagttggagttcttatccatttcgcttgatatatttactccaatttgcgccattatctgagatgagaaatttgaaattttattatcgattgaacttttagattgcactattattgaaacccctactattaataatggaactaaaactaataatccataagaagttgtcaatctaacttttattttagaacctctcataatgttttcacagtaaaaaaaaatattctttcctttattgataaaatctatttctcttttattatttctttttttaaatttaatcatcgggcgatcactccctcattaatccttgcaaaacttataaatagaatatgtacaatattttttcaagctaaaccacctcttatcatataacctatctagtttccacaaatcaatcttgcagcaccatatattccagcatcattacctaatttggccaactcaaattttgtatttcttgaactatgaaatgcatttcctttaaaatgcttagtaatactttcgatcagaaaactcccatttttagatacacctccaccaatcacaaatatatctggatcaataacacatgagatattagctaaagctttccccaatctattaccaaaatcatctaccaattctaatgctaattcatcacctgcctttgcagaatcaaaaatatcttttgctgataaattctcaaaattctttaaatcagattttgttttcatagtttttaaagccttattagctaaactaacaatccctgttgcagatgcatattgttctaaacatcctttatttccacatccacaacattctgtctcgttatcagaaacctttatatgaccaatttcaccacctgcaccatttgatcctgatattatttttccgtcaataattattccaccaccaacaccagttccaagtgttatcattacagcatttttatagccttttcctccgcctctccacatctctccaagtgcagccacatttgcatcatttgcagctttaataggtaattttaataatttattaacctcatctattatgttaaaaactttccatccaaggtttacacatttaagtactgttccatcctctttaaccggtcccggtacacctatgcctatgcccaatacctcacttttggaaatattattctcattaagcttattttcaagtgtttctacaatatcttttataatatattttccttcatcctcttttcttgttctaatctcccacttttctagcaatgttccttcagtcttaaacaaaccaagtttaacggtagttcctccaatatctacaccaaatatatacttttccatttggataactccttccccaataaaaaccttaattaattgataaatttataaattcgcgcttcataaggttctagctctatattatttactgattgatttatatctacatcataatttgaaattaaaagttctttatatttaaacttacttataccatcaaaaataaactttgctttgttttctgtaaaattgcaaataactaataccatttcattttctaaagttcttgtataagcaaatatttctttattttcttctaaaatcaattcatattttccatacacaactactggatttgtttttctaattttaattagacttttatagtaattgaatatagaattttcatcatttaattgcgatttcgcatttatttctttataattaggatttatttttatccaagtatttccggttgtaaaacctgcattttcactatcatcccattgaattggagtacgtgcattatctctacctttttcatatattgaattcattatatcttcatgcttataaccttgctctattctttcttcatacatattaagtgtttctatatccttatagtcatttagttcctcaaatcttatatttgtcatgccaagttcttcgccttgatatatatacggtgttcccttcattccatgtaacaatgtagcaagcatttttgcactttctactctatattctttatcatttccccaccttgaaactattcttggaacatcgtgattattccagaacaaactattccaaccttttccttctaattctaactgccatcttgacaacgctttctttagatctaataattccaatggttttaaatcccatttttccttattgggttgttgatccaataaaatatgttcaaactgaaataccatactaagctcacttccatctggattagaatactgttctgctatttctggattggagcaccatgcttctccaaccgtcaatagatttttatctccaaaagtttttctattcatttctttaatatattcatgaagttttggtccattttcttttatctttttatctggaactttacctataagttctattacatccattctaaagccaccaatacccttatcaatccaaaaattcatcatatcataaactttattacggacttcctcattctcccagttcaaatctggctgctttctactaaataaatgtaagtaatattgtcctgtggtctcatcatattgccatgcactaccgctaaatgttgactttaaatcatttggttctttcccatttactggatctctccatatataataatctctataatgattatcccttgattttttagattcaataaaccacttatgttcatcagaagtatgattaaccactaaatccatgagaatttttattcctctcttatttccttctttaataagttcatccatatcttccattgttccaaattcatccattatatcttcataatcacttatatcatatccattatcgtcatttggcgatttgtataccggagatagccatatcacatctatacctaactcctttaaataatctaacttttctattattcctcttaaatccccgattccgtccccattagaatctttgaaactccttgggtatacctgatatactacactttctttccaccattccttattcataactgcctccaattaatatattttcaaataatttatgttagtaagtcgccttaccaaaggccactaaaatattaaactatcaatcttcctatttattaatttaaattacgataattattatttaatttattaaacgattacttaagtattgagggttttactgcatcttttttaatcatcctatatgctcaatttatctaatatgcgagaataatttcacaaactgcaccaaataaatctttatccaaatctaatgtttgcaaatcccctatgatcttagttttattttcatgtgaatttattatattataaattttatcttttatatcaaatcttatttgtgcttcatttaaaaaatcaaatatttgtctatcaatattattacaacttaactgcatgacatctttaaagtcaataactaaatctttgagtacatcaatttgattacatcttataatgatgctattcattaaattatcataatctttttcataaattacttctttaccatccgatataaccattatttctttacaatctttaaatcctatgaatttaaaagtataatttctttcctttggtataacagaaaactctcccattactgcttttactacaaatctagtggagtctccccactctaaattcatttctgtttctgcatatcttccttttaaatattctaaagtattaccatcatcctcatacattttaaatctgccattatcacctgcaaaaattcttacttcaatatcttttggattatctatctgattgtagcaactttccatatttatcattggaattattgctcctgcctttgcaagtactggtattcttctaatatccctatataaattaatatatctatttccagaataaatcatcccattaaatatatctatataagttccctctggcagccatgcttttacctttcctcttccagtttttctgttcattggatgtgttataggacatacaatcaattctgatccaaaataatactgattttgcacttcataagcctcatcatattcagaatttttataatacattggttgtactaaagggattccgtcttcactaaaaattctattcattgtataaatatacggtactagactatgtcgaaatcttaaaaattcattcattgtctcatgaacaatggaattatatctccaaggttcctttccattaaaaacacttgacgaactatgaagcctcatgattggagaaaatactccaaattgtagccatcttaatgccatctcatcatcttttacacccagcatatgtcctccgatatcatgactccaccacccatatcctgcattagatgcattagctgtaaagtaaggctgaaaatccaaagactcccaagttataatactatctcctgaaaatcccacaggatacctatgactccctattcctgcatatctagaaaaagtaagtggtctctttccattacgtttattgtccaaaaagtgataatggttaagcatccataatggatcaagaccttctatctttgaatcattgccttgctgccagtcaatccaccaaaaatctactccgttttcttcatttggatggtgtgcatatttgaaataagcttccaaaaactttgaatctgaaatatcaaactcaatattttctccgtttaaataatctatatttagatgtttcgccatatcagtatacatttcttcatgggctcttattccatcagctggatgtacgtttaatgtgactctcaagttattttcatgaagccacttcataaatctcttagggtctggaaatagctctttattccaagtgtatccggtccatccacttccatacttaggatctatatctactaggtgccaatccatatcaattacagctactgaaaatggtactttctcttctttaaatctatctaatagtttcttatattcttcctcattatacctatagtatctactccaccaatttcctaatgcatatctaggtaggagaggagtattcccgcatagtttaaaaaaatctttaaaacacttaatataatcccttccatatcccaaaaaataaatatctgttattttttttcccttgtctcaatccatccatcttctgttaaaattaacgattcactatcatctataatagaaaatccatcttttgaaattagacctctttccaaaggaattgcaccatcagctccatctaaagttcttgctgtgccttttaaatcattaatttcttctccgtaatgccaaatactatgataattacttacatttcctctcacttttatagttaatccattttttgaaaatttctttttgtcatagattaaatgaatatgatcagttattatttctaaattttcctcttcatcaattaatttaaaactttgtgatataaaatttctatttagcactctctgagttgctctatcttcaaatattcctttatcatcatattctaatcttatcatttgagatgttaatacagtaaatctatatttatctccttttacaacattgttattattacaaaatggacttgtatcaattctatatatatccttcattatactatgtcctttctttacttcttaaaatactctattccttaactgatcccataaccattcctgtgacaaaatatttttgtaagaacggatatataattagcaatggaatagttgatacaacgattttagctgcatttaatgttttgttagaaatatcagcaatgctttgtaactgagccggatttgttacctttgtaatatccactgttaattgttgtatataagtttgcaatggataatttgctgccttatttatgtacaacaatccaccaaagaaatcattccagtgtccaacaatgctaaacaatgaaattgttgctaacgcaggaagcgagataggaatatatatcttaaataaaatttgccatttattacatccctctaattctgccgcctcttccaatgattttggtacactcttaaaaaagttcattaataaaattacattaaatataggcacagcacctggtaaaattagagaccagatagtatctaataaatgtagattttttacagtaataaatattggtatcattccacctgaaaacaacatcgcaaatatcataaggttcatataaatatttctaaaacgaaactctcgcttaccttttgatagtggatacgccattaaaaccactaatattaaatttaatgctgttcctagaataactcttgatactgaaattccaaaagaacgccaaaattgaccttcttgcaataatgttttataggatgataaagtaaaatctactggaagtaatcccactaaatttcccgctgctgctgacttattactgaaagaaatagctaccatatttataagtggaaacaggcatgcagttgtaagtattattacaacactccatataattgcatcagctagcctgcttccaaacttttttgactttaacataatactcctcctttaaaatatttgcatattagcaactctttgagataatttgttagcagacaataataatatacatccaactactgattttaatagtcctactgctgttgcaaaactatactgcattcctactaaccctacacgataaacatatgtatcaatgatatctgctgtttgataaacaatcggattatataaattaaatacttgatcaaagccagcatttaaaatatttcctaaattcattgctgtcataagcataattataggcattatacctggcagagtcacatgtattagctgcttgaatctatttgctccatctatagccgctgcttcatataatccagaatcaattccggttaatgccgctaaatatacaattgatccataaccgaattctttccatacatctgttcctattaatataggcctaaaccaggtattgcttgcaagaaataatgttggttcatatccaaacaatttcaaaaatgcattaaccgggccatcaaaggagaaaatattggctactactacagctaagactgcccatgatagaaaatgtggtaaatatacaatagtttgaatggttttcttagcccatttttttcttatttcatttaaaagtaatgcaaatataattggtattattgtgcttaagataatttttcctatagcaataactagtgtatttcttaaaatattcatgctatctggtatttgaagcatatatctaaaattatcaagtccaacccacttagaacctagtattccttttgccggtaaatactcttgaaaagccattattataccaaacataggaataaaactaaatatgaataaaaatatcataccaggtgccatcataagatgataacttaattgttttttcccttttttcatgaatctccctgccttccttatttgtaatgtagaatattaattcttcgattgtaagttggatgcaaatactacttgcatccaaactgtcaaattagtatttatttttttatagcatcttcaacctcttttgtaatttcatctccacctgtactcttccaagttgaaacaaagacatcaaaagaatctattggtgcttcacctgttacaatttttaagaaggtttcatcttgtaatttttgtaaattggcccattttaatttcatactctttgtttgtccaaaaaatactggattaacttcatttatcttggtctcactcattagttttggggcaaccattcttgacgtatagccactccatgcatcagcacttggagaatttgaattagctaaataatccttacacttttcatagtttcccttatcagctcctaaagattccggatctttttctcctttaagtgctaaatcaatatttttatacatatcaattgttgcattataatcattaataagaatacctaccggtcttacacctgaatcaacaccctgctttatataatccataagttcttgttttccatagtcttcatataccatcttgtcattaataacactagctatctttactaataattctggatgctcaaatccttttttaacaacataaaattcgcttgccggattttgtgtataagttgtataagacccatctgaatttgttggtattatataaggaacccattgtgcatttggatttagcttcttagcatcatttaatggataatcaggtgcccaccatggtccaaagaaagcgccagcttgaccattaacaataagtgaagtaacatcatcaccttgtcttactgccatttgtggatcaattaaaccttttttaaacatttcagcaactcttcctaatccctttttcatattattagttgtagatccaaatacaacttttccatcctcttcaatccattgtcctggaaaagcattatacattcctagaacgttatccatttgaaataatcccccataaactcctcctatattagaagaagccacaagaccaattgtttttccagctccattatttcctggatcttttgttacaaactgctgtaagatattttccacatcatccattgatttaggtgcttgcaatcccaatttatccatccaatcttgtctaacccaaagcattgttggcgcattagcacattgagtagatggcaatgccataagttttccatcaaatgtagcactttctaatgctcttccattatacgaatcatacatttgtttaattttatctgtggcacagtttttgtaagcatcagttaaatctgctatcatatcgctatctactaattgctttaatgttgttgaatcaactttcataatatctggtatatcacctgtagcgactgccattgataccttttgatcatatggatctccattagctgcttcaaattcatctttattctgaacatttaatacatcttttaaatatcttgtatatgcattattttcataggtatctccttctggaagacgcggacttccaggtgtatttttacctatagtataagttaccaattcatcgtattttccataaggtgtagttactgcccctgacttatctttcgtttcagtcgtagttgcaccatctttatttccgcaccccgtaaagaacatagcaattgtaataactgccattccaaaagttgttatccttttcattgtttgcgttaaatttctttttagcatccccataagcctcctaattcattaaaaaaataatactttaactgtaactagctttggttaagtaatttatactgaaattatagcattcaagtaattatccgaatatactaaagatttttgatttatatcaattttttatgaatatgtaaacaactacaaaaagcaagctgtttcaaaatgaaattcatacctccattttaaaacagctatttatctagttaatcattaaatttattcttgtctatttctaccgggatactcattatcgcaacagttttttcatttggtatacttataaatctcaaatcacaattttcaccataagtaagtttaattctatcataaacattttttactccataaccttttgttctagttgttaaaattctttcgcaaatttcactcttcatccccactccattatcttcaatttcaaacacaatatctgttcctttttgctgtgcagatattcttaacttgcctctattatttcttttttgatcaataccatgacatattgcattctcaactaatggctgtagtaataaattaatcatatagtatcccttaattttattatcaatatcaaaatccacatcaaaattataattatgcatcatggattgaatcttaacatatgcttctgtattatttaattcattttctactgttatgatactacttcctttatttaaagatgtacgataaaatgttgataatagctgagccatttcactaatttcatcttctcctgacctaattgccttccaattgatcaaagacaagctattgtagagaaaatgtgggtttatttgagcttgtaatgctttcatttcatattttcttttggatatttcgctcttatatacttcttgtattaaagtttttattcttactataagcttatcaaaactattaattaaaacaccaatttcatcttccgaattgctttctattgtaacttccaaatgatccatattcatttccttcatatttttagttaatttttcaatacggttcactattatatacgaaagccaataccctacaactaaaattattagaacacaaatccccatgataaagaatacagtataaataatatttttagatgattccacaattaaatgcacgggtttgtaaagatatgcagtccatccaagatccttcatatcaatttttattaaaatataatttatattatcataagttatagtatctccatctattttctttaattcagtactcggcaataaataatctttaccatcatcatagcttctattctcaaatacaacttcatcatttttatctacaacataaattccacaattagtgcttgatatattatacaacggctgaaaaaaattcttagagtttatttttacatatagaatattctgtatatcattatatcctttattaataaactgaaccgctaaaaaaacatttttttcactatcaatgaaccactgaggtttatattttcctaatacttctttataccaaatattattttcaataacctccatgggcattatataatcggaatgctttactatattattactagtatatacagttatttgttgtatatcattatgtaacgctcttagcatatcaatatatggatccagcatattatgaaacttataatacatttcataataacttttatattcatgattaattacctctaaaatcattgggttaaatgtagtataatccagtatattgctatacacattcgctgagttttcgattcctataactgcttctgaaaaagactttcttaaattctctctttcttgatctaaaagtaaatttttcgtttgctgataacaaaataaacctagaattataattggaataatactaactaagaagtaagtcaaaattattttatatcgaaattttaaatttagaaaaaatctttttaacctattcattattttcatccttttgtctatatttttcaggtgttaatccatagaattctttaaaactttggcaaaaatatgatgtattactatatcccacgatattaccaatatctttaattcttatatttgtattttctaacatatcttttgctttttccatacgataattttttataaatacattaatacccacgcttgtctctttcttaaacatactgcttaaatagcttggtgccatatacacatattccgctaatatatcaagagataaatcttttccataattttcataaatatatgacttaactagctctatctcatgcctatgattaaaagattccttggaaaattgtttttccatattatctataacattatttaatatatctcttatttcttgaattgtcctgctagaataaatcttatctatttctccatctaaatctatttcatttgcttctttcatttcattacaaatatttctataaatatttgtaagaataaactttacatatatttgggaaaaatcactttgcgctgaaaatttttttattaaaagatcaacactagatttcaaactacaaaaatctctaacttttatatgatgttctatatttttaagtatagtactatcgaacttttcatctgttgattccaatgtcatctctacttttttagaaaaaatatacttatctggtacaaaaaaacgttgttccataatatgttccatattagaatattcttctgatattatagaaggtgatgtaattaaattactaatagaaaaataacaatcgactccatatttttctgatatcacattatgtattttcgtacaagtattttctaatacagtttcatctataaactcatagaaaaaaaatattccttgatagggatttaaattcaaataatctgctttatcttggaaatcatcaagaatttcttttataaattcttgatgattattaaagaaatccttatcgaattccatcaaaatcattctcttatacttatttacaaaatccgtataattatctaaagaaaatctctctctaatgctttctataggaattccgcttattacttttaataaaacatgttctttttcggtgaaatttctccattctttagcttgcttttctttattttcctgtcctattttttcaataacactttcgattgtctttttaaattctgcctggcttattggttttaatatataatcatttacaccaaggcttattgctctttttgcatactcgaattcaccaaagccactaaaaattattatttttagatctggatatattaatttagcgttttgtgataattcaattccatccataaatggcatccttacatcagttaataaaacatcaactgaattttttttcaaatattctaatgcttcttcgccatcactacattcttttatatcaaagtcaaaagaaaatttcttgattaaaaatataatgccctctctctcaataaattcatcatcaacaattaagattttaaacataaactttctcccacatctccttttaaattttaataaacgattatttctatacatactaaatagatccgaaataataattagcattgcattaatataatataacaaaatcctacgtaatcgtttaaccacattgttaatgtaacatatatacatttttttgtccatatcactattcaaagtagcgacattttaaataggattcttctccactatattcttaagctatttgtgtagttataatttcaaatcctacttactttgacttagttttaaaaaacgaaaatattgatttctttatcttaactttttttccaacgaaatttataatctcatcattaatcagctttttagagctctctttgaatatgttttcatttattatttcattattattatcatttaatatatttatagcttttctaagtccagtagttctgttatctatgtcatgagcatcagaaccaataaaattatatatattattctctaaaaatatatgcgtagtttttctataaactaacatttgttcactataaattatccttgtcttcatcatttccataatagtaagaatattttcctcttgtattctccaccgcatgtaatactgttcctattatattagcgcctactttatccaaaagattttttgcatccattactatatctcttttcgtttctcccgcccttataactaaaatagtcccatctacctttgttgatagtatttgtgcatctgtaactgctttaagcggtgctgtatctaaaaccactatattgaattctacttttaatctttctattaaattgctcatagcagaagatgataacatttctgatggatttggtggaatcttccctgatgttaaaaaataaaaattatcattccttttttgtactgcttcttcaatggcggcctttccaagaagaacttcagaaagtccaatcaaatttgagactttaaaatttttatgaactgagggttttcgtaaatcgcaatccactagtatcactttcttttcattttgagcaaaagatgcagcaatatttcctgcaactgttgattttccctctgccatttctgcactagtaacagctattgttcttatttccttatcaaaggaagaatattgtatattagttctcaatgttctataagcttctgcaactatagatttaggtttatcttctactatgaagccggcatgaattctattatcaactactgttttctctaatttatatcttttcattctatctgctttataactcctcgcttcttctaatttatatcgtttcattatttctagtgtatagccttttattttctctagtaacgacatgatttcacaccttcctaacgtcaaaataaatttgctacattaataattacaaagtacaacttgcatttgtttacaaataatttattaacataaacttcattttttaagagtagatgatttaatttaattatctagcgcattaattgataaaaaataggagttctatctccgcttttcctgtcaattcacatcacttaccttctttaaataagtcaggaataacgcctagaactggcaattctaaaatctcctctatttcttccctagttttaaaagtattattaaagaactctaataagaaacttgctccagcactgcctatcagaccaagtaaaaggccgactcctatatacatttttttatttggactgactggtttttgaggtactttaacactttctacaacctttacgttaccatttggtataaactctctagatgatcttataaactcatttgtaactgaattcactacatccccagctaatgcttggtttgcacttacgtaactaatctccaatatttgtgtatctgttcttggcgtaactgataaattatcaagaacattttctgaatttaagtttatatcacttgagtctatggccctttgtactaaatcattggtctttattatttctgcataagtctttatcagtttttgatacatttgtacatcattagtactatagttttgatcctgaccagtagtattttcttttcctataaagaccttagtatttgcttcatatttaggtggaattataaaatagcttataattaaagctaacaatgtcgttactaatgttactaagagtatcattttccatctttttatcattggatttgctatttcatcaattcttataatatcgttattcatcatttaaacttctccatatacaataaatttttcaatagtcctaaatacaataattatatttttagtaatttccttctctttcattcatatttttaaaataaaaaaattctaatggaaaatttccactagaattaaccttttatacatttgcattattgctttccattattcttaatccactgagaccacgatgtttcatacccatcttggtcatctttgcaatatttataaaacatatttaaaaactctactcttgatttatcttcatctttatttgtttcctttaataaatctgatccaccaatcaatttttgacggttcattatatcttcaaaactcacattttttgcattgtgcatcatatcatacatagacataaatgttgtagtcctacctgcgcctcctctacaatggaaatgtatccatgtatcctttggcagattcttaattgattcaataaataaatctacttgatcatctaaaggcttctcatgatctgtaactgtaattcttaagtagctcatgcccaagcctttagctaattcttcctctgtttctacactttcaggattatcaattgattttactgtgtttacggactttcccttttgcagttcatcaaacttaacatgcttgtccttagatattttatctaaattgctcttttcatctaatataatttgttctctgccaattcccttattagcttgattattctttccaaaccaacttattcccataccattgataaatccatgatcttcttggcgcaaatcaatatctatgatagatttatcacctattttttcttttaccatcgctaaacttttctccgaaagcgctccactaccagaaatatttagatcactcaatcctgtaaggttaatatcttttgatttctcatcattaattttatccttagtagtcctaaagtttttgggtaatacgtccttattatctgtatctattacaagtttcactttattagcttgtacactatttgtcttttcaattgctattttactacttttataatgttgatttatactatacataatagttgctcctcctattataactaaagctactattatatatgcaaccttattcctcttcattaaatatcacccttcctcttgatatttgaatatttttcactcataaatcttagattcttttgtgctttgctaatgattatagataaccaactttaaaactagacttgtgcaatcacccaccgaaagtagaaacattgttatttcacaggactatgaaaatttcactgaaagcactaaatttcaggttttaccactaatgcttgctcccaatttcattgtgacaagcattaatggaacaacctacaattaagggcttttaacagctcattttcaatgcctattgcataaaaatatttctgctttctagtatggtatttattgcaaagtgtaaataaaattcttaaattgtttatctatagaaaataacccactgttacccagtataaaatagttatgtgaaaattatgtgattattcaaatgaacaccaaataccttgattaataaatacttaaacatatacaaatatcactagacatttgccctttgtactgtactctaatttaagatataattcttgagtaaaattaaaagttaagcctacctgctaagtgaaattgcttactttaggctgataaattcacttagtaggtggttttatgagcattaaagcataaaataaagctaggctgaaaccaatagttttaacctagctaagatatttctttctaaagttttagggcgtaattttactcgacaatgcgttttttcttaagtgtcacaagttttctatgctttccatttttagatcttggtttgatattcaacaaatctaatacaaacattaaaagaggcactccaagtaataacccccaaactcccataaaatgctctgatactaaaagtgtaataaatacgacaaagactggtaattcagtcttatctgccataaacctagggttcaatacataactctcaagtgcatgtaaaactgcaataattataagaatatataaaatcattttaaaaccgccaactgtgtatgctattatacttaaaggtattaatgatgcaattgttcctgcaactgggactaagctaaataagaaaatcataactccaaggcctaaaacttgcggaaatcccaatgcaaaaagagatataacagataaaatactattaacaaatgcaataattatttgagcttgaattacttttccaaatgaattcaaaaaatttattccaaaatcttttgtatacctatataatatggcaatcttactatcttgaaactctgagaaaaattctttgattttctctctttcaaccataaaaaagaggcttaatattaaagacacaaatatattaaaactccaagtacctatatttgaagcatatttcaaaaattgatcaaatttcaataaatcatttatttcagaattcttaaaaaatgacatgaaatcaacctttccaaagtatggtacaatatacgtagataaaacttccccaccaatatctctaaaatcaaatctagatattttcatgccaatctctgtaagctgtctaataattattggtatatacctataacttgcaaagataataatagatgtcatgaatatgtataaaaataatgttactattatcggtttcacctttataaacttatctaaccgtttcgtaattcctacttgtagactgtatgcaatatatgtaaagaaaaatgtaagtaaaaatagattaagcattgatcttaatatatacataaaaaatacaataataagaagaacgcaaattcttctgactatatcttttttaaatagttctcttaagaaattcacatcttattcccccttctagtaattattatatcctataaatcatatgcttaaaacaagaaattccaataaacctttccatattaataaatttaaataaaatagttgcgctctggaactatttacctcaacattttaataaaatcttaataaattgcaattattttgtaagttgtttgtagtataatataagttatcggataatattcaataatctattctactttacaaaaaccatatctatagagtaggcataaaggaggataagatgaaaaaaaataatagaattggggcgatagtagtttcagcgctacttattacgtcaatatgcaactcagtaccagcattggcggaccctaatgatagtaatctaacacttgaacaagctatacaaaacatacaggaatacgataatgaaattgaatataacatgggtaagttaaatcaactaaaagagcaaattcttgaaaaagaaaatgatataaaagataaccaagttaagcttgatttaacccaaacacaatttactgaaagagaaaaccagttatctgaacgattaaagggcatccaattcaatggaggctttgaagctacaccattgcaatatttagacgctttattttcttcaggtgatattttagatgcattaaaaagagtgtcattgatttctcaaatttgtacaagcgataaggatttaattttagaaaccaaaaaatcagaagacaatcttttaaacattaaaaatactatagaaaaagaaaatcaagaattgcaaactgataaagatgatgttgaaaagcaaattaatgacttggaagataaaaaagatactctcttaaaatatgtacaagataataacgcactattaacaggtgatataggaatcactattcctgtaacattaccttctgatattacagatcaggctaaaggagttatagaagaagcagagaaatatttgaaagttccatatttgtggggaggggaatctcctgaagggtttgattgctccgggcttatgcagtatgtctttaattctaaaggaatcgctataccaagaacatcacaagagcaacaaggttttgccaagcctattagcatagcagaaattaaacctggggatttagtcttcaataaagtttcagattcaactcatgtaggtatgtacataggatatgatatgtatattcaagctccccatactggagacgttgttaaaataagcaagttaagtacctcaaatatgaaatattttggtagagttctaaactaatattaaattaaaactctagtaattcaagtactaaattaatactgagatgtataagattaattgcaacatatatggaaaaataaaattatatactataagcaaagcagctagtttgattagagaaaatagctgctctttattttataaattttcacaatatggtaaattgtaatattttattatttatagaatatatataaaatggtataatttaatcgaatacataattattgtggaggcgatttatcatgaacaaaaatgtaaaaaaaattatcatatttaccattataggtacagctttttatacatggatgccatcaaccttaagtataggggaacaatgcgcttatgcatactctggagatgagataacttctttaggcctaacatcagaaggctctatattgtcaatatatagtagtataactcacaacggagattatagagtaaaaaaaggtgacaaaattccagtagttatatattcaaaaattccttctaataaaactagctttaacttgagcaccattgaaactaaggctgctgatataagagtctttgttggaaatgaaaatataaagctaagtgatatctatggtaaaataaatatcgcggaaggtcaaagtaagactatttatataagactttatgattctaaaaacgcctctgatagcaattattctttagaatatgaacttattgtagaaagagaaatgaatgatgaagataatattattgatgccaatactgaagaaactacagatgataatacaataactctaaaagactatgatgatatttacttaaatcgattagttttatttgatcctaacaataataaaattgacttcgctttcgataagacagaacctgtacagaatataaatgtcgatgaaaatatatcttatattaacgttaaagctgttccagagcaacaaagctataaattatcaattaatgacaaagatttagatcctagtgatggtaaagatacaagactcgtatctttaaatgaaggaaaaaatattataaaaattagaattataaattctgatcgtaaaactagagaatattatttagttgtgacaagaggaaacagttcgcaagtagcttcaaataataacactacttcaactaatcagaactctcaaactgtacaagcagaagcttgctggcaatatagaaaagctgacggaactatagctgtgggatggacattaatcgaaaatgactggtattactttgatgcaagcggtgcaatgaaaacaggttggataaaagattcttctggaaaatggtattatctaagagaatcaggaactatggctaaaaataccacaattgatggatataaattaggtcctgatggaacgtatactaaataatccttttaaaataaaaaactagcagctaatcttgtgtagaatgcaagaagtagctgccttattttttaaataacttgtttactcacttctgctggagttgatgcataaatatattcatcaatgcaattaacgtaagcgtaaaaaaattaacggatggataaatgcaaaactctcttgttaaaattaacatatattttaacaatgggggtttatttatacgaatgataatgaaaatatcaattggagaaaaattgttgctgtcttttcttcttgcgaagtaactctgagaaatttctgcaaaatgctaaatacttctttatataaaggtatagtttcaaatggattattagcccacgttgtgagcatgaaatatcaatatacaatgtatatagaagataataatacaaccaaaagagctataaatccatttgtaattggcagtaataaaactccatagagcactgaaatttagaagattgagaattagtttaaatattgcttctcttttgctggaactcctattatggagttaagcccgtaatacttacataaagctttatttgaaaaataatttggatctggagtaatatcatctagaccatatgaagcatcatgatgagccagtaaaggatacttatgagaaattacaactgtcgagatatccaactttccttttaatttttccgataatatatattgttcacgagctttagtttgatttaatacttcataagtagacatgattgcatcaagatacataacccaaaaattgcagaaagcaattaacattacagctactgctattcttctaaacattaatattgtactttcttcaaggtctgtaacctcaaaatcaattttttcataaagaattccaattgatatacttagatacactacaatacaaaaccaagttctttctggagaggtaggcgatgctatcataccataagcagatccaatggatgccataacaaatataacagactgatatatgctattatttttctttaaatcaaagtatctttttcctataaaaagcacaatggctaaaataataaacattccaaggacaaaagccacccaaaaataagttatcataaaaagcctaaaaataattgttgtatgcacagccgattgttccactgcctttctaacatatgccccaggagcactaattaataatatgaatccaattaagcttccaatatatccgctaattatatatctacatatacttatattattaacgtaatagtaagcaatatataaagttaaaattactaacatccctgcactagcattttcattagcccagcctgctaaaattccaagtacaaatattataaaagcactaattaaattatttttaattatatcttggttaattgagtattttctaaaaattaatatcataattaaaactggagttataagccacaaataattagaagaacccgataaccaaaacatcacttgtccgtaattaggggtaaagaaccaaattaaaagattgattcctatgtataaagaaacttttgctttctttgcttcattacaagcataatatatcaataatgtattaactatataaataatagtgttaagaacattaaaaattggttttcctagtagagtaaataattgctggtaaaattcaccccaaactcgtccaccccaggtaaaataataattgtacatggaatatataatatcctttatacttacaatatgtgtctcagtgccatttatgtatccaaatgaataatcatctacaagtagtggtgttaagtaatttaagataaacatagctattgagaaaaatataatactagaaataaatacattttttctaattgaatatttagtaaaatacttaatatctatatttttacaaacatttataaattttcgt

SEQ ID NO: 13 - DNA, 94661 bp, Clostridium beijerinckii
taatataagttgaaaattatcattaatctcagtataatctttattgtgtaatttggtttttagcataagtaaattatacaatgaatgtgagttcttcggaattcacattttttatatctaaaaaaatgagccgctacaaaactaactatgttagttttgcaacagccccttttttactagtgtgcccatgctgggcacactagcataagttgagattttcatatatttagaaagtctcagctttaattatattactgaatataattctaataagaaatatggtaatatataagtaaaatagagaatttaaggagaaataatgaaggaaattaatatatttgaaatagttccagagaatttttttgttccactttccagccaaggaaagactctatatattaaaattatttctttaatatataaattggttcaaaatggtttgtcctatggtattgataaagacatattagttgatgaaattgaagagtatttaggattaattaattatgatattgaaaatgaagaagatgaacagttgaacaataatagggaaaaagcaaattatttgattagaaagctaattaattatggatggatttatccagaacagactaatgactataaacaaattataaattttcatgattatgcaattgtcattttagaagctttcttaaaaatagtaagtaaagaatctttagagtatcaaggaaatataataagtatttattccatgctttattcaaatgaaaaggcaggagttgttattaaacaggtttttgaaaatactaaaggaattataagtggattaaaaaacttgaattcaaatataaaaaagtatatggatagattaactaaacagaaaacacctgaagagataatgcaagagttttttggaaactatactaaagaagtaattgataaagcatatcatagattaaaaacttcagaaaatgtctcgaaatataggcctaaaattattgaaaagcttaatgaaagtttaaatagtagtgaatttttaagtgaagctggagagttttacagagaagatgaagaatttggctctttagatgaaggaatagaaaaagttaaggatatagttcataacataataaatgcatttaatgaattagacgatattatgcatgatattgatagtaagaatgctaaatacataagagcagctgtaactagggctaagtttttacttaataattctaaagatatgacaggtatcgtaaaaggaattttagagtacataagtaatgaatataaagaacttgaattaagtttatcatcagattatctggaggaagttacagacttattcactttgtattcttatggttatatagatgaaacatctttatatattgcaaatgaaggaaaaaaatcctttaagccaggtaagattttaagcgatacactatcaaaggaagaacgtcaaagaaagattgacgaatttaagaaaaagcaggaaaaacagtattctcctaagaaggtaaatgaaatagttgatgaacttttaggagataaaaagatggttcttgcaagtgaaattgagataaatagtgtagatgattttattaagattatttatataaggttatatggtaatcacattttgtctaaatattccattaacagaaaagatattattgcttcgaataatggatttacttttaaaaactttgagatatggaggaagtaattttgatatatgattcactgtccattaaggagaaagatgaatttaaacgggtttgtaataaactattaagctattgtttaatttgtaagcaaaaggaagacacaaaaaaggattattattttgcagaaggacataaagatgcaattaatgaatattttgaaccactaggatttgaacttgaaattaataaatctataaaagcggctcagcttattaataaatttggaaataataagatttcattaaaacttattgatagtattactcttttaatactaaggattttatatcaggaaaaaatgcaggaattatccttatctcaagttgtaattgtggaaatagaagaaatacaaagcaggtttatggctcttgggtttaaagataggttaatggataaaacattacttaggcaggcattaagaactttaaaaaaatttaatattatcgaaacattggatagagatattactttgagtgatgcgagaatcatagtttatccaacaattcaaatgatagtaagaagcgaaaatataactagtatttatgaaaaattagaaacttataaaagaaagggggtaaaagatgatgaagaggttaacggggattaggctagttaattggcatgcatttaaggatgaaacaattgaaattaaaaattcaactcttttgtcaggagaaaatggtgcaggaaagtctacaattttagatgctattcaatttgtcttaacttgttctaaaaataattttaataaggcagctaatgaaaattccaaaagaagtttatcgggatacgtaagatttaaaacaggaagagaagacaatgaatttgaaagaaatggagatgtttcagctcacgtagccttggaattttatgaggaaagtaaaaagaattattttataattggagcagtaattgattcagcttctgaaacttcagaaaagattctgtggtatagagtagaaaagtgcagatttgaagatgtaacttttatagttaataatgaacctactgatatagctaattttaggttgtatggaaaagaattaaatatgcctttttcatcaacaaggatagttgatgctaaaaaagatttttctcacagacttggaaggctaaatgaaaaattttttgaattgcttccaaaggctttagcatttaaaccaatttctaatgttaaagagtttgtatatacttacatattagaagagaaatcagttaatattgatgaacttagggaaaatatacgaacttttaaagaatttgaagacattttaaatgaagtaaaaataaaaattaaaaagctagaggaaataaaagttaagtactcttcatatgaaaatatttcaagaacaataagtattcatgaatttatagtattaaaagcagaagaagagctattaaaagaggaaattgaacaaaaaataaaagaaattactgctttgaatgttaatatttatacattaaataacaagaataatgttatttatgatgaaataaatgaaaaaacaaagattgctaataatattcaagctgatttgtattcgaattctgaatacaaagcattagagacgatgaagaattctttagaacaagctgaaaaagattatagacatgaaaaagaagataagaatcgctttttaaaacaacttagtgaacaaaaatcatatattaaagagttaaacagacttctatttgatacggatactataggtgatttttacaataaaatgatttcattagatgaaaataatatagaagaatataaaacaacatcaataaatactgaaaatgtaattgataaaactaaacaggataaggaaaagtatagagctgaaaaagaatatgaattaaaacagaaagaagataataggaaggatatagagaaacaaatttctgaacttgaaaaaagaaatcttcaatactccagggaagttatacttttaaaagaggaaatcataaaggagacaagaaaactaggaagagaaattgttccaaaaatcttgtgcgaattattggaagtcacagatccagtttggaaaaatgctgttgaagggtacttaaacactcaaagatcttatcttattgtggatgaagaagattttgactcagtattaaaaatttatgagagattaagtaaagcacaaggattacattcagttggagtaataaacactagggggcttgaaaaatatgataatcctttagagaattctttagcagaggttgtagtgtcaaaaagtattgatgccaaaagatatattaatatgatactcggaaatgtaattagatgcactcatgtttcagagttgaaagaacataaaacatctattacacctacatgcatgatgtataaaaataatgttgcaagagccataaatccaaggatatataaaactccttatataggtgaagatgcttataaatatcaactagagcaggcgaaagataatcttaacatattattatctgaaattaatattttaaaagaagatattaatatagttacaaatataattaaaacaattaataagcttaggcttgaaaacttaagggaaaagtgtgatgttttaaaaagaatagtagatataagtaataaggtttcaacacttaaggacgagattcttgaattagaaaagaataacagctatatggctcttcaaataaaacttaatgaagttcaagaggaaattgaaagtttaaatttaagtaagaagaatatagaatatgagttaattaataaaaaaggaaatttatcttcaattaataacagtgttgatgaaaaaagaagagttctttctataaaaaaagggcacgtagaggaaactataaataaaattggctttctagctaaagaggcagaggagagatttattaaagaaactgaaagtaaatcttttgaagtcattaaaaataattttaatgtgagtaaggaaggaaataaaactaaattatcaaaaactgaagaagatttaaagaatcttcaaggatcatataatattacttatgatttcggagcagaagttgggataaatggtattaatacttttttagatgaacttgataatcttgtaaaaagtaaagttatcgaatatgaagagcaagttaaagcttcaaggaaaaatgcagaagaagaatttaaggaacactttttatctaaaattcaagaaaatattaatactgcaaaatctgaatttaagggtttaaataagggacttaaagatgttaaatttggaaatgaagaatacgagtttaaaattggaaaaagtaaagaaaacaaagaatattatgatatgataatggataatgaaaatataggtgaaggtttcactttatttagtgcatcttatgaaaataagcataaggaactgctaaatgaattatttgataagttaactttagataatgaaagtaatgaagcagaacttattaaattaactgattatagaaattatatgagctatgatatagagattaaatataatgataatactacatcattattttctaaagtatgcagggagaagagtggaggagaaactcaaactccattttatgttgcaatggcagcatcatttctgcagctttacaaaggggtatcttcatcttcagaatctataggaattatattatttgatgaagcctttgataaaatggatgatgcaagaattatgtctatgatggaattttatgataaatttaattctcagctgcaattattaataggagcaccaccacaaaaaattgagcctataactccttacgtaaatacagtgcttcttgcaataaaagcagataaattcagtattatagaggatatgataaatgaaaaattataaaaaaatactattaaataagttaattgattcttatgaaagcagtgtcatttataagggggatgcgttaagagatacacagatatattttaaatttaatttgaaaagtataaaggaatattttgatgaactaaattacaaatataaagaagaaattgatgtagcttgtaatcagctagaaattgaaaaatttataaaagtatataaaggaaaaggatacaaaagccatattatagaaaagattcaattaaaccttgagaatatagaagcagcatatttatatctcaataggaaagaaaaaaagcaaaaagaagatgaactttccatattattggaaagttataaagaacgggaagatgctcttgggaactttgcaacatatattacagataaacttaagagtaatggatctgtaaaaaaatatttagatattgataatgtatcggaatgtaaggatatattaaaaggtatagatgaagtgctaaagcaagatgaagaaatttttagaagaaatttttccgtcaaagtttatggggattccaaaaggtatgaagctatagagggcaaaataattaagattataaaagacttttctagtgatgaagttcttaatgattataacattttgaagaattatacctatgtttattttaaaggagatataagcttgaggcttaaagaaagtaaaataaatgcaaatgattttcttggaggtatagctgtaagttcaaaggatatagaaaatattaaagaaattaaagtttcaggaagtaaactagtaacaattgaaaatttaacatcatttaataattatactggagatggaggtgtaatttatttaggtgggtatcataatagtgttagacaaaatttattaattaaaatttattctgaaaatcctaatataaattattatcattctggtgatattgatgccgggggttttaaaattttagttcatttaataagaaagacaaaaataccatttaaaactctaaacatggatagcgaaaccttacgtgaaaatattaattatgctaaggaacttacagctaatgatgtaaatgagattaatagattgttagaaagtgaagaatataaggactatacagacgttctatctacgataattaaattgaataaaaaattagagcaggaaataattttttgacaattgaattattaaaatgaattaagaaattggatcgaaagtaggcataaaatccctgaatatattgaagtggatcttattaaccacattcaaatgaaaaatttaaagttaattatagtttaaaaagaagctccaaaatagtatcacaaaagccatataatttaaattaaacgaggtataatatgggcaaatttaaagaaatatcaatagagtaagataatcacttaaatatgagagattacaattaagaaagctagatatagatttagataaaacttatatagagaatgaaaatgaaaaaatatctctaaaagaattatttaaatgataactatataattaattatatgaggagaaaacaactaatgaatactgtagtatatctaacaaggcatggacaaacagaatggaatattgaaagaagattacaggggagaggaaactcgcctttaacacaggctggaattgctagagcgatggagcttcgggacaggattaaagatatagatattgatgttatatattcaagtccaatagaaagagcattagttactgctaacataattaaaggggaaaagaaaatagaagttataacaaatgatggattaatggaaatgtgctttggtgattatgaaggtagaagaacagatgaagttatgaaagaaaatccagaatggaatattgatttaattatgaatggtgatgttaatttatgtgctccaaatggtgaaacattaggatgtgttagaactagaataagtgaaactatggataagttgatagagaaaaacagaggaaaaactatttttatagtagctcatggaataacactaaaggctttaatgtactattttaaagatgaagaagtaaatatagaagttatgggccaagcaactttaacaaagataactgtagacaagaataataattttaatatagaatttaaaaacgatgatagtcattttacagtaaaagggcaaaaattaggatggtaaataaagaggaatttttaaaaagaccagttaaatgtattaaggcgcttttaagaagataagatttagtgcctagaagtactattgataaggaattagcagaggattcagtgaaaatattagaagccggaaggaagatataaaaaatagataaagtgactgttttgtgatactggtgaatattattggtaattatgttaaaatataataaaacattaatttaaaatgaagtggtaaaaagtgggggagaatatgaaaaagttaaaattaacaaaagtaatagctagtgtattaatagtagcttcagtattattattaaatccaataggtgcaagtgcagaatggcaacaaaattctaatggctggtggtattcagaaggcgattcatgggctaaaggttggagatatatttctggaaactggtattatttcggtacttttggatatatggaaaagaatcaagatgtagatggctggtatttagatgataatggagttgggatagaatgtattaaagctggggattttgatattcttaagtcaactagcggaattgtaaaatttaatagaaatgtcccttggggtccaggaaaaactggtattccattagttataccaggaaaaataggagatattgagataaaaagcataggaaatagaggattttataattgtgagtttttaacagatgtaacaattccagatagtgtaactagtattggagatagtgcatttgaaaggtgtgttagtttaaagaggataataattccagatagtgtggaaagtataggacgtgatgcatttgacgagtgtgatgaggctgtattttatgttaatagtgaaaaaacaaaacaatatttaatcaagtatggtatatccccaagtaaaattatattaaatactaaatgatgctcattaactaaatttatattagaaggaatagtaccagcagatctatcgattgtcttgaataatgctagcattgaaaagatatatgcaaatggtgacaaggcttttaagctttacatgaaatatacatatcaaataataaaaagagatattataaagttaccttcaactagtcctgccaatgctaaatttacattagttaatttttgtcttcaagtttaaattttttatatccatttgctaaatataagtaagattgtctataataaaagtaatacaagaaaaaagggagcaggtgtgttaaatgaagaaagtcatacaggtaggaacatctgattttaaagaattgattgaaggaaaccattactttgtagataaaagtttattaataaaagaattcttagaaaatggagggaaaataatattaactccacggcctagaagatttgggaaaactcttaatttaagtatgttaaagtatttttttgatataagaactaaggaagctacacaagatttatttaaaggattaaaaatagaaaatgaaaaagatataatgaaatttcaaggtgaatatccagttatttttattagttttaaaggaattaagtataatacttttgagtattcattaagtgcagttgcaatgctgatgtcagatgtatataaagagcatagatatttaatggaaagtgatatttttaaagatgatgaaaagattgattttagaaaaatcataaatagggaagctgattttgtattgttaacagcttcaataaaaaatcttacaaattatctgtacaaatattacaataaaagggttatgttgtttatagatgaatatgatgtgccaatccaagagtcatatataagaggatacctggatgaaatgattagtttaattagaaatatgctaagtgattcattaaaagataatatagatttagaaaaagcaatggtaacaggaatactatacagaggaaatgaaactcctactcctagagtcgtaggagtaagcgattcgcacaaaagacaagcttttggctctctgcttaaggaaagtattttttcaggacttaataatttagatgttaatactattttaggatattattttaatgataaatttggatttactgaagctgaaattgaagcgttgttgaattattataacactattgatagtatagaaaatattaagaaatggtataacggatatgtttttggtggggaaataatatataatccatggtctgttttaaattacttaaaaaagcaaaaagacggatttatgccatattggattaatagcagcagcaatgatttaattaaaaaattactgcttaaaggcgatagaaatatgaaacttgaacttgaagaacttatagaaggcaaatcaataaacaagataattgatgatagtatagtaatgtcagaggttgaagattctaatgaaaatatctggagttttttacttatgagtggttatttaaaagctgtaaagagagaaaatatagaaggaatattacattgtgaacttaaaattcccaataaagaagttgtgattttttacaggaatttgataaaaaaatggttccaagaaactatgactaatcaaaagtatgaattaatgttaaacatgcttgtaaatggagaaataaatatattctctggattatttaaagagtttgtaataaataatttaagctactttgatgtatcaggaaatgaacctgaaagggtttatcatgcctttgtacttggaatccttgtgtcactttcagaaaactacgaagttaaatcaaataaagaaagtggttatggcagatatgatgttatgataatcccaaaagatatctctaaaacaggaattattattgaatttaaaaaaattgattatttcttagatgatacaatagaagaagcaacaatagctgcattaaaacaaatagaagataaaaaatattctcaggagcttttacaaaaaggtgttaaaagtattataaagctatctattgtatttaagggaaaggaaataaatataactaaaggaaatgaatagttattattaacaatacatggtaattggtaagtagagagaacgaactcagaaattttttgtaaagaatcttcaagatgtttaggcatatgagaatatgtttagcaagagtttatgtaatgtaagctcttatttttatgataaaatacatttatcggaagttcgaaaaaattagtaatcatatataaggagaaaagaatgaatattaatattaataatccaataatagttcaaagcgataagactttattagtggaagttaataatgaattatatatagaagttagagataagctttcaagatttgcagaagttataaaaagtccagaatatattcatacttataaaatatctccaatatctttgtggaatgcagctacaagtgggatgagctaccaagatataatagaaattttagaaaagtattctaagtatgaggtgccacagaatgttattaaggatattgaggataatataaataaatatgggaaaataaagattataagagaagaaaatagtttatttttaatatcaaaagatttatacatcatgaaggaaataaccaattataagagtattgaaaagtatttcaaagaaaaaataaatgattttaagtataaaatagatgaaaatatgaggggagaaataaagctttcattaataaaactaggatatccagtagaggatttaggtggatatatagagggaaatagacatgaaatgagtttaaaaaagttcacttcattaggggaaacgctttcaataagggattatcaaaaggaagcttctgaaatattttatgcggatggttcagcaaaaggcggaagtggagttgtagtacttccatgtggagcaggaaagactgtcactgctatggcagttatggataaaataaaggaggaaactctgatattaactactaatataacagcagtaaggcaatggaaacaggaacttatagataaaatgaatatacttgaggaaaacataggtgaatatagtggagagataaaggaaataaaatctataacaatttcaacttatcagatattaactcatagaaagagtaaagttgatgagtttgtacatatgaatatttttcatgaaaaggattggggcttgataatatatgatgaagtacatacacttccagcacctatatttagagcagcagctgaaatacaggcaactagaagactggggcttacagcaactttagtaagagaagatggaaaagaagaagatgtatttagtttaataggacctaaaaagtatgatatgccttggaaggtacttgaaaaacaaggctggatagcagaagctcagtgtactgaagttagagtgaaaattccagaagatttaaaaatggaatatgcagttagtgacagtaaaagtaagttcagaatagcatctgaaaattatagaaagatagatgttttaaaaaacttaattaatgaacataaagacgataaaatacttataataggtcagtacatagaacaattaaatataatagctaaagaattaaaggtaccaataattactggaaaaactaaaaattctgagagagagcagttatttgataaatttagaattggagatatcactattttgattgtatcaaaggtagctaattttgccatagatctgccagatgccagtgttgctattcaggtttcggggacgtttggttcaaggcaggaagaagctcaaagacttggaagaattttaaggcctaaaaaaggagataatagggcttatttctacagtattgtgacagcagatagcagagaacaggaatttgctttaaagaggcagctgtttttagcagaacagggatataagtattatatagaattaatagaataaatggagtgagtgttgtgttaaaagaaatgatagaaacaatgacaacatatggaagtttagaacttcctgattatttaaaaatagcaggaataaaaatgacttcaagaagaaaagcagatatggtaaaggctttatatgattacttgagcaataaagaaaatataataaatatatggaaatgtacaattccaaaagaaaaagaacttatctcggagtttataagagctggaggtactcttgaatatagggagataaaggaaattgtaagtaaatatgaaataaatcaagaaaaaatgttatttggatatagtggttatggaaatggaattcaaaaatatttttatagtgagtctagagctaacctgctttttataaaaggaaagatgcctatagaaatttataatatattaaaagaaatggtagaacctatagaggtaaaattcttagcagaaaatttaggtgttgataaatacttatgtgatgaggacgatagtgcacttatttctataagagaggattttgagaaagaacttacttccataattaaacttgttaattctactaaattaaaggttacacaagcatctcaaatgccaaataaaactgcaatgattaaaataaatgaagcattaatacataaagacatattttttgatcaggatataagtgaagttaggataatcgataatactacaagaatttatggaatatctaagttactacttgaaagtaagatcttacaaagtgaaaatggaaacttaatacttggaaaaatggcagaagagtttttaacaatgaacacagtagaaaagtgtaaagaaatattaaatgcatacatatttgctaaagatatagatgaattaaaaagaattaaggaattaaaagtaaaggctgagtactatggaaactatgcaaattgtagaaatttaattctaaattatttagaaaaagttccaattaataaatggattaacatagaacagcttttaagatatataaaaaaattagataggaactttttaagaaaagaagttggaacaatatacacttattctgattatgaacgttattattatccagatcaaaattattgggaagaagaagcaggaagatttatagaagtagtgctaatggaatatttaactgctattggaatggttgatgtattaataaagcaagattatactgattatgatatagaatattttaaagttacatactttaaattgacttcacttggggcatacatacttggaattaacaaagattacaaaatagaagaaatagaagatgaaacaggaataataattcagcctaactatgaaattatggttccaggaggtttaatgaaagatgttcattgtataaacttagataaatttgctgaaaaattatcagaagatacagtaagtatatataaaatatcatttaaatccatggttatggcattggataatgatatatctatagaagaagtaatagaatatttaaaagatgcctcaaaaaataaaattccagaaaatgttcttatgtcattaaatgaatggaatgaaagaagtaagaagataaaaattagaaaagttacaattgttgaaactgatgataagtatttattagaagagctaaaaagctataaagaaataaagaaagatatagctaaggaattgccatacgcatttgaaattaatagtaaaaatgctaataaagtcaaaagaaatattgaaaagaaaaatcatttttgcattttagaataagaaacactaaattttaaaagataaatggaaaatcaaggatgttaatacttggtacatttccatcagttcaatcaagagaagctcaattttattatgccaatgctagaaatagattttggaaagtaatagcaggaatttttgattgtgatgaagctaatacaacttttgacaagaaagatatgcttttaaataatggaattgcgctctgggacgtaatagaaagctgcgaaatcacaggatcaagtgatagtagtattaagaatgtagtaccatcagatttatcgattgtcttgaataatgctagcattgaaaagatatatgcaaatggtgacaaggctttcaaactttacatgaaatatacatatccaataataaaaagagatattataaagttaccttcaactagtcccgccaacgctaaatttacattagatactcttatagattattgtaaatgcataaaagagtaaatgcagtaaaaaatgatatttcagtggaagtacccacagtgcttttgttaaaaacatagatgagataaaagttgatagtataggaatcagtaatatagatcaattaaatattcatttaaaggactatgggtttgaataaaagttttttacaatttaagaataaaaaaagttaagaagattagaaggaaaaaaattttagtttcttaatatatggtataataactactatataagtggttcgggtatcaatgtaaaagatagaatacaactacggaaaagaggtgttgattttgaacagaagatttaatacaacaggtgtttgcattcctcatttgcattatatggttgatataacaaataagctgacgcaaataaaaagtatggtttatagaggagattatttcgttataaataggcctaggcaatatggaaaaactactacaatgtatatgctagaacaagaattgaaagacgaatatttagttttaagtattagttttgaaggtttaggagatttaatatttgaggaagaaaaaactttttctaaaacaatattaaaaatcttcggagatagtatccagtttaattaccaagaatattcatctaaactttatgaaatgtctgaagatattaatgatttaaatgctgtgtcaaaagctattacaaatttctgtagaattgttgacaaagagattgtactgtttattgatgaagttgataagagctctaataatcagttatttatgagctttttaggaatgcttagaaataaatttttattaaggcaacagggtaaagataaaaccttttattcagtaattcttgctggggtgtatgatattaagaatttgaagcttaaaatcagacaagatgacgaaaaaaaatataatagtccttggaatatagcagtaaatttcaatgtagatatgagttttaattcagatgagataagcaccatgttaaaagaatattcagaagataaaaatgtgacaattagtattaaagaaatttcagaaataatttatttttatacaagtggttatcctttcttagtaagcagactttgtcagataattgatgaaaatcaattattatggaatgaagaaaatattaatagatcagtaaaggaattactacaagaaaataatacactttttgatgatttagtaaaaaatattgaaaataataatgaatttaaagactatatatttgatttaataattaatggtacggaaaagacttttaatattcataatccacttataaatttaggagttatatacggatatttaaaaaatatagatggaagagtaaaaatatctaacagaatatttgagcaaatgctttataattatttctcttccaagcttgaaaataatacagatatgtcaacttataatttcaaagaaaatttcataattgataatggattagattttgaaaagatacttttaaaattccaacagtttattaaagaacaatacagttccattgactcaaaatttatagaacgtgagggtagattactatttttagcatttataaaaccaataataaatggtgtagggtttgatttcaaagaagtacagatttctgaagaaaagagacttgatatagtagttagttatctttcaagtaagtacgtaattgaacttaaaatatggagaggtgctgaataccataaaaaaggattaaatcagattaaaaactatctagatattcaagggttagataagggatatcttgttgtttacaattttaataaagataaagagtataaaaaagaaataatacattatgaaggaaaggaaatatttgtggcgtttgtttagatagtgaatagttattagtaatttttgcagagcatcatactatttaaagatggagagtgaagctatgacaaaaaggtttaatacaacaggcgtatgtgtacctaaaaagcattatatgatagatatatcaggaggaattgaaaaagagcttaatttattaatatgtttttaacttagctaactcctaaatgagttagctaagttatttattttgttatctttttaataagtctttagataacttgaagttttttaagcatcctgctttaggaagctgtattgagctgaatacagtttataataataaccatgatttttaagaagttcatcatgagtgcctgattcaactattttacctttagaaagtacaaaaattttatcacaatctcttatggtagaaagcctatgagctattactattgaggttcttcctttcataagcttttttataccttcttgaactaataattcagtttcagtatctatatttgcagttgcttcatctagtattagtattcttggatctgcaattagagctcttgcaaaagctattaattgtctctgaccaagggatagtcttgaacctctttcatttacatcagtatcatatcccttttctagtttttcgataaactcatgagcattaactgcctttgcagcttgtactacctcttcatctgtagcgtttaatttaccatagcgtatattttctttaattgaggttgaaaataaaaatgaatcttgaagcattatacccatttgacttcttaagctttcaacagtgacgtcttttatatctaaaccatcaatttttacacagccaaaggtagggtcataaaatctgctaattaaattagttatggttgtttttcctgcaccagtttcaccaactaaagctattttttcgccagcttttaatttaaaagaagtattcttaagagccggaatatcagcattagtataggaaaaagtaacatgatcaaattctatatctcctttaatttgagggagagccttaattgatgcttcatctacaatatcgcttttggtatctaaaatatcaaaaattctttcgccagcagacatactggtgacaaaagcattataaaatgaagatagatttataataggtctccaaagcatttcaatgtacataaaaaatgccattaaagtacctaagcttaaatttccttgtttgcttaacaaatatccagagccgagtagaattaccatacttaaaccacggaatgcagtcaaaaatggccaaaagaaatcttgagtaaatacagcagtcataaaaccatttgcatgatttccaatatggctgtcaaatttatctttagcgtaatattttctgctaaagccttgaattaccttcattcctgataaggattcatgagtgtatccaattagcgatgaacgatgttctctaaaaattttccatttattatctgccttaatttgaatgtagaacattgcaaataataataaaggcattgtaattaagcagataccagccagcattgggtttaatataagcattagacaaattacaaggataatagtaaaaacattaggaattaaatttacaatactattatttaataaattttgaagagcatttacatctccaacaactcttgaaataatctttccaacgggtctattatcaaaaaagttaaagcttaaagtttgtatatgagtatataagctatgtctaatatccactaagatttgattggtaatcttagacatggcgatagttctgattccagataaaatcattgaaaatacattcataagtattaacccacatccaagaagaattaaagccttaacatttttttctgcaacaaaagtatctatagatatcttcattaaataaggggtaactgaattacaagccattacaataagtaaaagtaaaattacaagagtaactttcagtttataaggtttaacataggttaatagtctttttactatttgaatctttgatgattcatgtaaaatatcattcatattaattcgcctccaatgtaagtgcttcaaaatcctgaaattggtgagaatatacactatgatagtaacctttagcctttactaaacttgaatgatcacctttttctacaattctaccatctttcataaagagaattatatcagcgtcttttacaccagatatcctatgggcaattataaaagtagttgcttttttcttatcattttttagattttgaagaactttaaattcagtttccatatcaagggcagaagttgaatcatccaaaattaagataggtgattttcttaatattgctcttgatatagcaagtctttgtttttgtcctcctgataggccaagacctctttcgccaataatggtatcaaaaccttctggcgtttctttaataaaggagtaagcagcactatctttaacagctttaattaaagcactttcagatttatcacttccaaagtctatattgttttttattgtatctgaaaataagaaagtatcttgaaatacaacagacatattagctcttaaagtttctaagttccagttcttaacattaacattatcaactaaaatttctcctttagtcacatcgtaatacctgcctattagagaaagtaatgtgcttttaccacatccagtggtacccattattgcaacagtacttccgtgaggaatatttaaatttatatcatgaagtacttcaacattgttataagaaaagcttacatttttaaatataatatctcctttaatttcagtagggttatagccattttccttggaagtaatttcagaatttctatctaaaatatcagttatcttgctcatagaagctttattttgtgaaagtaagttaataaaaaaacctaaattctttacacaccaagaaagattaaaaatataactagtaaatgctactaaactaccaaaacttaaatttccttgaatacataaataaccaccataaacaatcattaaaattggtgcagcgtttgttaaaagttcaattataggaccataagtcccaactatttttgcttgctcaacatttaaatcaaagaattttttgtttactttcaaaaattttgatatttcatatttttcacgagcaaaagcttttacaagtcttataccagaaacatcttgctgaactatagagtttatttcggctgtttggtcactaatttgtgaatatacagtccagaacttcttgtccataattgttccaatataagcaacgggtaataaaacaagtaagcagataatagttaaagttttatttatattaaacattataaaagcagaaactgaaaaaagtattattgcttccaatagcaatctcattccaaaggatagagtgtcccatactacatctacatcttcaataattctcgaaagtaattcaccagtgttattattatcaaaaaaagagaattcaaaagattgaaatttagagtacaaatcttgtctcaattttttacatactataagagcaaatttatcgaacaaatactcatttaagtaagaaaataaaccatgaattagcgcaactgaaacaacaattattaaaaatataattaaataattctccatatgaccaagaattatattatcaataaatatcttttgaaagtaaggataagagctatctgcacagatggaaactatcatagcaaacataggcaaaagtaataatttccattgttttgcaatgtaatttttaaataaggtcataaaatttcctcctttttggcatatgatttcaataatctgatagttaaatatgcctagatattgtatgatgtttaaaattttaaatttataaagtttttaattaggtgcatgaaggtaaataataagttttgaatatgccctaagttaaaagaagcaactttataaacccttaaacgcaaaaaagacacagctattcagagctgtgttcaacgcaaaataatataaaagttaaatgctaaaagttagtgatagatatcacatagcggttctttcgcgaggtttcacagatgaataagtacatgtatttaattttataaatgtaataaataatataattgtattcatagttcaacctccttaaaaaattattttttaaacatcatgttgcaaatatactacaaattaacaaaaaaggcaagagaataatttaatttcaatagattattttggagtttggttataatcgattttaccacctgggaactccaaaagatttggtgaattcataacaggagagcataaagaacataatatttctttgttttcattttttataattgcagctacaacatttattcttttcttcattttttacaccttaaaggtattttgcagggttaagaattttttctcagagctgtgttcaacacaaaataatataaaggttaaaaaataatatgactatataatacttagaaatttttatgaaattcattttatgtaatatatgctataataaaaataaaaactggaaaaacatagaaagagtgaataatatgaaagaaacaataaatagaataagaaaattccgaaatgacagagattggagtcaattccacactccagccaatctatctaaagctatatccatagaagcaggagagcttctagaagaatttttatgggatgaagaaaactataataaagaacatgttttagaagagttggctgatgttatggtttattgtatacatatggctgattcattaggagtagatttagaggaaattataaatagcaaaatggataaaaacgaagaaaaatatccagtagaaaaagctaaaggtaacagcaagaagtacacagaattataaagatcatatttataggctgagatttttttatatttagaaaatctcagctttattatttttcactgaatcgcatcaataaaagggtcaggcccttttataaatttaccaaaagtctccttaactttacaacaattataaattatgatattataacaaaaagattggtaaagtgttatcaaatcattatgaaaatatgaaataaattatcataatgatattaaaattagtagtacagtaggaatgtgttaattatgaaagtgaaaaattaggaggacagtaatatggtaggaaaaagaaaattggcaatgttattatgtacagttttagtaggtggagtgctttcgggatgtggacaagatacaacaggttctagtaaagagaaaactacttcatcagaagtaaaaaatattggaattatacaattagtacaacatgacgcattagatttaactaataaaggttttattgatggactgaaagaaaaaggatatgaagaaggaaaaaacataaaaattgagcagcaaaatgctcaaggtgatcaatcaaatgcacaaaccatatctaaacaatttacagatagtaagaaggatttaatctttgcaattgcaacaccagcagttcaagcggcgtacaattttactaaagatataccaatagtatgttctgcagtagtagatccagtaaaagcaggagttgcaaaggattggaagagttcaggtactaatgttacaggtacatcaaataagactccagtagataaacaaatggaattattagtaaagttaattccaaatgctaaaactgtaggggtaatttataattcatcagaaactaatgctgtaattcaagttaatgaatttaaggctgaagcagaaaaacatggaattacagtaaaggaaatagcagtcactaatacaaatgaaataaatcaaaacttatcaagtgctcttggtgaaattgatgcactatacacaccaacagataatacagtagcttcaagctatacattagtaggtaagctttgtttagaaaaaaatattcctgtaattggtgcagaagacgctgcgattagtaagggcgctcttgcaacattaggtatagattactatgaattaggaaaagaagcaggctttgaagctgcagaaatatttgagggaaagaagccttcagaaattgaaataacaaaattaagtgaaataaaagtagttataaatacagatgttgcaaagaaattgaatattaagattccatcagatatagaagctaatgctgaaaaagcaacaggtggtattgttgaatagtagtgactaatttactaatgcacaatcaaaaaaattgaacttgttattttatttcatgtccctaattattaatggaagtagatggtgattaaaaatgagtataaaaactaggaaaatagtaatagttggaagtggaaatgtaggttcacattgtgcattttctctagcaatacagggtatatgtgatgaaattgtaatgattgataaaatagaaaataaagcaaatgcagaagcagttgatttaagtgatacaatttcatatttacctcattatgtaaagagtaaaaaaggaacttttaaagattgcgaagatgcagatattgtagtagtaagtcttggagttccaccagaggataataaatcacgtttagattacttagaagatacaataaacgaagtaaatactataatagatccaatactagaatcaggatttaatggtatatttatagttatatcaaatccagtagacgtaatagctcattatatatggaaaaaaacaggttttccgaaaaacaaagtgtttggaactggaacaacgttagattcatcaaggcttagaagaatattatcagatgaagcaggcatagatcaaaaatctatacaagcatattgcatgggagaacatggggattcacaaatggtaccatggtcacatgtgtattttggtggaaaaccattatttgatttgatgaaggaaaaaccagaaacttatggaaatcttaatttagatgagttagctagtagaacagcaaatgcagcatatgagataatagctggaaaaggatgtacagagtttggaataggcgtaggtttaagtgaaatagttaaagtaatacttcatgatgaaaagagaatacttcctgcatctacattattagaaggacaatatggtgaagaaaatgtttttgcaagtgtacctgttatattaggcaaaaatggagtagaagaaattgttgaaataaacttaacggaaaaagaaaaatcacaatttaatcatacatgtggaattttaagagaatatatagagaaagccaatacactttaaagttgaaagaaccctaaaacaagggttctttttttgcaattaaattagatattttatattaataaatttagctatttggacttaagaatcacctttctaagaaaattgggttttcaaaagtagatgatacaattcatttaatccatatatatataatcttatattataattttattataatctttgaacatttgtagccataggtcccttttcgccactttcaatgtcgaaggtaacactttcatcttcatgcagatctttatcaggccctttatctttaatttgtgaatgatgtacaaaaacatcatctcctttgtcacaagatataaatccatagcctctttctgtatcaaaccatttaactacgccagtaactttagccatgaaaaattcctccttttgcaataattatattttatagtctttgttaaaagaatggattttaaacattaaaataatataataaatcaaaagattaaagtaaaaaataataaactttaagcttttttttgatttatattaaattctaatataaaattagaaaaaatgtgttataattataaacaaaagaatattatgggaaaataggtttaaagtgcgagtttatttgtcgaatttggcaataaaacagtgcaacaatatttttgcagagagtaatggtataaaaaaatagcgaaaatgaatttggaggtgattttattttgaaattaagtaatatcaaaataaaaaataaattacaattattaagttcaatactattgatttttacagtatttattggtgttttcggttacattcaactaaaaataagcaacgataatatggagttaatgtataataataaattaaattcaattaactggttaaatgataatagaaatcaggcaagggcaattgaagcagatatgtattacataatgttatatccagatgataaagataaacaaaatgaaaaaatgaaggatattgaacaaagaaagaaaatgtttgatgataactttcaaaactataaaaaggtagatttagatacgcatgaaaaagatatgattccaatgatagaaaatgatttatcaacatatagacaagcaatggatgagatattaaaacttgctttagagggaaagcaaaaggaagcattagaaaagaatgaagatattaaagatgtggccaacaattttcaagcaaatttaaaagagttagcggtgcatactgtaaaagaagccgatgagattaatgagttaaacaatgagaattacaaaaagataacattaatctttcttatatctatagctgtttctattatagtaggatatttgatgtctaagattatcacaaaaaatatagttaaacctttagatatttcagttaattatttggacatactatcaagtggagattttacaagtgaagtacctgtagaatttaaaaagagaaaagatgaaataggaacaatggcaaaagctttagataatataaatggaagcttaaaatcattaattaaaaatattgtagaagaatcagataaaatagaagaggttgttaacacagtgaataatgaagtgaaaattcttaatgggaatatagaggatgtttcagcaactacgcaggaactttcagcaactattgaggaaacctcagcttcagcagaagaaacttcagcaacttctcaagaaataggtaaggcagtacaatcaatagctgaaaaatcacaagagggagcgattcaagcaggagaaataaataaaagagcacaacaaactaaagaaaatattgaaaattctcaaaagacagctcataatgcatttgtaaatacaaaagatggacttgaaaaagctttagaaaagtcaaaagtagttgaagaaattaatgtactatctgattcaattatgcagataacagaacagacaaacctattggcattaaatgcagcgatagaagcagcaagagctggggaagctgggcgtggattttctgtagttgcagacgaggtaagaaaacttgcagaacagtcaaaagatactgtatcagaaatacagaaagtaacaaataaggttagagaagctgttaacgatctttcatataattcaaataatcttttagaatttgtgtctaaagatgtaaagagagactatagtaatatgcttgaagtagcaggaaaatatagtgaagatgcaaaatttgtagatgaccttgttatggactttagttcaacatcagaggaacttttagcatcaattaatgatattttaaaaactatagatggggtagcagaagcaacaagcgaaggagcaagtggaacggtagatatagcaaataaagtttcagaaattagtcataaatcaaatgaagtattagaacaggttacacaaacaaaagaaagtgcagaaaagttaaagactgaaatgtctaagtttaaagtttaggctatatatctatgaagaaaactcaaataagtaatacaataaatattaatattgggcctgtaacaaggctctttttttattctttatgaatttatattctctcgactacaacctctgagggccataaattatatacttagtaactgctaaatgtatttgtgtaaaaattttcatctgcaatcaaagtaaaaacaaaaaattaagatgtctttgtgattatatgttataattattttttagtgagaaattatgtaaatatatgaaggggatcgaattaagtctcttcaatgtttaatactagcttttgaatttagtatacatatattgttaggagaatagaaaaaatgaacttagatattgatttagacaattttgaaataaagagagagttacttattaaagtggatacaaatggagtaattaaatctatttctaaaaactgttataggattttaggatttatgcaaaatgaaattctaaatactaatattgataaatttttaggttataaatttaatgatttattatcacgtgaaagttttgagactttagttttaaaaaaagatggtaatcagttactttttgaggttgtctctaaacctgttcttgatgatggttctaaaatagttggagcatacctatctcttatagatataagcaaatatcttcacattgaagagaggtataatcagctaatcaaaacgtgtgaaaaaactcaggacattttttttgcatttcaaattttacctgagttcaaatttatatatcttacttcttcaattgaagagattttaggatatgatctagaaatacattatactaatgccaatttgccatttgaaattattcatcctgatgatcttcatatacaaaaatctaaaatagataaaaactcggatttttccaaagctttttgtgcaagatttaaacataaagatggacattatgtctggatagaggattttttagttcctacatataatgaaaatggggatttggtatctgtatcaggatttagcagggatattacagaaagaaaaaaattagaaaaaatgctagaagaacaaaataaattattggaaatggatgttactgctgaaataaaggcgaataaaatcatggaaaatacattaaaaaagcaggaagagttattagttaatatatctcacgaacttaaaactccattaaacgtaatttcggcaacggctcagttattagaaatgtattatatggatgattcaataataaataaaaaggatatatttattaaatattttaaatcaataaagctaaatacctataggttatcaaagcttattaacaatatagtggactcatcaaaaatagaagcaggattttttcaacttaacctagtaaatgtgaatatagttaatgtcgtagaagaaatagttatgtcagtaacaagttttgttaaaattaaaggcttaaatattatttttgacacggatacggaagagaaaattattgcgtgtgatccagaaaaaatcgagagaataatgctaaaccttatttctaatgctacaaaattttcaaatgataatggtgaaatatttgtaaaggttaaggatatgaatgaatgggttgaaatatcagtaaaggataatgggattggtattgaagagaaaaaattggatattatatttgatagatttgaacaagcggataaatctttgtctagaaatgcggaaggtactggtattggattgagtctagtgaaatctattgctctattgcatggtggcagtataaatgttgaaagtgaatatagaaaagggagtaagtttactgtgacccttccagctggagcagtagctaaggaaaatatgatatatgatagaaatattaaaaataaggatgaacgtataagaatagaattttcagatgtttatttttaacttttaaaattatgaattactaaaaattcaaaaatatattttagtgcataaaagaaaataacagatcaaaatatgctgatgaattaacttggtattttcttaatagtgccttaattggtacaaacaagattaaaaaacccgcatctagcatagatatatactaaatacggttttttaaagagcataacaatcttcactagcacaataatagatagcttatcatcatattataatctttcgactataatacaacaaatcacaaccaattaccatgtttcgctccaccacacaacatatttattcaacttaatataacctcacagctgtattaaatcaattcaacacattgaataatgttaactcgaccttaaataataagttggagtactattataatagatataaatcaactataataaaacttttccccaccagataaaatcttatcgccgactatcataacaactatatgttataaccattataaaatctttgttcgacttatatacaccctcatatcaagagcatatagaaatctttgctcgactgttatgttccttatgatattaatatgtgtagttttgttttgaatatgcattatacgaaaaataaatcaaaaaatatttaatggaagttgtattacaaaattatttcaaggatattaaaagaggatttcttatagttttttagaaaaataaagaaattgagaaatgaggaaagatatagatatccgaaccaggaaattcacttatacatttaatgtttccattagtattacatgaattagaataatgaatgtgtcaaatttataatttgggtatctataataaaaataattaaaatctggtagatcaaggattgtattaagggatacttctaattttatcatctaacaagaacatatgtgcgtatattttgttcgatactggaaataattataatatagacatatgagtgatcaaacctaaatttatgatataatggaggtagaaatatggatagaaaaaatgactcatttataaacttattataaatattaggatgtgagaatatgaagtgggaagaagtaagaaatatataccctaataaatttgtgcttttaagaagtttagaggctcatattgaagagaataaaaagtgtatagatgatgtagctgtagtaagagttttggatgatgaagaagcgagcaatatattaattagatgtaaaggcgataattttgtatttcatacatcaaaagaagaattatcaatgaatatagttcaaatgccagtattaagaggagcaattagatgaagttagaatataaaaatggtttgttatttgttgatatgaatattggatataagggcaataatgtattaattaataatgtggttgtagatacaggtgctgcacatactattattaatccagatagtgtatataaattagggattaaagcggaagcagaggatgaatttatcacaatgtatggtgttggtggcgagcattattcttataggaaaaatattaattcagttaatataggaagaaattgtttagaagatgtaaatatagattttggattaattgatgaagaaggatatataaatggtttacttgggcttgatgtgttgttaaaattaggtataactatcaacttaaaagaattgaaattatatagctgttaaggtgtaagaatctgataaagaaatatttcataatttgaaagtcttaattttgacactagaattcgcaaaaagctatccgcaaaaggatggctttttacatattaaaatttaaaagttataacttattttaaaagcttataactagtgcttgctcctgtcaatcgttgggtctctggggtgtttaaccacgagttcattaaataaacggtagaaatacatgggtatgatataataaaaaggttagtatacatattgttatatagattgtaatgataaagagaaaatatcggataaaaatgtatgtttgtaacaataatagtaagaaatatagaaaagagatgatcaaatgataaaagcaaattttaatgattataagttatgcaatgagctattaaaagcaattagtatgttaaatttcaatgagttaacaaaagttcaagaacaggttataccgattgcgttagaagaaaaggatatagtagtaaagtctaaaaccggaagtggtaagactgcatcatatgctattcctatttgccaattagtggattgggaagaaaataaaccccaagcattagtaattacaccaacaagagaacttgctatccaagtcaaagaggattttttcaatataggtagatttaaaagaattaaagcagctgcaatttatgggaagtcacctttctatgatcaagaaaaggaacttaagcaaaagacacatatagtagttggaacacctggtcgtattatagatcatatagaaaaaggtacatttgatctatcaaaaataaagtatcttataatagatgaagctgatgaaatgcttaatatgggatttgtagatcagatagaaacaataataaaaagcttatcaaaagaacgtatgaccatgttattgtcagccacaatgccaaaagacatagagactttatgcaataaatatatgaaagatcctatacatattgaaatagaggatcaaaataaagctgcagataatatatgtcaagaaagatataacgtaaatgaaaggaataaaatagaacttttaagagatataactatattagaaaatccagatagttgtatgatattctgcaatacaaaacaaaaggttgatgaagtttataaggagttggcaaagctccagtataattgtagaaaaatacatggtggaatggaacaaagtgatagattaagagtaatgaataattttaagctgggttattttagatatttaatagccacagatgttgcagctagagggatagatatagataatatcacccatgtaattaattatgatataccagaagacaaggaaagttatgttcataggataggaagaactggacgtgcaggcaagatgggtagagcaattacttttgtaacacaaaatgaaagtaagtttttaaatgatatacatgaatatataggcaaagagattcttttgaaggaaagacctaaagtggaaactataaataatcttaaagaagaatttgctttgaaaatgaatacaagacctgaaattaaagaaacaaaaggtgagaagctaagtaaagagattatgaaattacatattaatgcaggtaagaaaacaaagatgagggcggtagatattgtaggcacgctttgtaatattgaaggcatgacaaaagacgatataggaatcatcaatatagttgatatatctacctttgtagaaatattaaataataaaggagagtgggtgttccagcagttacaaaaaacacctatcaaaggcaggcttcgtaccgtaagtaaagttgatatataagaataaacaagattatctttatgaatttgaaaataatattttacctgatgacgttttaatgttgtgagagcgagtagttcttatgaagaggtaataaagaagtctatttttctatttctaagataaaaacccccgacatttgtcgggggttttatgtagttttcatacctaatattttaagtgtaatagttttcgtttgtttgaatttacttatactacagttatattatatttttggattttaacttattaatgctttgcttaactaaatcaattgcttcagacttactctgccccttatgctttatctcattatcacctatttttgcaattgccttatatgggtattgattttcattattctgtattacgattatttcatgatctccatatttctccataaagcataccacctctatatatttttatcttattatatcatattctaaatattttgaatattccttcttttaaaatttttctgaaaaaatactcaaaactaaacatggaagaaatattaagaattaagacttgaataactggatgatatgggggattagtttgaataatgtaaaaagtagacttaataaaaattattatagtaaattattttttagtgttaatataaagtgagtcgtataattaaattatcttctaaaagtttaaatttaattgatggtaataatggggctaaatatgatgaatgagttaatacttatgaaaatagggggaagacttattaagcattaagctacaacaactttgaaaattcaaagaaagtaccaatcataaggggaatatgattggtactctttatttattaggaaaatttattttgcaggggtaaatccttgtttcttcattgcatccttaacttttggataatatatattttgataaacacttgaagttaaagtactccaatttttttctttgtcatatctgccgatgtcttttaagtaagcttccatttcttcatcgtagctatcaatagaattttctatagcttctttgttataagtatcattgtgtctaaagctttcaaatggaattcttggcttagtgtgtgattcatctgaagggtatcctattgcaaggcctacaagtgggaatgtatatttaggcaaatctaagagttctataacttcttctggattttttcttattccaccaattggaacagttccaagtcctagagattcagctgcaattattgctgcacctaaagtaattccactatctacagcaccaactagagcactttcaatgtcttcatgtattatttgcttagaaccagttttttcgccagctaaataagttctataaaaatccattacgaaaactaagaaaacaggagctttagctacatattcttgatttccaacaagttctgcaagtttttctttttttgatttatctcttatagctatgacagttgtttgctgaccatttattgaattaggcatggcttgggcagcttttattatttcatctatgatttcatctgaaatatccttatctaaatattgtctaattgatctatgattttttatattttctattgtattattcattttattcaatcctttcaattttacgatttattacaatttcattatagtcttatttttaagggaagttacaccttctggagtatgagttgataaataaactgtatcattttcttttataaaagttctgactttatttaatgtttcaattgcttgtactttatcttcaaagacaacagataattggttttgccttaaagcttcgtctgtgtaagtaacatcaccatgaatcatgtagtgaataccgttatcataaacaacaattaatgaatttccagtagtatgtccataagctggcagcatataaatattttcacttataatttggcttttatcaaagtttttatactgtccatcagtaaaattaacttcaactaaattgtcggctgcaatattcatagcctcaagctctatttttgatatataaatctttgcatgatcaaacattctaagttcaccggcatgatcgggatgtttatgagttaaaactactttactaacatcttctggagcataacctacattttttagtgcttctttaaaattagcaattttttcacccatatataaggcttgatcaggtttatcttcaaaatcaggagtctcaactggtaaacctgtgtctactagaataacctcttttccagtatctattaaataattttgcaggcttgcagggtaatctttgtttatattaattttttctttttcaagtgatcctccaaatgcaaaagattctttcattcttccatttttataaaattccaatgctaaaattctcataatctattcctccgatgtaattaatctttatacgacatttaatatgagtaaattatatttaataaaattaaatttgtcaatcggtattttggcttaaataaatagaatttattaattacttgaaagattaggagaatcatgagtgatattgaagctacaaaagaaagaaatatagctgtatgtaatgtagtagggtatagcatctcagttagttattacatttatatacttcttattttatttttttagtagaacatatgtacgtataatttgttagcgtttggaaataattatagtatagataaatgagcgcttaaatctaaatttatgctataattgaggtaagtgaatggattataagagggctacaaataatgtacatgataaatcatataaagatctttattcaaataaattagtgtttgttaatttaattaaagaaatgcttaatgcatcttgggcaaaagaattaaatgaagaaaatttaattttagtagataagcagtatatattagcagactatgaagaaaatgaagcggatattgtatatagggcaaatgttggtggagaagaaatcatattctatacacttttagaatttcaatcaactgtggattatagaatgcccttaagattattcttttatattaatgaaatacttagagaatatactaaaaatttaacagaggaagataagaaaaatagaaaaggatttagagttccagcagtaattccaattgtattatataatgctataagaaagtggaatgtacctctttattttaaagatatagtaaataaaaatgagttgtttggtgagaatatagtaaactttaaatattcacttattgatgtaaatcatcaatatacaaaagaagaattaataaaaaacaataatattacatcagctatatttttattagatcaaaaggtagaaccattagaattttttgagaggttaaaggctgtagcactaaaatttaataaattaacaagtagagaaaaagaaatattgaaacactggcttaggaatactgttgatgaaaccgtaagagaaagtgttgttaaaatactagaagctgataaagaaggagtggaaaatatggtagcaaataatgcttttatgattaaagaaatgaaagaaaaagttgaaaaagaaactagaaagcaagatagaatcgagattgctaaaaatgcaataaaattgggtatgaatgatgaagatataagcaaattaacaggcttaaatgtagatgagatatctaaaataagattcaagaattaatttaagagataagctgagattttctaatatttagaaggcctcagctttaattattctaaacaaaattatattatagtcgatataaaagtgcaaaagcatagtaagaaccaataagataaaagctacaataaatagagttcatcaaaagatatattatatattaaaagcttttaaatatttagaatatttcgaatatcatgttttcgctagaggttggattataaatatgatacaataactaatagaaattattatataacattaatactttattttgagaattagaattaggagagatacgcgatgaaaactgatttattagaaaaaggagcaatattacaaagggataaggaaacatatgcaattgctccacatttaactgctggacttgtaactccagagattttaagaaatattgcagatgtagctgaaaaatataatgcagcggctattaaagttacaggagctcaaagaattgcattagttggattaaaagaagaagatttagataatgcttgggatgatctagggatggacccaggtgcagcagtaggtctatgtgtaagaagcataaaaatatgtccaggaactactttttgtaaaagaggtcttcaagattcagtagcagttggttcaaaattggacagcttatatcatggaaaagaattacctaataaattaaaaatgggagtaagtggttgtcctcatagctgtgcagatagtgcatttaaagatataggattaataggaagcggaaaaggatggatgttctatgttggcggaaaaggtggagctagaccaagaatagcagatagaatagcactttctgtatcagaagaaaaggtatatgatttaatagaaaaagttattgaagtatatagggaaaatgcgactaacagagaaagattaggagattacatagacagagtaggattagatgagttcaaagaacaaataaatcttaatagttatttataaagtgaaaattttaagacagtattttatctgaatagaaaattttcaaattaatgaacaaatcaattagtttaaattaatatatctaatagtgtaaaaaaatcatgctaaataatagcatgattttttattatttcgagtacagcaggaatatctgcaggagcccacttcaaagaaagcaggctttctggtttcagccataataaagctgcgtgttcattagctttaggatagctatctactaattcgcagttagtagttatcaaatttacaataaaatcatcgtattcatgcctattttcattatgtatattaatatatcgcactttacaattcaattcttcaaagatttctctttcaatagcttcttttggagtttcattatcctctattttaccacctgggaactcccaaagatttggcgatttcataataggagagcgtagagcgcataatatttcttcgttctcattttttataattgcagctacaacattaatagttttcttcatcataacacctcaaaaaatattttataatatatgaattgtattttcaaataaacttgtaaaatttaaaccttcttttaaataaaccttgttaacaataaacattttttcgaaggtttaattaaatatttttaaaaaggaacaaaggtctaaataaaactttttacctttttaaaaagttaagaaggtaaaaatgaaaaagtctatggttaacaacaatatggaacattattgataattatggtaaaatacaataaattggtattatgtaattttaggaaaaataggggaataatatgaaaaagttaaaattaacaaaagtaatagctagcgctttggttgtagcttctgtattaatgttaaatccaataggtgcaaatgcagaatggaaacataatttagcaggatggtggtatgcagaaggagattcatgggccacaggctggagtcaaattgatggaaaatggtatcactttaattcaagaggttatatggaacatgataaaaccattgatggatactatttagatagtagtggagcatggaaagaagtgatgacaacaagtgaaaatttgaaatttgataaattaactggaacaatagtaggatatagcggagttaacactgttgtaaatatacctagtgaaattgatggtgtttcagttacaagtataggaatcggagcattttctactgataatagctcagctaaaatagagagtataacaataccaaatagtgttacaagtataggagaaagcgcctttgaatgggacagcaatttaaaagcaattagtatacctgaaagtgtaaaagaaatagagaaagcaacatttaatggttgcaatcagttaactagtgtgacaatgcctaacggtctaacaagtatcgggcaaggggctttttcaggctgcgtaagtttaaccaatataaaaataccagataatgtaatagatataggagaggtagcttttaaaggttgccaaaatttaagatctgtagatatacctaaaagcgtgcaagttgttggatggggagcatttcaaagttgtgataaactaacatcaattaatatacatagaagtacttttgttgtaaaacatgtatttgacggaagccctaatgtaaaaataacaattgtaaattagaaaaataaaataacattctaaatgataaatttaatattggaaatgtattcatgctatatttacaaataaaaagagagtagttttttgagaaaattaaaagtaagttaatagtgtccataaatcaaaactttttgaaaaaaaatattggctattataataaaaatatgttgcgcttattacgcaacatatttttattattagtttatttatgcattatttatgttttcaacaagcctcttatttttcatattacgacttctctttttatcgctgaataatgcaaacaatatacctggcaagagaattatagcgctcactttaaatgtaaaactaaaagctttaacagtataagtcaaaaaggtatcttgtatattaggtattattttttgggtttctttcttttgagtttcaaaaatctctttgattttatctttatccacagcaggagaagaggttaacacagcagcttctttttcagcaattgtatttaatatttctgaaagactaacatttttattactacctgttttgatagaagtaatcatctgttgctttgtttcatcatcaaatacagtgtcattctgtattgtttgaatagcagagtctttagcatcatacatctgggtagtcatatttgatgtaaatatagttaaaaataaggcaactccaagtacagtcccaagtgttcttgtcatattatttattccagaagctattcctattttatctaaaggaacgttagccattacagaacctattagtgttgccatacttaatcccgtaccagaaccggcaacaattaatcttaaaataaaatctatatttgaagaattttgagtaagagaactatttaagtagcaagaaatacaaagtaaaagaatacctaatgcactagttaatctgctgcctaatttttttgtcaaaatagtagctaatattgaaaaaatcattgaagttaatgacatagttgaaataataagtcctgctgaaagttgatttaatcctttaatctgaattaggaaaaaagatagtaagtaggtaccagacatcataccaagaccgagtaaaaacagcgtaatagatccgtttgtaaatggtatagatttaaacaaactaagaggaaccatgggctctttaacttttagttcaataatgacaaatagtataaaggctataacagaaattgcaaagaaggaaaggatgaagcttgaagtccaacctttttcattagctttcattaatgcgaaagttaagcagaacatagcaattgagattgttataattccaaaaaagtctatgtttttgcttgcggttgggtcataagattcctttatgaatttcatagtcaatagcatgcaaatacagcctatgggtatattaatgaagaaaatatatctccaattaaaaaattgagttactataccaccaatggaaggaccacttgcagcagcaagaccagaaaaagctccccaaagtgccataatagttcttctcttttcaggtgggaatatttcagcagaaagaggcatagcaatggttacaacaaaagctgcagctataccttgaagtgttcgaaataatataagtaattgaagagaatttgaaataccacatagaaatgaagagatcgtaaatagaaatactcctgaaataaacaatttttttctgccaaattgatccgaaagtctcgaagcagttactagaataactgcagtagacagattataggcatttactacccaagaaatatgatccatagtggtattaaagtattcggtcattctaggcaaagtaatatttaccacagttgtatctaataatgccataaaaaatcctaaaatgatggctataaaagaaatgttttgatgttttttgttcataagacaaacctcctaaatagtaataaaaatatttttatattagtatataataaactactataaagtatagtagtggcgcgaaaaaattgtctcacaatattaagatttaggcactagaaagaaaataacaagtaaaagatgatacatatattttgtgtaacataaagaagtaatcttagctcatatttgactattaactaatactactgatttagtatgatgcaaaataatagtatgataccttgttatttttgacagtgacttattggagacattaaattattaattgtaataatcaaaaactttttcagaccatttttgtaaaacgctataaatctcgttatacagatctaatataagaagttcagaaccagatctttcattgtgctgttttgtgtaattataaattggctcaacaaacgctctacgttcttccgctttatctttgaagtttttaaggtattcttttcttttttcttctggcaagttctctatattaactaaaaatgcattaaactccaaataaatatttcctatattctttgaactttcttccattagctcattgaaatatagatttcctttttcatttagtgaatatagtgttttttcaggcatttcaccttctttaacggttcttgaatttaaatacccattatcacataatttaattatatttttataaattgacggggtactaatttttaaccacttagtaagattccagacttcaaattccttaaccatttcataggcacttttctctttgctttgcaaatatccaagtattattaaatttattgaagacaatttaatcaccaccatttattatactactataaaatatagtagtataaactatatttgtcaagataaaatttggtgaatttgatttttaaacctatatgaatctcacttacaattaataggattttaaaattgaaatttctcatacatagaaattcttatggttaattatcttatgtaaatatatgttataataaatataagaaactagaaaaatctggagagcgaactcgatgaagaaataataaatagaataaaaaaatttaaggggaaacttgtagatgttatgtcttattatatacacatatctgatgttttaagtgtaatgatctatcatataaattattattaaaatatggggaaaataaatatgaaatataaaagttataaaagatccaaaggaaaactcaaaagaattctagaagcacttgagatactgttatattttattctaactggagtatttgtcttgatagtatggataatagaagaggcattgagatcaaaggtggcatatatatctgaattagatttttcaaaatatgatacattagtttttcttagtaattctttaaggtatgactttatagtcgctatcagcatgggaattatctttgtaacaattggatgctgttttttgaagagacgtatatcgaagttagctgtgatattgactttgatttgcattataacaggaataattggattaaatagcatgctgcattcatatataaatataacttatgatggattttatgtagggggagctgtatcaaaagagaagagttataaatttgaaaatattaataaaatacaatcatactgtacaaagagaacaggtaaaaatggctcatcgtatgagtttaaatatttcattataatgaacgatggagatacaattgaattatcaaaagatatagatgagaatcaaatttataaacttgataaggttcatagattatttgtagataaatataaaattaattattattgtacaggcgtaaatgatccatactataatttattattagatagactttatagtgatgataataaaaatgctattaaagatatatttgaagataaagttcaaaggccattagtataatagtgagaaaattataaaactaattataataaaattgtaggaaattcctaagattaaacagtgagtagtaaattagtaattttataaagctgagattttcttatatttagaaagtctcagctttaataagtaatatttcttagaagaatttgctgatattatagatcatttcatatttgttttactatttcttaggtcaaatttttcaatttgctctggacctcttaatatttttctttttatatgaagaataccctctgaatcagttctgattctccattcaataagcattatttttccatctactatttcaattccttggattccacttgccctaacacatgatccatcattgaagtaaggtaattccttgacttttggaaagtggggtctatgagtatgtccgcagatgatcataattttgttcattttaatccaatgactataaatacgctcgattttatgaatcctttcagaactctttacagggcttgcaggatttatgaatcctattgaatgaagaaatttccaaaagtatcttactgtaagcatattaaatcgccacagattatcattcattctgtctccttgatgaccatgaacagttagtatttcctgacctgtgtttttatgtttaaacacgactgcctcatatggtgtaattccaggaaataactctatttcttcttcgttatattcatcgtagaatttataataattcttttctacaaaattgctatattttaagtgcacattgtgattaccatataacataatcaatctatcagaatcaaagaatttttttaatagagcatatacttcatcatgtgcaagtcttatatgtttaaagttagaatgttcccaaagttcatctccatcgccaacttccacataagtatatccattattaaaatagaattctaatgcaaataaaaagatattttgattttttgcaaattcatcagagggtgtaccatcacctctatggcaatcactgaaaaatatgtatttagagttgttatcaaaatattcaattttagcattcttataagcttctgttaatcgcttttctgcgagctttttttccgctatcatagtacacctcttttatgatatttaaaattaatttgattatatgtagttaatctgcccttttaaagaagaatatatgttagtgtgctacgattttttatcgtgcttaaagcgatttaatcagtgcttctaactcttcagataaagcttttgcacgttcaaaatcagtatttcttaaggatatggctattttcatttctaaatcccttttcttttgttcaatttctaaatagtctttatcaaagtatttcgcataaatcatctttctaaattttctcatattcatttttctgattgttttatcttcaatgagtaaaacataatctacgcaattaattatagaatagtagtcatgagatatcattaaaatagcaccattatatttcgcgatggcttcttcaagggccatttgtgaatatatatctaaatggcttgttggctcatctaaaagcagcatatttgctttgcttgcagaaattttagctaattgaagtatattcttttcgccacctgataaatcttttattttttggttgattctttcttcctcaaagtcatagttcgaaatgtaagtttcaacatcatcataagttttaaatcctgcgtctaggaattcttcaagtattgtattagactcatttaatatttctccttgaagctgtgataaatatgcaacttcaatttcagaatctatttcaatagcaggggtgtcatttttaaagatatctctaagtaaagtagtttttccagtaccatttaacccaacaatagctactttatcattagatttaatctcaaaattaacattttctaaaagtatttcatcaaagccagcactataattgttaacttttaaagcaactttttcttcaacttgattgttagtagttaaacggatataaggctgcttaatttcaacaaaaggtctttttattctacgagcttctaatctttctaggaatttcattttaccttttagataccttccagcagcagtttcccctgtaacttcagctctatctctcagtctctttattatgcgttcgtttctctcaatttcttcatcatcagcaacagatagttcttgaagttcgattttagtttgaagtaatgtaaagttatagtctatatagcttccatcaaactcttggagctcatgattttcaaggtgaataattttattgaaacaattattcaatagatatctattgtgagtaataactagcatcattcccttatgagaatttattaggtttttaagagaattaagattttcaaagtctaaaaatacatcaggttcatccataatcattaagtctggactattaagcatttccctaattacttggataagtttaaactctccaccacttaaatcagatatctttgaatccttaagtttacttaggtttgcaagatttaatttcttactaagagtgctttcaaaatcatctccaccgattacatcaagagcatctaaagcttcctgatatttttctagtagggcatcaatatcagaagaggtttccattaagctgcaaatagaagttatctcattttgtagtttaatataatcttcacatagatattcgaaaactgttgtttcttttgtgttatctacctcacagaactgactcacatatccaatcctgcaatttggatcaatctctagagtaccatcaaacatatagttctctggatccatgattatatctattagtgtactttttccactaccactagaacctataaaagcacaatgctgatcattttctaaagtaaatgaaatattatgatatagatccttatttggaaatgagtacgacaagttatcaatttttatcattttattacctcgtttttcatatgattaaattttataatcatttatattatgttatatatcgtataattttacacttgattgtatcatagattcggaagtttataaacatttgtgaaagatatattgtatgatattctcttaaaggaacattgttttaaataaaacattttcacaatttaaaaagttaagaatttaagaaggtaagaataaaaaaagttaacaatttataggaaacataatgggtgagacatattaaatggttttgaagatacaaatagtatgaaacttgtgatattgttaaataatttttataaaagctgagatttgtaccattggaaaaatctcagcttttatatataatacaagaaatcactatttcttggggtcaatatatttatgttatattgaaatgcaaaatatggaataatagaattgttgatgatataaactatattttaagttaaggcatatttaattacttttcattactatcattaatagagtcagctagcaaattttcaatctgctgcataaagtttataatatcgcagatgatagttgaccttgtgctcattcttaaatttaatgtatctaatttattacccaatgaattcacaatctcagtgacagagtcaacaccagttactgcaccgctaatctcagagcttgtacgctcaattcctttaattatatgctggctaaactcttttgcttcaatagtacaatcagttacttgtttgaaatctttttgaacattttgagcatattcatagttatcagtaattgctgttttagaatttctaatttcctctctaagagaatctatgctttcatataattctttaacacttttatcaattccactaactaattctgttgttgataaggataattttctaatttcatctgctacaacagaaaaacctatacctgcttcaccagctcttgccgcttcaatagatgcatttaaagctaggagatttgtattgctagctatgcctgttatactatttgacatattttgaatgtttctagagttattttctaatttgtgaaaggcctctgtaattgaatctagctgagtgcatgttccattaattttatctgccaacgtacccattttattatctgcttgttttactgaactgtcagaacgattcataacatcattaattttattagcatattggctaaaatcattaaaattagagtctatattgttaattacattttgtatggcattgatttttgaatatgtattgtcgatttccttaatggattgagtaactctaacttcttcatccatgaattctccaaatttcttttccatatgtaaaatgccataattaacatatttatcataattggattctttttttatatctaatttaatattttgtccattttgaatattttcttcttcgtttttatctttcttttttctaaatttaaaaaacttcatatcgtattacctcattctattcaaatacagcaagaaccattgtctgattaaagtgttgatctctaagctgttctccataacctgcaaaacctatatagttacctaaagcattgcccatatttttagcaaactcatttaaatacccatctgtttcgaaaagcattgatcttgccagacagttaaccataatagctaatgatggatttggaacttcttttttcactgtagcaattgtttcattatttacattcttataatcatcaggctctaagagaaccatttttgaattattatatactttcgcatggtatgacatcccattatttttagtaactatttggtttgctgtaatatacagatcacttccgataattctacctaaaggataactatctaaatattttggaagattttcaacagtggtgtttaatgcttgagccataacaagtgctgctggtttattatcatattcatgtactatacgatttcttgtatctactttagtggcagtaaaataatgagcagtttttttataaatattttctctgtataatctgattttaccacttaaatttttgatgattacaaaagcacatgtattgttgtgtactatgccgttaaaagaaaccattgttttttcagccttacctttgtcaccagcagatccgccaaataggggaatcttatgttcgtcaaggactgaatttaatgtagataaaactagttcttcacagcttattaaagcagtagaaatttcaaagcatatggtattagatttatcacgaaaattattaacacatttagtcactctatctatgtatttaagaggatatttatctacctcttctaatatatcggcataacattcaattccatcctcaatacccattaccatcagtgaatctttataagctccatccatgcaaaagcctgcaaatgtggtggagccaataataatactgttttgaaatttttctttcattttcttagtatattcttcaaaaggttcaacattggaaaaaaataaaattaatttaggtgctttaagcccaagggtagcttctgatactgcttcatttaaatcactttttgaactttttcctactttataattcatacgtaccaccttctataataaagtgcataacattagattcaataaattttttattatgcaaaattactcaatatatccataaatttgtctatttattgataattgtacgtactacataaataaaagtcaatgaaaatattggattatttacattattttaacctatagccttgtaagtacagctttatattttatttttcggcataattctgagtatagaaaatacttataatttaaatcaagatttattgaaaaaaatgtcaattttaagcgattcctttttatctcaaatataagaaagattatatcaaagcagctgcttcctatagtaataaatcaaaaaaagatagttgtaaagtacaaaaagtaactaacgatggaaagatgagcagtataccatttttcttgggaggaatctaattcatggtctggaggagaaaaatgtagtaaaaacatggctttattcttaggaatactaaattatattgctgaaaaaagaaagcagataattccattaaagaggcattacagaacagttatagttgataatccatttggaaaagcctcaagagagcagtactaaaaaagaagcagtttatgaacttataacaataattatacaaatcgaaaaaaatattgaatattaagaaaaaactgaaaatatttttgaaataacaattattctcataatagttattgacaattgtgtaacataccgtataatagatttatacacaatggctggtgttaataacaccagctattttttttacaataattttaacgttaaaaaattatcttacaataattctttggaatatattcaaaatagaaaagtaaatattattatgcataatatggtgaaaacaataaaataggattaaaaatattaactatatgacaaaggcgtctataaaatcaaggaagattttataggcgctttttttgtataaaacaggactagtattaaataaaaaaattgaaaatttggaggagatatttatgattaaaaagacatttttcaaaagaatattgggggtagtaactgtattagcaatgacagcaacaatgtttatggggtgtagtgagacagctaaagtaagttcaaatgggggaagtgcagctagtggagatacaattaagatcggaggagtatttccattaactggtgatgttccagctttgggtgcagcaatggaaaacggatctaaacttgcaataaaagaaataaatgatgctggtggagttcttggtaaaaagttagagcttgtttcagaagatgatcaaaatcaagcagcaacagcgccaaatgctattacaaagttaattacacaagataaagtttcggcagtagtcggaacatatgcaagtaaatgttcaattccaatggcagcagttgcaaaagattcaaaagtagttatgattactccggggtcaacaaatgagaaagttactactgaaggtggagattatgtatttagagcatgttttatagatccattacaaggtgaagttggtgcaaaattcgcgtcagaaaatttaaaagctaaaaaagtagcaatgctttatgatattggtaatgattattgtgtaggtatttcaaaagaattcaagaaaaactttgaagcggcgggtggtactgtagcatatgaaaaaacttacaatgcaggagaaagtgatttcaaagcatttttaactgaaataaaagaattaaatgtggatgtaatttatcttccagataactactcaactgttggattaattgcaaaacaagcaagagaaattggtataaaggcaccattcttaggtagtgattcatggagtgatccaggtcttgtaaaagttggaggagatgcaattgaaggatcttactttacagatcacttatcgttaaaatcagataatgcatcaattaaaaagttcgttgaaaattacaaaaaagaatataatggtgatcctagtgcattctcagtacttagttatgattcagtatacattttagcagaagcaattaaaaaagcaggcagcacagatgaaaatgctattaaagatgcaatggctaagttagatgcagattgtggaaccacacattataaatttgatgataaacataacccaattaagagtgtagttattaataaagttgtaaacggacaatttgaatttgaaactgaggttaaataattctaaagaaaattaaattttattgtttagcggctatatcaatggggtaagctgtaatttaagtagacctagagatatagccttttataaaggagaggtgtacatgagtactttattacaacaaattgtaaatggtatatgcctaggtagtgtatatgcattaatagctattggctacactatggtatatggaattattaaattaattaattttgctcactgtgatatttatatggttggtgctttcttagggtactttgcagcaactgtattaggtcttggatttattccatgtttaattttttctatggtttcatgtgctgtcttaggtatgttaattgaaagaattgcttataaaccacttagaaattcacctaatgtaacattgttaataactacaatgggaatggaacttatattacaaaactttgtaaaagctgattttgtcgcaggtccaaatactagaaattttccacaagtaattcctttaatttcttataaaattggggcaataacaataagtaatcttcaaataatagcacttgctattactattatattatgtgttgcattacaataccttgtaaataaaactagaacaggtagagcaatgagagcaacttcttatgatagagatgcagcagcattaatgggaataaatattaatagagtaatttctttaacttttgctttaggttcagcactagctgccacagctggtgtacttgttggtatgctatatcctagacttgagcctgctatgggtgttatgccaggacttaaatctttcgtagctgctgttcttgggggcattggaattataccaggggccatgtttggtggacttgcaatggggcttattgagactttatcaaaggtatatattagttcaggattatcagatgcaattgctttttcaattttaattataattcttattgtaaaaccaacaggtttatttggtaagaaaaacaatgtgaaggtgtaggtgataaaaatggtaaataagataagcaaaaatgaagataatccaagcttaagcttggttaaaaccacatatacgagatatatgattacaacagttgtccttgccttaatttatgtgtttctaatgtttcttgtaaaccaaggaataattggtgattatatacttagaattatgaaacaaattggtatttttttaattgcagccttaggtcttaatcttatattagggtttactggtcaatttactatgggacatgctgcttttatgtcaataggagcatatggatctgcaataatgactaaaaattttaatatgccctttccaattgccttacttgtaggaatcatattagctggaattttagcagcgttaattggatatccaatattaagacttaaaggggattatttagctatttgtaccttagggtttggagaaatagtaaaggtagtaattcaaaatgtagattatgttgggggtgctagagggatttcaggaataccaggaagtacttctttcttaatagtattaataggtgtagcaatttgttatgcaatactaaaaaatttaattcattcttcaaaaggtagagcaattatggcaattagagaagatgaaatagcagcagaagccatgggaataaattctactaaatacaagatgattgcatttattataggtagcagtatggctggtcttgctgggggcttatatgcgcactttaattcttttattgatccagcaagctttgcattttcaaagtcaattgaattaataacttatgtagtacttggtggaatgggaagtttatcaggaactgtaattgggacttcaattcttatttatttacctgaatgtctaagaggacttagtgaggtatttaagacatatcgtattttaatatatgctgttatgcttgtgctcatgatgattttccgtccacaaggtattcttggaacaagggaaattacagtagataatataataaaattttttaagaaattcgggaaaaactctacaaaaaatatagttcaaagcgaaaaggctggtgagtagtatgtctttactttcagtagaaaaattaacaataaaatttggtggtcttactgccgtttctgatgtaaatatggaaattggggaacatcaattaattggtcttataggtccaaatggtgcaggtaaaacaactctttttaatatgcttactggtgtatataaaccaacagaaggaaaaatacaattaaatggtgaacgtattgatggaactaaaccttatgatattacatcaaagcatattgctagaacatttcagaatattagacttttcactgaattaaccgtacttgaaaatgttatgattagttttaactttcaagcaaaatctagtttgtttacatctattattaagactccagctcacatttatgaggaacaaaaaatgaagcaagaggctttagaaatattaaaaatttttaaattagatgatagtgcagatgagcttgcgagtaatctcccttatggtaaacaaagaagattagaaatagctagagcattagcagctaaacctaagcttttacttcttgatgagccagccgctggtatgaatcctcaagaaacagtggaacttactgaacttattcgctggataaaaaatgagtttaaaatatctattttacttatcgaacatgatatgaaacttgtaatgaatgtatgtgaatacatttatgtactttcttttggcgaaattattgctaaaggaattccaaaagaaattcaaaaaaatccacaagtaattgaagcgtatttaggaaagggggcggcacaataatatgttaaaagtagaaaatattaatatatcttatggtgcaattcatgcgattcacgatttgagtttagaagtaaataatggagaaattgtaactttaattggagctaatggtgctggaaaaactagtacactcagagcaattagcggtttaaatccaattaaatctggtgaaatcacttatgacggcaaaatgattagcaatattggagcacacaagatagtatcttatggtcttagccaagttccagaaggaagaagagtatttggtgatcagacaatagaagaaaatcttttattaggagcttatttaagaaagagtaaatctgaaattaaagtatcaatggaagaggtatttacattatttccaagagtaaaggaaagaaggaagcagcttgcaggaactatgtcaggtggtgagcagcaaatgcttgcaatagggagagcgttaatggcaaaacctaaattattattgcttgatgaaccatcaatgggtcttgctcctattgtagttgaagaaatatttgaaataataaaaaacatccgtaaagctggaacaacaattcttttagtagagcaaaatgcaaatgctgcacttcaaatagctgatagaggttatgttttagaaacaggtagtgttgtattagaaggattagcacaagatttattacatgacgattctgttagaaaagcatacttaggagaataaaaggatggtcatatgaaatgatagtgtaaagtaagttatgaaaagataaaaaagtaatttacactattaaataaagggggaggcaatatggataagtttgtaattgcaatcacaagaacttgtggaagtggtggaacaacaataggtaaaatgatttcaaaggatcttaaaattaatatgtatgatagagaattattacgtttagcatcggaggatagtgggattaatgaatcactatttgcaaatgcagatgagcatgttaaaagtagtttactatatatggtgtcaaagaaggtatatgaaggtgaattgattccaccagaaagtaatgattttacttcaaatgataatttatttaattatcaagctaagatactgctggaattagcagaaagagaatcttatgttgtaatagggcgttgtgcagattatattttaaaggataatcctaatgtatttaagatttttattcatgcatctaatgagtattgtattaaacatcaaatggaaagtttatgtatttcagaaaaagaggctgctaagcaaattaagaaattgaataaatatagaagaggctactattattatcatacggggaacaaatgggaagatgtaaagaattatgatttatctcttgatactagtaaattaggaattgaagattgtgttaaatatattaaagaatatattaaattaagaatgaattcttaataaggagatatttatggataaaatggactacaaaatattaaagtgtttgaaatcaaatgctagaattaaagcagcctctataagtaatgaaattcatttgtcagtttcagcagtccttgaacgcatacataaaatggagaaaagcaaggtaattcaaaattatacaataatagtggatcaaaaaaaattagataatgatgtgtgtgccttaatggaagttagtcttgaacatccaaagttctatgataaatttacttcagctattaaaggtaatgagaatattgtttcgtgttattatttaaccggagattatgattttatgcttaaaataatttgtcaatcatctgatcatcttgagaaaattcatcgtgcaataaaaagcatagaaggagtatcagcaactaaaactcattttgttttaaaaaatataaaaaatacatttagtgtaataccagaggtagaagagtaaatatgcatattaaaaatttgaggtttataactgaattttttaaaatataagaaaaaattttggttaagtagtaaataacaataaaattaactggaattttaaaaaatattgaaaaatatttctgtgagatatactatatgaatatagtattagtttcaaagaaaaaccagatatactttagacgaagaagtcaaattcaaaggtctaaaatatgtctggttttttattttaagaattttaggaggaaaatacaatggagaatttaggttattataatggaaagtttggattattagaggaaatgacagtaccaatgcttgatcgtgtttgctattttggagatggagtttatgatgctacttatagcagaaatcacaagatttttgcattggaggagcatattgaaagattttacaacagcgctggtttattaggaattaaaattccttattcaaaggagcaagtaaaagaaatccttaaggagatggtattaaaggttgattcaggagaacaatttgtatattggcaaattactagaggaactggaatgagaaatcatgcttttcctggagatgaggtccctgcaaatctatggattatgttaaagcctttaaatattaaggatatgtcacaaaaattaaagttaatcactttagaagacactagatttttacactgtaatatcaaaaccttaaatttattaccaagtgtaattgcatctcaaaaaactgaagaggcaggatgtcaggaagctgtatttcatagaggggatagagtaactgaatgtgcacatagcaatgtatcaattattaaggatggtatattaaaaactgctccaacagacaatttaattttaccaggtatagcaagagctcaccttattaaaatgtgtaaatcctttaatattcctgtagatgaaacagcatttaccttgaaggaattaatggaggcagatgaagttatagttactagttcaggtcaattttgtatggcaaccagtgaaatagatggaatacctgtagggggaaaagcaccagagcttgtaaagaaattacaagatgcattgttaaatgagttcttagaagaaacaaaaacagaataggaggtagaatatgaatcaacaagaattaacaatatttaatttgggagagaatttagataatttaatgaatttagaccctaggggatatggtgtatgccgcattttatattctgcagcaagagagtatacaaaagagcctttaactacaaatgcagcaaaaaaattggtgaacaccttaaaagatggcgacttagtctatataatgactggttttgtacttcttccttttaaaaaggctgagatggatggaattgttagctctatgatattagctagagctttagttaaagcttttaatgtcaaacctgtaataatatgtcctgaagataatatggaggctgtaaaaaatttagcgcaagtaataggagttcacttatatgatagcatagaggaattaaaagaatatcctatatctattgcagctataccatttacaaaggatgaaaatgtagctgccaagcaggctgatgaaatcatagctaagggattaccaagcgctgttattagcattgagtgtccaggggcaaattcaattggtgtttatcataatgcagtaggactaaatgtaactgaattagaggcaaaacaagatattttatttactaaattacagggcaagggtgttcttaatatagcaataggagatcttggaaatgaaattggtatgggaactattagtgaacatttagaagagtatattccatatgcagctaaaggaaaatgtaattgtggatgtaatggtggaattgcagtagctacaaaggcagataatattattactgcaacagtttcagactggggatgttatgggttaattgcagcaatagcttatttaaagaaagatttagaaatattacacacaaaagagctacaagaagaagcaatggtagtagcctcaagaagtggaatgatagatatgtatggatggctagtacctgctatagatggttttggattatcaatgaatctttcaatagttaatttgatgagagaatgtgtatcttattctattaaattagaagatacctgtgctacttggtttgataaagttattgaattaggtttttatgaaaatgttgtgtaggggctgcccacattgaatgatttgcaagtagtgatataggaataagtattaggaaggggataattatggattattctaagatgaaaccgagtgaagttagaaatttaatacgtgaaggtaaaattacaggaccaacttcaggaatgtgtgctggatatgcacaagctaatttggttatcttgccaaaggagttagcctatgatttcttattatttagtcaaagaaatccaaaagcttgtcctatattagaagttagtgatgtgggaagcaggagtttaagatatattgcagaagatgcagatatagctaaggatatacctaaatatagagtttatgaagatggaatattaactggtgaatatactagtgttgatcatttatggagagatgattttgtgagctttttaataggttgcagcttttcatttgaatcagagcttttagaggctggagtacctgtaaggcatatagaagaaaactgtaacgtgccaatgtttataaccaatatagagtgtgaaccagcggggatctttaatggaaaaatggttgtaagcatgagacctattccctataatcaaattgttaaatcagtaatggtcactggagcaatgccaaaggttcatggaacaccaattcatataggagaaccttctgttattggaatttcagacattagcaagcctgattttggagatagtgttaaaataaaagaaggagaagttccagtattttggccttgtggtgtgacaccacaatctgtggttatgaatgttaaacctaaaatagtgattacacattctcctggccatatgcttataacggatactaaaaatatagacattaaattcagttaagaggcttaactcataactgatcaaacgggggtaattatgtataaagtagatttaaattgtgatttaggagaaagctttggaagctataaacttggtttggatgaagaagtgatttcatatatatcttctgctaacatagcctgtggatttcatgcagcagatccgcttgtaatggactatacagtaaaactagctaaggcagctggcgttagcgttggtgctcatcctggctttcctgatttagtgggctttggaagaagaaatatgaatgtatctccaaaagaagctaaagctatggtgcaatatcaaattggtgctttagattctttttgtagagcccaaggaattaaaatgcagcatgtaaaaccacatggagctttatataatatggcgggaaaggatttaaaacttgctgaagctatttgtgaaggtatatatgaagtgaatcctgaactgattttacttgccttatctggaagtgaaatgataaatgccgcacaaaatattggattaaaagtagcaagagaggcctttgctgatcgtgcttatgaagaagatggatctttggttgcgaggactaaagaaggagcgatgattacagatgaagaagttgctattaaaagagttattaagatgataaaagaaaacaaggttacatctattacaggtaaagatataccaattaaagtggattctatatgtgtccatggagatggagctaaggcattggaatttgtaaaaaaaattaagcttagccttgaagaagaaaatatagaaatcattccactacacaaaatatattaatatataataaagaaggctttttatgggagaatattttagaacttatgcaaaaatagatttagaggctattttgcataatataaatgaagcaaaaaaacgaatagaaagaaatgtgaagattatggcaataattaaggctgatggatatggacatggcgctgctgaattaggtgattttcttaagagtgaagtggattattatggtgtagctactttagaggaagctctagagttacgtaaatctggaatagaattacctatattaattctcggatatacctcacctagtcaatatatagaagtagtcaaaaataatattacccaaactgtgtataatactgaaatggctaaggaaatgtcaaaggcaggagcaatatgcaaaaaagaagcaaaagttcatattgctctagatactggtatgactagaataggttttgatgcaaatgaagatggaatagcagaagttcaggagattttaactttttcaaatttagtagttgaaggtttgtttacccattttgctacagcagatgaagctgataaaagttatagtaaattgcaaataagcaaatatgataaatttgtagctttactagaagaaagagatataaatattcctattaagcatatgtgtaatagtgctggaattatggaatttgatcatcatcgctttgatatggtgaggtgtggaataattacttatggattatatccatctgaagaagttaataaaaatgctattacattaaaaccagcgcttcaatggaaaactcatgtgataaatgtaaatatagttgatgcaggtcatggagtaagttatgggaaaacttatattacaaaaaatgaaacaaagatagcaactctttctgtaggatatgctgatggatatcctagagctctttcttcaaagggaagagtattgatacatggtaaatatgcaccaattataggaaggatttgcatggatcaaatgatggtggatgttacacatatagataatgtgaagattgaagatgaagtaactttagttgggaaagatggagaaaatattatttatgttgaggaattagctaatatggctggaagctttaattatgagtttgtctgcggtatagggaaaagagttcaaagactttacagagaattagcttaaatattatatagggataatgaaaaataaataaaattaggaaaaaggtctaaaggggtgaaacatggatatggaaaaaagcaattttaaagctaaaatttctcaaataagtgaaacagcagctttggttgagttcggaagaaaaattagtgaggatataaataaaaaagtaagaaccttttgtacttatcttgatgagaaacctttttatggaatggtggagtatgtaccagcttttacaagtgtttctgtcatttataatccattggatatgaagagtgaatccccttatgaagtggtaaaagttattttggataatataatatctaaacttgatttttctttagaagatgaagaacatatagttgaaattccagtgtgctatggcggtgaatttggacaagatattgagcaagttgcaaaaataaataatattactgtagatgaggttataaaaattcattctgaaggaaaatatctagtttatatgattggttttgctccaggatttccatacttaggtggaatgtctgaaaaaattgcggctccaaggcgtgaatctccaagaatagcaataccagcaggttcagttggtattgctggaatgcagacaggggtatatcctatagaaactcctgggggctggcagcttataggaaagacaccattaaaattatttgatttaaagagaaattctaaaagccttttaaaggcaggagatatagttaagttttatcctatttcttatgaagaatatgtacagttaaaggaggaagaatagtgagtatatctgttttaaatccaggactgcagtcaactattcaagatttaggaagacatggatatcaaaaatatggggttatagttagcggtgctatggatgtttatgctatgaaaattgcaaacattgcagttggaaatgatgaaaatgaaggtgttttggaaattacaatgattggtccctcattagagttagaaaagggagccttaatttctataacaggtggaaatatttcacctactattaatggaaagaaaattccaatgggaagaccagtttatttaaaggaagactgtgtattaaattttggagcgtgtatagctggatgtcgttcttatttagctatagcaggcggctttgccgttccagaagttatggaaagtaaaagtacatatttaagagcacaatttggaggctttaatggaagacctttgaaaaagggagatatattaaatattggtactaaaagtgtagcagctattaaaataatagaaaagctgcaagagataactcaaaaaggtgagtttgtagctcccagttggtatattggggattcaacagtagaaaatatcaatagcacaattattagagtttttaaagacaggcaatttgataatatttctgatgaaagtataaataaattttttaattcagagtttaatgtagacaataaatcagatagaatgggatatcgtttatgtggagaaaaaatagaacttaaagaaagattggaaatgatatctgaagaagtttctgttgggactattcaaattccacctgacggtaaccctattattttattagcagataggcaaactacaggaggatatcctaaaatagctcacgtaatttctgtagatattcaaaaaatagttcaacttaaacctaatggtaaaattaaatttaatctaattacattaaaggaagctgaaatgctgtactttgaaagagaaaaatatattgatgaactaaaaaaagcaataagacttacaatattgtaataggaagtgaaattatgattaatatagaggatatagaaaaaatcatgcaagttgttgataaatttgaggtttctcactttgaatttcaacatgaagatagcaagataataatagataagaataagatatgtgaaggtttagctggtactaatacgtttactaaaggcgaaattaaagctgctcagtctaaaattgagaaaagtatcaatgaggacgttgagtcagaaattacagagaaggaatatattaaagccgcttttgcagggagtttctattcttccaaagaaaaaaatgaacaagccttcgttaaagttaatgatgaggtagaatgtgacactgttgttgggttgattgaagtaatgaaattatttaatgaagttgaagctggagttcaaggaactatagttgatatattagttaaggatggagagtttgtagaatacggccaaccactatttgagataaaaagtaagtaagtgatttgaaaaggagaaagatatgtttaagaaaattcttatagctaatagaggcgaaattgctgttagaattatacgtgcttgcagagagcttggaatttcaacagttgctatttattcagaaactgataaagatgcattgcatgtaaaaatttctgatgaagcttattgtattggtaaaacatttgtaaaggatagttatcttaatgtgcaaaatatattgagtgtcgctatacatgctaaagtagatgctattcatccaggttatggtttcctttcagaaaatagaaattttgctcaaatgtgtgaggaatttggaattaaatttataggtccatgtcctggaattataagtttaatgggtgataaatctaatgcaagagatacaatgaagcgagccggagtgcctactgttcctgggacagatggagaaatacaaaatattaatgaagcaatagcaattgcaaaagaaataggatatccagttatagttaaagcatcagcaggaggcggaggtaaaggaatgagagtggttaattctgaagatgaattaataagctccattgaaactgccaaaaaggaagcacaaaactatttcggaaatcctatggtttatttggagaaatatttagagtatactagacatgtagaaattcaaataattggagataattatggaaatgtagttcatttaggtgaaagagattgttcaatacaaagacgtcatcaaaagcttgtagaagaatcaccatcaccagcattaaatgaagatttaagaaatgctatgggtgaagcggctgtaaaagtagctaaagctgtaaagtataatagtgtaggaactgttgaatttcttttaaatgaggataatgatttttattttatggaaatgaatacaagaatacaagttgagcatggtgtcactgaaatgataactggcattgatcttatgaaagaacaaatattagtagcaagtggtgaaaaattatcttttactcaagaagatgttaagataaatggatgcgctttagaatgtagaataaatgcggaagatccatctagaaactttattccttgtccaggaaaggttgaaaattatttatcacctgggggaattggtttaagaatagatagtgcagtttatccaggatacgttatttcaccattttatgattcaatggtatcaaaagtgattgcttggggaagagatagagatgaagcaattttaagaatgaaaagagcattaaatgaatttgttattgaaggagttaaaacaacaattccttttcacaaaaaattaatggataatgaaacttttagaaaaggaaactttaatacaaaatttttggaaatacataaaatctgttaataaattcttatgatttaattagactgcatattgggcatggatgttttagatactcttggtgaagatattaatattaaagattacacattaatattttcaatatagagggttacagaactaaaaaaattcatctttactataaatccatatgaaattaagacttttagaataatttaatatatagttatcattaaatatataaaatttctggaaaatgtgtttatgctaatataaagaagacttaaagtgagcaaatatttacttactttaagccttttttagtctttaggaacttttattccagtaaactgtgcagacaactttaaaaaattaattgaatagtttttatattctaaaaggaacaaaaaaagaaattttatctgcctgcaaattttttacttattacatatattcttgtcctaatctgttagctgttaaaatagcagcgtagacatcttcaggggtaacttcaaatggcatattatgtgcagtatcttcttttgaagtagcagcctttgcaacttccataatttcttctggctttatttcatcgatacctaattgttttaaagtaacaggaagaccgactctagtacagaaatctaatacttcttcaatttcatccattggagcattttcaagaactaattgagctaatgtaccaaatgcaactttttctccatggtacatatgatgacaagctggcaatacagttaaaccattatggatagcatgagccgctgcaataccaccgctttcaaatccaagaccactaagaagagtattagcttcaactattttttctactgattttgtacaaactccttcttctacagcaagttttgccttatatccttcagtaattaatgtatcatagcatagtctagctaatgcttgagctgtaatagtagtagtaccaaaagcacatgttccagcattagacttttcacaagctcttgcttcaaaatatgtcgctaaggcatcacccataccagatactaaaagacgaactggagcttttgcaataataccagtatcaaccaaaactatattaggattttgctttaagaataagtatttatcaaagacgccatcatcagtgtataaaactgacaaagcactgcatggagcatctgtagcagctatggtaggtacaatcacaacaggaagatttgcatagtatccaacagccttaatagtatcaataatttttccaccgccaataccaatgagaacagttaattgattttcatcacaaattttgataatacgatttacttcagttatagagcattctccgttaaataaatcatattttacacctatatttttagcctcaaaacttttatctatagtatcttttaccctttttaagccactttcactaatcaagcataatgctttttcaccaagtacagatacgtattctgcaatatttttcaattctccattaccttgaatgtatttacttggtgcaatcataatttttgccataaaaaactcccccttaactctttaacaatgtatattaattattatgtcttaaattataccagttttatcagttatggtaaagtttacatgcatcaaaaggaagtaattaaagtaatgttacataatacaaccattgatgatcaaatatttggtgatgatgaagctttgagtgagtaacacaatgcacatttatattataaaatttacggaacacactttagatatataatttttcaacaagacaaactatataggaatttatagaaaaaccattgagaatttaagaaagaacaatttaacatattttagtttaaactacaattattatgataaatagaaaggtatggtataattttattcatataaatatctcagattaaacttgaacttgtgaatatagatcgctgaaataagatttattttaaattttagaatatataaatgggggaaaaataaatggatgaattattaaatttactaaaggttaaactttgtaactgtactataaaagatgaagaaattataaagattaaagcttacattgaaagtggagaaaattctttaaacttagaagaatttaataaatataatatggaaaaggctcttagaagtcactataacataagagcagatttttggaagctaatggacggttttatagagaaagaagaaatttttaaaagaataataaatgtattctttgctataggaggagagagcttctttcaaataataaatggaagattttattctgtatctaaaactgtaaattatttaaaacctatggaacataaagaaaagcttctattatggcttataaaaaattgtctttatcgcagaaatgtaatagaagtaattacaatcgttgaagaaatggtatcagaagacaaggaaatattatcaaaaacttttttagaagcagaagacgagtttactaaattgtcattagcagccttagcaattaaaaatggctgtagtttaccagagaatgaagaagaatttataaaacataattttgaagatgcagataatataaataaatatttaaaggataagcaaacagctttagttgattttttctcttatgcttgcgataaaagtgatgagttaaaggaagttgtaagcaatatcattagtaaaagcactaatagaaaaatgttattttacgaattagtagaatttatttgtttttatgataaaacagcacaaagttatgatattgcaaatagatttaatattgataaaaagctatatgtacatagattaataagtatatatgttagagaagaaaataagaagatacgtgaagagatagaagaaaggataaaagaaatacctttagtttttagagaaacttttgaagctctaaagaaaaagaagcttggtcaagataattttcatgatttagaagtattcttacttgcttattttatttatagctactctaaggaagaagtagatcttgaaaacttaaaaaatgctataggaataattttgaatcttttcatatgttctgatagaacattagaagttttagagagaaaagaaaaagctaaaatactagagtatgtattagaaggcaaaaatgaagatttattagaggacttttttcataggactgagaaatttgatggacatagtggctatatatggcgatatcatggtctttgttttcaattaatgtattctatagaggaaattagagatattatacatagatttatatatatatcagttaatattggagaatatgccttagtagcttcagttatatcatatgtgactggatataatgatataagttacataagttttgcaaaaaaacttttaagtgaaggtataattgaaaagcacttgattctagttgctgatgcagttttaaatccaaaagccaaggaatatttaaaaatgttatgtaatgaagaaaatactgagattataaatattgcagaggatttaaaaggtgagtcaaaagaagttgtacttgaggctttatttaaaactaataaggaaaaatattctgaacttttagttagaagtttatcagataattcaaagtttattagagataaaattgcaggacttctaagttcttatgaaggatgcaaaaagcaagttttagggattttagcaagcaaaaagactgcaactagagaaattgctgctaaaatcttaatgaattttgatatgagagaatttaaagcagaaatcgaaaaatttgcggagaaagaaaaaaatgaaaaagttaagattttacttttaaacattgtaaatgcagattatttagacaccgaaatacttgaaagtgctaatagtataagtagttactgcagtgagaggctcaagaaaacttcgtatactgcaccagaatggacggttgtagaaggattcacagacgtaaagtatgaagatggaaatgttttgtcaaaggatgtaataacttatattataagtaaatactctcttgaaaatgtggtagaaagaaatcttacagcagaaaaggtaatagaaaggtgcaataaggctgatttagacgccattggaagtgaaattctaaatctttggattaataatggtgcagatacaaaacaaaaatgggtactagctctagtttcagcaattggaggcttcaatgtagtaaatacattaaaaactcaaatagatgtttggtcaaaaacttcaagaggagctatcgcttgtgaggcagtaaaagctttagctttaaatggcagtgatgatgccttgataataatagatagtatagctagaaaatttaagcataaacagattaaaaaagcagcagcagaagcttttgtgtcagcagcaaagatgtttaatttaactgaagatgatttagcagataaaataataccagatttaggttttaataaaagaggagaaagaatatttgattttggaagcagaagttttactgtaagtttcggattagatttctctttaaagattactgataatactggaaaagtaattaagactatgccaaaaccaaataaatctgatgatgagctaaaagctaaagaggcagcaaatgaattcaaagctttaaagaaacagatgaaaactattgtttcggcccaaagcttaagactagaaatggctcttgcagtaaacagactatggaagaaaaaagattgggaaaaactttttgtagaaaatcccattatgcataatttttctcttggcttggtatgggggatttatgaagatggagaactaaaggatacctttagatatatggaagatggtagttttaatacagttgatgaggaagaatataatcttatagacaattcttttataggagttgtgcatcctttagaacttgaaacagaaatgttagaaggttggaagcagcaattcgaagattatgaaatagtacagcctttcccgcaactacaaaggaaggtttatactgtgactgaagaagagaaagaaatgaagaatatagaacgttttgccggaactaagattaatgggctttcacttgtaggtaagcttactaaaatgggatggtatagaggttcaatacaagacgcaggatgctattatcagttttataaggaagatgaaaaaataggaataggtgcagagcttcaatttgagtatcttggagttggttatgaagatgaagaaactactatttatgaacttgttttttacaaagcaagtacggtcgaaagaggaagctatgtttatgatgaagtaactgatgagaatacaattgtaccaataaaggttccaaaaagattctttagcgaaatactttatgatgtggacaggacgttagaggctaagactggctttacagctaattggaaaatggataggtaaaaattatgagacggttgaggtaacagaagattggttgcgtgctaaagaatacttcactaaaggaaaagaagtagaaggaatattgaaagtgttttgccctcaaggagtgattatagaattagagaacaaaacaattgatattgctgattatgaagaatgtgccagaaactcagaagcaaagaacttataccctaatcacttagtatctgcaaaggtaaaagattatgatgaaaaaaatatgtggataatccttgaggatgcaagagtgcaattatagacggcaatgaaaataatatacagttttggaatggagtattatttagctttaaagaatggtgttctgactaatttgtataaaggtgtagcatggaagttatcaatcatgacaatttatagtgatgtaacaaataatgatatttaaaagatatgttctaaaatactgaattgattttaatcataattatcaatatttcagaagaagctcaaaaaataagagatagacaatacataattgttaagtagggaaagtaagatgaagatagaaggtataaaaattattaatgaattataggtataggaggagtgttaagtaaaatgggattggaacagcatttaacagaaaaaataagtaatgtgtttttagatttaggcttaacgtatgaagttattgatgattttaaagaatatgtggaaggcagcatcaaagaagaggatttctttaataatcttcctagtatagatatgaaacagttaaagagtgatgcggtagaggcagtggttagtgtatatcattctttagtcaagcataaagctaatgattatttgtcaaaatacttaagaatactatttcaaatgggcaagtcttctttattttttgtcttagataagacaagttattataaaccaacttcttattataaagagtttttaaaatacggtttaagtccagtctttgttatagcttattatgccacgtctatcactgagcaggaaagaactttagatcgtggatttattttgttttatgatagtctttatgaaaagtatagagattcatttttagaagctattaagataagcgaaataaatgaaaaagctataataataacttatttagcttacaaggaaaaagataaagaatatttccagtggttagaaaatgacatgattgaatccataggaaatttatttaataatagtatatctgaaatgcagaaagacgcattaattgaatatttaaaggaaggaacttccaatctgcaagacatagtggaaaatttaaagaatgatagcagattagtagtaaaccttaataagtatatttttaggtttttgataggaactagttgtactatatgcattgaatctgaaatatcaagaagatttactaaatttgctgcagaatttgattataaagagttcttttacgatttacataattatctaaaatataacagatataatgtaatatcaaaccttgtggatgcgcttcaaattaaaagagaatcatacatcgcatggcttggagcgtctaacaatttaaattataactatacctatggaaaagaattaaaggaagaagcagataaacacatagaagaatttaaaaaagctacagaaatgtgttttggcatgaataaagcttatatggccttccttctttggaaaaaaggagaaggtaaggaatttctaaatgatgcagaagatgcttttatacatgaattttctacgtttatggacaagaatggtattgaaagagaggtttacgaagattttatacaatacttagaaggaaatatctcttttagtgacatagataagtctttagaaggcttatttggaaaaagagatatgtacatgccttcatttaatttttctaaaattctgttttggttaaaggatcaatcttcgatgttttcaagggctatggatatatttattaccacaggaaatccagacatattaagaaatatgtataatgattatctaaagtacgaggggaaaaaggcatcagaagatgatttgaattcttacattgaactacttgtaagttgtggagcatctattaaaaactatatatgttatttaggacattgtgcatttggtaattacgtcagaaatagcttaagcagccaagcagttaaaattatagaaaagttaattgaaacaaatgaagaagaggtaatagaaaatatcactaattgtgatgctgaaagtagaaagggaattttagaaactttaaataaaactcttgaggagactaaaagtgcaaaaattcttatagagtatttaggcgattcatctaaagtcgtaaaggaaacagtaataaagcttttaagctcaagcaagataaatcagcagatggtgataactaacttaagttcaaaaaaacaggcagttagggaatcggcagtaaaggtgcttttaaagagcggtgatgaaaaagttatggaagccttaaacaaagccttagaagtagaaaaaagtgaaaagataaaagcgcttataagggaagctttaaatctagaaagtgctttggaagaaaaaaatgaagaattagatattttaaaatactgtaagcagggtttaaaaggtaataaagcagcaactctaagatggctgaattgtgatactttgacaaagataaagtttaaggatagtgaagcttatgcagaaagtgaaattataaaatatatgcttgtatgttatgcttcctgtattgaaattggattaagtagtgaagctttaaaggtaggagaacttttagataaaagggacttatctaaacttgccttagaagttctacaaaggtggctggatgcaggtgcagaaagtaagaaaaaatgggtactaccatttgcttcagtttatggagactatgaagtgataagtttaattaaaaagaatatagaagagtggcctaagaattcaagaggtgcaatagctagtgaagcagttaaggctcttgctctaaatggaagtaatgaggctttgataatagtagacaatatatcaagaaagtttaaatttaagcaagttaaaaatgcagcagcttcagctcttaaatttgcagcagagcaaatgggaatagacatagaagagctttctgataggatagttccaaatttaggctttgatgtaagaggagaaagaatttttgattatggagatagaaaatttattgcatcacttactccagagctcactttagaagtaactgatgaaagtggcaaaaagcttaaaagcctgccaactccagctaagaaggatgatgaagttaaggcaaaggaagcttctgcagaatttaaaaatttaaagaagcagttaaaaacagttgctaatatacaagcgattcgtttagaaatggccttatctagcaatagaaaatggacaaaagaatcttggataaaactttttgttgaaaatcctattatgcataagtttgctataggtcttgtctgggggatttataaagatgatgttttaactgatagctttagatatatggaagatggcagctttaatactaaggatgaagaagagtatgaattagaagatggaatgataataggaattgttcaccctattgaattaaataatgaggacatggctttgtggacagaacaatttgaaaactatgaaatcaaacagccatttgaacagttaaatagagaaatatttactgttacagaagaagaaagaaatagaaatactgtagagcgctttggtggagtcatgttaaatggtttatccttacttggtaaattaacggactttggatggattagaggagccattggcgatggtggtggttattatgctttttataaagaagacaataatcataaagtggaagtaggactaaatttcagcggtgtatctgtaggctatgaaagtgaagaggtaacagtatatgatttgtgtttttataaattaggaaccatgtctaagtatgcgtatataaatgagaaaacacagaaacaaaatactatatccataggtacactgcctgagagattctttagtgaaattctttatcaagtgagtagagctttggtttctaaaacaggaaacaatgataagtggagagaagagaaataaggaggaaactatgagtaaaaatgaagagataaaaacctttgatagcagattcaaagaggagatatttgaggtagctgctgtaacatcatctctaggagttggtgcaggcaaaggaggaaaagaagagttatggagggcttctataaaccttattacttggaaggatttaaacagcaatgagccatcagtaaaagaggagattaatttatcgtggcttactgataacgaaggcttaaaggaatggcaaaagactattaaaggaaattctataattaaacttaaacttagaaaaggcgaaaaatccttcatgcttgtggagctaatggatgcaaactacaaggatgaggagcttcaggatatattagcagaagaacttaaaccagtattttatgaagatgaaatctttggaaaatttcaattagataaaggtatcaagacttttcagaatgatatcatttgggcaggagaagaaggacgattatattttgatctagatgaggaagaaagaatgaaagattctcttaaaactgctcatgagcttttcaaaaatcaaaaagattggagcgatagaattagagcttatgctgcaagtgaacttttagaacttgccaatgattggattgatgaagaggatgaaattgacgaagttacagaagaaatgtttattaaatctatagagttggataccataagtgtttatcctgaaggtgagtttgagattttcttttttgatggagacttgtttgcaggacactgcattatagtcagcggaaatataaatggtagttttgagtcagcagacatcgcgggctaaaaggaagaataaaggagagtatatatgagtgaaataaaagcattaaaacctaccgttgaaatattatatgcagaggaattagctgcattagaagctaacgatgacgggcctaaaccagaaaactggagattatctcctaaggctgtaaggacttttattttaggaagcagtaagcctttaaagctaaaaagaaagaatgttaatattacaaagaaattttatggagatgatgctcttattgagagatgtattataactttagctggaaatagaggacttatgctggttggagagcctggaacagctaaaaccatgttaagtgagcttttatctgctgctatttgtggatatagtacaaacactatacaaggaactgcaggaacaacagaggatatgattaagtatacttggaattatgctttgcttttagctaaaggaccagttaaagaagcattagtgccttctcctttgtatataggcatgaaaaaaggaactataactagatttgaggaaatcactagatgcccagcagaggtgcaagatagtttaatcagtatacttagtgataaagtattaaatataccagagtttggagaagaaggactgctttgtgcatctcctggtttcaatgttatagctactgctaatactagagaccgtggagttaatgaaatgagcagcttttactatggagattctaaaattgatatgagtactatggtacaaaacatactaggttctgtccttaaggaaagccgtgaagatgtggataaactaaggagttattttaacattgtagttaaaggtaaaagtgcaaaaatgggtggtaactggaaggatttctatgaagctaaaaagtggattaaataaaggtggaactagcatgggtaaaaatatagacaatcagaatatagataatagaataaaaaactatgtgaaaaaagcttacaatttagaaagcaaagtaatgtttttcccagtaagacaccatagtcctgcttgtagttttcatctgaaaaaggtaatagagagttataatcctgagattatattaattgaaggacctgcagaggcaaataaagtaataaagtatatagctcatgaggaaacaaaagcccctgtatgtatttactatagttattttgatagaaattcatttatagaagaaaataaagaaaagtataggtgctattatccctttttagatttttcgccagagcttttagcattaagagaaggaaaaaagaaaaatattgcctgcgagttcatagatttatcatatgctgaaatacttataaacagcaaaaaactagaggttatgggaaaagctcaggagaaaaatacctataatgatgattatttaatgaaggaaagtatttttattaaaaccctttgtgaaaaggaaggctgcagaaattataatgagctttgggaaaaattattcgaaatagatggacttaagataagtactgagaagtttatagaaaatatgatattttcctgctatctttctagggaaagctataatgaagaaatgcttaaagaagatggatgtctttctagagaaaagtttatgagtatgaaaataagagaagctgttaaaaaatacaataaagttcttgtagtaagcggaggatttcatacttctgctcttattgatggacttgaatctaatgaggaaataactcttcataatatagcacaagaggatacaggagtatatgccatgtcctattcttttgaggaaagtgatcaattaaatggttatgccagcggaatgcctcatcctgctttttatcaacgagtttttgaaaatattcaaaaaaagatggataagccttacgaagaagcagttcttaattatattgtacactgcgggaaacttataagaaaaaatcatggaaatctttccacagcagatgaaattgaggcctttaatatggcaaagggacttaaatctctaaggaacaagtatgaatgtggagtttatgagcttaaggatggcataacatcttcttttgtaaaaggtgaaatggatgcagaggcacaggtttctttaaaatatttgagagacctgcttacaggaaataaaataggtaagctatgcgcattatcagaaatgccacctatagtacaagattttaatgaattgtgcagaaagtttaacataaaaactactactttagaaaatgaagtgccattaagtatttataagagtaaaaagcatagggagcaaagtaagttttttcatataatgaagttcttaaatactaacttttgcttcatggaaaagggacctgattttattaaaaggaaaaataccaatttagtaagagaagtatggaagtataaatggactactaaacttcaaagtacacttatagaactttcagtgcatggcgggagtttaaaggaggcagcgagttctatacttacaaagaggtttatctcttgtgaaaatgtatctggagaagcttcactacttttaatagaagctgcacttatgggcgttgaaagcagttttcagggacttcttccttcctttggtgaaatcttaaatgacgatgaagattttatttcagttacaaattcttgttacaatctaaattttttatgtaattcagaggatttgcttaacattactatgaatgaaaagcttaaagaattctttactgctgcctataataaagctgtgtctcaaataacaagtttaagcactgtagattatgacaatgaaaatgaagttatatctaagctaaaagatatttatcatatttctaataaagctgattttgatagtgaaaccttaatcgacagcttaaaactgcttattaataagaagaatctaaacagcgcagttgaaggagcagcattaggtatattatacggattaaattctattaattctaaggaagtaacagataaggcaatgcagtatctttatggaactggggaaaaacttatgaagtcaggaagctttttaaaaggactattttctacagctaaagacttattacttattgaagaggatttacttaatggaatagatagctttatgagaaacatagaagaggagcagttcatggtacttcttccagatttgagatttagttttacattctttaatccttttgaaattgacagtattgctaaagaggcagcaaaagtgtacagcactgatgatattaatattctatatgaaaaggcattaaaagaagaggatataaacctagcagtatcattagataaatatgcaatggagattttgaagaagtggaatatacatcaataaaacaccatatgtaagattctagataaagtgcagattaaataacttatattatgggaattggtttgagttaacagttatatgatgtgaaataatatttgctaagtgtaagttttactttaaaagagaaagggtaaggtatgaatgaagatttaattggtttaaatagatggcgattagtacttggaaagtttgcagatgatagaataggcttttcggaagatagcagcaattactcagagcttagtgatttgctagagttcttatatgatagggattatgatgaagaaagaggaataagagtagatgacccaagaggaggaagaggaagctctaagtttacagtgccttcttggataacaaaggttagaagcttatttcctaaagaaacagtggaaatattagaaaagcatgctctagaaaaatataacatgaaggagcttttaacagataaaaaagtgctagaggccatggagcctaatgcagaacttttaaaaaatatattgcagatgaaacatttaatgaagggcgaagttttagatactgcaagaaaaatagttaaaaaagtagtcgatgaaataactaaaagtctagaaaatgaagtaaagcttactattatgggaaaagtggacaggaacaaaagaagtgctgtgaagtctgctagaaacatagattttaaaagaactataagagctaatttaaaaaattatgataaagaagaagagagaataattgtagataaagtttatttttatggcagagtaagaaaatataatccttggaacatagttgttgctgtagatgaaagtggcagtatgctctcttctgtcattcacagtgctataatggcaggcatattttcaaagctccctatgttaaaaaccagcctttttatttttgatacagaaatagtggacttaacttcttatgtggatgatgcagttcaaacacttatgagtgttcagctgggaggagggactaatataggaaaggctttaagttatgcagaaaaattagtagaaagtcctttaagaactatggtggtaatggtgaccgatctttatgacggttataattacaacataatgtatgcaagggctaaggcaataattgaaactggagctaagcttataattcttacagctttggatgataaggcgaatggcttctatgataagaaggctgcagctaaaatgactgcacttggagcagatgttgcagcaatgacgccaggagggttagcgaaatggatagcaaagataatttcttaagtaagttaaaatcgtatattctttctattaatgatgagtatcttattggagttactaataaaggtatatttaatagagcttcaaaggatttaagctctggtgctggtgttaaaattacagtggaagaagcatctataaaatgtgaactgccagatggaaattcatgcagcgtaaatgaatatatccaagcctttaagtgcagctgtccatcaaggagtatttgtaagcatgctgtaatgagttatttatatataaaaaatcatatagaagaaatctttggagagtcctcttctttaaatggggattctagtgaagaaatggaaatatcaaaacaacatgaagaatttagtccagattattcagaacttttaaatataaacttaaagagtataaaaactgctttgggtgacagagaatttggaaatattgttaagagaatggagtttggattaagagcagatataaaagaagatgcccttcttcaggtggaatttgcaggagaagaaactataaagtttatttctgtgaatggcgaaaaaaagaaagatatatccataaaggatagcagtatagttaataatgctttgtgcagctgcaagagtaaagcgctttgtagacataaggcagagtcagtaattcactatggtctttacaaaggtacgttaaagaaagaagaagttatttatttaattgctaaggataaaattgtaagtaaggaaactttagaaagctgtataaaagaagttagaaaaactctagaggaaatatattttacaggtcttgcaagaattcctgaaagctttttagataagttggaacaagtatcaattatttgtcataatagcgatattccaagtattgagaagaagataaaagcacttcaaggaaaacttagattatatattaataaaaatgcttctttttctgtagaaagttttaggtatttgttacaaagtatttatatattaactatggctatggaaaattacagcgacgaaaaaactttaggagaattaatgggagagcataaaagttcttattatgaaattcctcctatagaacttgcagcagtaggagctagcaagtggataacagagtcaggctatgaaggaactacattttattttacagtagaaggctttaacaaatggtttacttacactatatctagaaattcatcctacaacaataaaaacagctatagcagagaaagctgtccttggggggttgcttctgatatagaaagtttctctaaagctagagtaaagcttattaatggaaaaataaatggagattttaggttatcttctagtgaaaatagcaaaggggaaattataggtaccacagatattcaaagtatttatcttaaggacaagacctttaattcttggaaggatttattttcagcagtttctaataactcaggattatattttaatgaaagagaagaaaattatgatttatttcttataaagccattgaagtttggagaaagcagctttgataaaatacagcagctcttcaaaatgccattatatgacgaaaaagaagaatgtgtaaccattaaggttaagtattctagtaataataaaagtcttatagaaaagctggagagaatggaaagaatgaaaaactatccgtttatgctcttgactaaagtataccttaacgaaactggatttactgcagtccctataacagcttattataaaaatggtacattagtgaatttgactatgtagatagtaattgagttagcttgccttgtcttcttatcttacagaaaagataggtaatattatagctatcaatatgtatacggtagtttatttaattcaattacataaaggatgtgattttatggaaaataatcaagacttgaaaattatggttgatgacatagaaatgcttttggatggaattttattaagtggagtaagtgtaactttagacggcactttaagagaagttaatagactcgcagtaagttgtgataagtttggattaaaggaaggagcatcaatgctttttaagctggaggaagctctaaaaatgaaaagacactctttgaattttgatctggatgaagtggtgaaaattcttgcggtgtttggaagttatgttagcttgattaaggataagatgaaaaagctttaagtttataaaccaccgaaatcataaatattttgattccgaaaaactatgaaaatatcgctgaaggttctaagcagcaggttgtatccactttagcatgctccaactttcagtttgacaagctaaaatggaacaacctacagctaaaaacctttaacagcttcattttcaaatgttttctccacaaatatatttatgatttctagtgaaaatatgaacttaaagtcttagaaaacttgtaaatttgtttatctatatagttaatactctgaaatatatctaaactagaaataagaattatgcttttgtgaaatgtttcattagaaaccggaacaacatcataatcattgtttcggtgatctatatgcatagattcaggtctaaattaagtatccatatagaatattttatatcttaaatttttcatcaaatttcttatagcgtatataaatgtgatatactagggcaattattaaaagtaagaatgcaagtttcatttcagttccatgatagaagtaatccacaagagctcttatgataaagaaaattgaccatatgaaaattgtttttccaaagtagttacagatctttacttcgtcatagttttttctttcttctggagatgcaaggttatatcctgaaataaaataacaacatttcccattggattttataaataatacactcataattacaaatgcagctgcaattaataaatcaattgaaatatatgtcattgcgtcacctccctatagtacaatagttatacacaacataattataaatattcaagtattttcatagataaatatataatgtttatctaaatttagagtcatttaattatagataaggatatttaagcatattcttattttttatagatttagaaatttttcatatctaatttgatctctattatcaataaatactctgtctaccatcttaaaaccattgctttcgtaaaagtttctcagcctatctctaaatgtaccacaattcaaccttaaccattttacattatgctctttgcaaattaattcaacagattgtatcagtttgtgtccatatccctttttcacactttctctacaaacagctaacttgtgcattattccagattcattcttctgtaagtttgcccaaaatagaggatcataccattgcaaaatatatactccgattaagtttcctttctcgtagcataatttcatatcctcaatactatatttctttagcaattcctcacttgttatatcttcatacttccacattggctgattaatagaattaagccatgtggcagagtcatttaaaacctttgaaaaaatatcgatacttttgtgggttgcatttactacttccaaatatattcctcttttctatatagtttttaatttacttcattatataaattttgaaaaatcatattatccattagattatagcttgatataataattattatatcattaccaaatgagacaagcttataaaaatagattattaaaaactacaaaattgccacaatcgaaatgaaatatattgagctttactggtggttacttggaatatataattgggttataaagtaaaacaagtaatttgatggaggagataaatggattttagggatttaaatattaaaatatttgcagatggggcaaatttaaatgaaatgttggaggtttataagggaggtattgttaaaggctttactacaaatccctcgcttatgaaaaaggcaggaattgatgattataagaaatttgccaaaaatgttttagaagaaattaaagatttaccagtatctttcgaagttttctcagatgatttcgagactatggaaagggaatcagacgttttatctgaactaggtgaaaacgtttatgtaaagatacctatcatgaacactaagggagaatcttcaattccgctaattaaaaagttatcggaaaaaggataccatcttaatgttactgcaattttcactttggatcaggttaaagatgtggtaactgcgttaaatccagaagttaagagtattgtgtccgtatttgccggaagaatagcagatgctggaactaatccaatgaagattatgatgactagcagcaagctatgtaaagcaaataaaggtgtagagcttttatgggcaagctgtagggaattatacaatattgttgaagcagatgaatgtggttgtgaaataattactgtaactaatgatatattaaagaaactccctactatgggaaaagatttatacgaatattctttggaaactgtacgaagtttttataaggatgcatcaagtttaggattttctattttgtagcattaaggaaggtggcaaggctatgattgaaaagttatttaataaagaaacaattgaattaaatgttgaagtaaatgattggatagatgctataagattttgtggaagtctatttgttaagaatggaaatactgaagcaaaatatactgatgcaatgataaatacagtaaaaaatatgggacaatacattgttattgaaaatggaatagctatgccgcatgcaagaccagaggatggagtcaagaaaattggtatggggcttataaaacttaagaagcctatagaattcggtaatgaagaatatgatcctgttgatatattgatttttatatgtgcgatagataagacttcacatttgaaagccttggccgaacttatgacacttattgaggataatgaatttttaagcattgtaagaaattcatcttcaaaagaagatgttcttagctatattaattcaaaaagcttttaaattagcttaaatgacttttagtaatattataaaggagatagaaaaatggaaatattaacggtttgtggcaatggaattggaagcagtttaatgttagctatgaagattgaggaaatatgcagggaaaacaatataaaagctaatgttgaatcaactgattttaattcagcacaagggaagaaggcagatttgataattactgtcaaggaacttgctcagcagtttgataatagagatgttgcagtagtgagaagttatataaataaaaagaagataacagaggatgttttggaaattattagaaagaagtatatggaattaaataaatagggggtaagtatatgtcagttcttgagttttttagagacgtattgaaacagccggctttattaatgggaattatgtcattcgttggacttattgcacttaagaaacctggtcataaaattatgacaggaactttaaaacctatacttggttacttgatgcttggtgctggagcagattttatcacctctaacctagatcctcttggaaaaatgatacaagagggatttcatataaatggagttgttccaaataatgaagctattgtttctgttgcccaaaaagtattaggcgtagagacaatgacaattttaattgtaggacttttaattaatttattgatagcaagatttacaaaatttaaatacgtatttttaacaggccatcatagtttttttatggcttgccttttatcagcagttcttggaacaacaggtatgagtggaacagaattaatattatttggtggattcttacttggagcatggagttcaatatctcctgcgatagggcaaagatttactagaaaagtaactgatggcgacgatatcgcactaggtcactttggtagtttagcgtactatatttcagcatgggtaggatctaaggtaggaaaaccagaagaaagtactgagaaaattgaaataccagagaaatggggatttttaagagatacaaccatttctactgcattaacaatgatgatattttatttaattgcagcaatagcggcaggtccaacttttgtagcaactatttcagatggtacttcacctatattatttgcgcttatggcaggattaaaatttgcagttggagtaacaattgtttacagtggtgttagaatgattcttggtgatcttattccagcattccaaggtattgcaactagaattatccctgatgctgttccagctgttgactgtgcagtgttctttacttatgcacctacagctgttgttataggatttgtatcttctttcattggtggtgttattggcatgattcttttaggatttgccggaggagtattgataattccaggactagtacctcactttttctgtggagcaactgctggaatatttggtaatgcaactggtggtcgtaaaggcgctatagtaggttcatttgtaaacgggcttttgattacttttgcaccagcattacttttacctgtacttggttcattaggattccaaaacacaacttttggtgattttgattttggagttttaggtattatacttggtaaagcatcagaattagtgggaaaatttggtattatagctattgttgttatattactagtagttttaattgttcctaatttcataaaaactaaatcaaaagcaattaataatctagattgatacttctaataaattaaaggaatttatcttgatgacataatatcccttctcttcaatataaataatatagtgagttgaaagtaaattaagctttcaactcatttgcttaaattaatgaatatttatggcattatcaaaagaatagcaagtcaatgttatatctaaggttgttattttctttcatatgccttaaaaagtgagtgatattattaaaagcaggtgtataatatgctaaatagcaggtgttcagatatactaaaaatcatagcaaacagcagtgtacctataactataaaggatattgctcttaagtttaaaataagttctagaagtataagatatgatttagatagaatagatgaatatttaaaagaaataaatttaaacccattagttaggaaacctaatgagggaatatcaatagatttaaggcaagatgagaataagagacttttaaacttaatggaatccataaacagctatgattatgttatgtctcaaaaggaaagaataatttatataatctataagttattagaaaaaaatagctatctaacaataaacagcctggctgaaaatatgttcgtcagcaggggaactattaataatgaccttaaagaagtaagaaaattacttgaaggtaataatataaagcttcaaagtgaaaaatccaaaggaataaaagctattggagatgagaaagatcttagaaaagttgtttcgaatcttatgcttgaaaatgtagctgactcagatttgattggtgttaattttaaaaagttatttaaggatatggatatagaatttattggtaatgtaataaagactgcagaagatcaattagaaagtacattatctgattattcatttaacaatttattaattcatattgcaattgccataaagaggattgaacttgctaaagatattgtgatggatgataatgagcttaaaaatttaagtaaaacttgtgaattttctatagcttctgcaatggcaaaaatgctggaggatagatatgatataaaaatacctaaaagtgaaattgggtatatgacaatacatcttcttggaagtaacgtaatgttaaaagaagaaaaaaatgatgatctagtatatatacagcttatttccgctacattgataagtgaatttggaaaaagaacaaagtataattttgaagcggatgagcatcttttagaaggattaattcagcatataaggccaatggtttatagattaaaacatggagtcagtataaataatcctcttcttgatgaaattatatataaatataaggaagtttttactttagtagaagaaagcctgatatttttggaaaaggatttgaatgcagaaataagcaaagaagaaattggctatataactttgcactttatggcatctttagagaggataaagaatttaaacaagataaagcctagagttttagtggtatgtgctactggagctggtacatcaaaatttgtatcaacaaagcttaaatcaatatttgacataaacataatagatacagtttcaagccacgatattgaaaggatagcaaaaagagaacctatagatttaattataacaacaatcccaattagtataataggtataagatgtattttagtaagtccatttttgacagaaaaaaatataagtgagttaagcctattcttttcaaaatattcgcaagcacttgatgatattgaaaataagaaagagtttgaaagtgaaaaaagtttttctaaatgttttaatgaagatgatgaatattataatatgaatttggaagccaaaagaagtgtcataaaaaatatactaaatatagttgataagaactgcataataaataactactcaaatttagaaaaagaaatagtgacatgcttaagttcatacaaagaaataatccagccttcattgagtgaaataataaatgataaatacattaaactaaatgaagaagcagaaaactggaaagaagcaatagtaaaaggtggacaaatccttaaaagaaacagttgcataaatgactcttatattgatgcaatgataaataatgttgaaaaattgggctcgtatatagttattttaccaggaatagcaatgcctcatgcaaggccagaagatggagtatataaaattggctttagtattatgacattaaaatatccaattaaatttggaaaccttgaaaatgatccggtaaaggtaataataactatgtcagtaatagataataaaagtcacatgaaggctttgaaggaattaatgaaaataatagaacaagatgattttatagatgaaatgaatagaactaattctgtagaagaggttttgagaatatttaatttatctagataaaaagataaatgacgatgagaagttctatattgatgacaaaagcaagtaagcgtgattctttaaagctcaacagtataattgaataaaactatttttaatatgtaagcattgtgctaaatcgatatatttagtgcagtgcttttttgttaaattaaggtaaaggtataggcatataactgtaaagcttaggttaatactatgtaaatacttgtgttaaacgtttgctgcaaattgactttgaattttcacaatgataatattcaaattgttggaagaattgttaaaagtaatgtttaaggaggaaaactggtgtcaaaattattgctcaaaaacgtatgtaaaaaatatgatgatgaatcatatgcagttaaaaatgtcaatttagaagttgatgataaagattttttgattttagttgggccatcaggctgtggtaaatcaacaacacttagaatgatagctggccttgaagaaataagcgaaggtgaaatgtggctagatggacagtttgcaaattatcttactcacaaagaaagagatttaagcatggtatttcaaaattacgcactatatccaatgatgtcagtttatgataatatagcattttctttaaaggtgagaaaagttgataaagctactataaaagaaaaagtaaataaagttgcagaaatcttgggaatacaagaattattaaagagaatgccaaaagaattatctgggggtcagaagcaaagagttgcaattgcaagtgcaataattagaaaccctaaaattttgcttatggatgagcctttatcaaatttagatgcaaaattaagaaatcatatgagagttgaaatgtcaaaacttcataaaaaattaaacaatacaattatatatgtaacgcacgatcaaactgaggcaatgacacttggtaccaaaatagttgtattaaaagatggaatagtgcatcaagtagatactccagaggaattatataataatccaatcaataaatttgttgcaggttttataggatcaccgtcaatgaattttataaaatgccaattaaaacaggaaaatgatgaaatgcattttatattcggtaatgaaaaagtgtatttacctaaaagtaaaagtaagctattgataaaaaaatcttatgaaaataaaaatgtaattattggtataaggccagagcatattacacaaagtgcagatataaaggacgaagataaagaacatgtatcttcggtaattaatattaaggtagaattaagcgaaatgcttggagaaaagacaaatgtttattttaaaattggaaatagtgagctgacagcaatttttaaagatagcgttaacttaagcacaggagatgaggctcagattctaataaatacaaaaaatatttgtatttttgatgaaacaacaggaaagaatattctgtatgatgaagttaaaggaggcctatgtgatgaataaaataaaaaaaactgaaattggaccatatttgtttattataccaagtcttataatttttatattatttttattttatccattttttaaaacagtatatttaagtttatataaaacagataaaatgggacaggctaaattatttgcaggatttgagaattatacagatttattttcatcatcatcattttataacagcctaatggttacatttatttttgtggcaatagttgttttagtaagcatagctttaggacttataacagccttattatgtaataaaacctttccaggaatacgaatttttagcactgcgtatgctcttccaatggcaattgcatctacatcagcatcaatgatatttaaaattattcttcacccatctgtaggtattgtaaataaaattctcaatgttaatataaattggttaacagatcctaagtatgcattaatttgtgttgcagtattaactgcatggcttaacagcggtattaattttctatatttttcggctgggttaagcaatattgatgaatctatatatgaaagagcatcaattgatggggcaagctcacttcataaattcttcaaattaactttacctggacttagtccaattctattctatacgttcgtagtaaatattatccaagcctttcaagcgtttggacaagttaaaatattaactcaaggaggaccaggggagtcaacaaatctccttgtttattcaatttatagggatgcatttttcaattatcgatttggtagcgcagccgcacaatcagttgtactttttgcaataataataatacttacattaataatgttcagagtagaaaagaaaggagttaagtattaatggaagctgtaattaatgaaaatataacgaaaaaggaaatagaagatattcaaactaagatgagaagaagatataaaaatagaaaaagaattaactattctttgagactattaattaatttaattgttgtcttaattgtacttctacctcttttatatgctttaagcattgcatttatggaatcaagtgaggtattttcagcagatttaaatttgatacctaaaaatcctacattatcaaactttttagatgtattaaaaaaagttccattatttaaatttgtatttaactcatttttagtagcaggattaataacaattggacaaatagtatcgtcttcactagcggcattttcattttcattcttaaattttaaaggtaaggaattattgtttatgattgttatgtcaacaatgatgataccaggagaagcaacgatcatttcaaattatttaacagtaagttcatggaattggctggattcatatcaagtacttatagttccatatttggcatcagcaatgggaatatttttatttaggcaattttatttgtcttttccaattgcactttatgaatcagcaaagattgatggatgctcaaatataaagttcatatgtaaaattttaatgcctcttacaaaatcatcgataggtgcaatggcagtttatacatttataaatgcttggaatatgtacatgtggccacttctagtaactggatctgataaaatgagaacagttcaaattggtataagtatgctcaatagtattgattcacagtccataacaatgatgattgcaggcgttgtaatggtaataataccatcactattaatctttgttgcagggcaaaaacaacttataagaggtatgttctctggtgctgttaaaggctaaatcgaacagtaagatttattaaagtacagctaatggttaaaaaacagcatttaattaaaaaatataagctgtttaaatataggaatattatgattttcaaaattgaagggagaaaataaaaatgaaatttaaaaaattcttgccacttgttttaacggctacaatggccttgactttacttgcagggtgtggtggtgctagtaaggaaactgggaataactcgtcaaatggtgatgataaaggaaaaacaacaataacgttttggcactctatgggaggagtaaatggagaagctcttactcatttagtagataaatttaacagcgaaaatgataaaggaattcatgtagatgcacaatatcaaggagaatacgatgattcaataaataagcttaaaagtgcacagcttggaaacatgggagcagatttagtacaaatttatgacattggaactcgctttatgatagattcgggatatatagttccgatgcaggaattaattgataaggataattatgatatttcaaaaatagaacctaatatagcggcttattatactgtagataagaaattatattcaatgccatttaattcatcaacaccaatactatattataataaagatatgtttgctaaggctggcattaaagatgtgccccaaagtttttctcaaattgaaagcatttcagacgatttaaactctaaaggtggagctgctaatgcaatttctcttggtatttatggctggttctttgaagaatttattgctaaacaaggacttaaatatgcagataacggaaatggtagacaaggtgcagcaactgcagttgacttcgacaaaaatggtgcggctttaagtattttaaattcatggaagagtttatatgataagggatgtacagctaatgtaggacgtggtggagatgcaggacttgcagatttctcagcaggaaaatctgcgatgacattaggttcaacagcttcattaaaacaaatattaactgatgttaatggtaaatttgaagttggcactgcatattttccaacagctgttgatggttcaaaaggcggagtttcaattggaggtgcttctttatgggcattagataataaagatgacgctaaaaagaaggctacatgggaatttgtaaaattcttaatctctccagaatcacaagcttattggaatgctaacactggatatttccctgttacaactgatgctcaaaatgaacaagtatataaagacaatattaataaatttccacaatttaagacagcagttgatcagcttcacagctcatcaccagagtatgcaggagcactgttaagcgtattcccagaagctaggcaaacagttgaaactgaaattgaaaatatgcttaatggaaaacaaactcctgaagaaactgtaaaagctatggcagatagtattaataagtcaattggcgaatataacaagattaataagtagtatgattcatgtgacaattattatagatattgaactctaaaactaaatttatgtggtaactaccgaaatcacaaatatatttatgatttctagtgaagatatgaacttaagtcttggcaactttgtaaataatgttcatctaataagtctaattcttaagttgtttacctataagtaattgatttgcaaaaaagttttatagttttataaaatagtttaaatctagaaagggtatcaatagtaattaaatacttggtactcttttgtaatattaaattatgtggaaggtgataaagtatgggtgatacaaagatatgggcacatagaggcgcttcaggatatgcgccagagaacactttagaagcatttgaacttgcagttgcccaaggggcagatggtgttgaattagatgtgcaacttacaaaagatggagaattagtagtaatacatgatgaaacaattgatagaacaagtaattgaaggggtaatgtaatagaatatacgttaaaggagcttaagaattttaactttaattgctctaatccaaattatgtttatgctgaaattcctactcttaaggaagtttatgagcttttaaaaccaaccaatttaattataaatgtggaacttaaaactggaattatattttatgaaggaattgaagaaaaggtattaaagttatcaaaagatatggattttgaagatagagtaatatattcatcattcaatcattatacaataaagaaaattaaagaacttaataataaagcaagaactggattattatattgtgatggatggataggtattttagaatatgctaaaaaattaggtgtaactgcattacatccctgtagttacaatcttcagtatgaaaatctaatagaagaatgtaagaaggaaaatatacgacttcatgtttggactgttaatgaaggagatgaaatgaactttttatacaaaaacaaggttgattcaataataactaattatccagatgtagcaaggggaataagaaacaatttgtaaatctaaaacttgtaaactaaatttgttatatataagcattgtgctaaattcatatatttagtgcagtgctttttcttctttaggaactacctattaaggcaaagatttcagaaagtataataaaaatagctttatcttgtagtaaattataattttgttaagtccgtcgctgacatacactatttgaagttataacttatataatatgattttcaattggtttgaaaagaatcaaaagtataaagatggaaaaaagtattcatattcgtattatatggtataataactacaataaaagcgtaacattaatgatagatgttaaggcttaaacaaattatatctatactgtttacaattttaatacgcatgttggaatcaagtttctacattccaggcttaagtaagcatttagttcagatttattatttcaatatagataacatataaagagtttatgattgaaataataaactataaaggaatgaaatatttctagtgtttgtacacgcagtgaacagtagatataaaattatgaatataaactaatttttataaatggagggaatagtatggaatttaaaattaatacaattaaagctaatgaagctgacttggttatgcttccggtttatagtgaaaataaagatttgcaagatgaaaagcttacagtgatatataagcattttaaagaaagcaataaatttaaaggtaatgctggagaaatatgtgtggctaccaatgtagttgaaagtggagttcaagacataatatttattggacttggaagcaaggatgagttgacaacagaaattataagaggttcttttggaaaggcaataaaaaaggcaattgaattaaaagctaaaaaaatagcattaaatatgacatctaataagaagttatcagttgaagatattacgaagtctatggttgaaggaattggttttggagaatatagatttgacaaatacaagactgaagctaatgaaaattcggaaattgaagtaagtatctgtactgatgaaaatggaaagccaaactcaatagatgaatatatagatgaagctttgatacttgttgaaacaactaaatttgcaagggatttagttaatgaaccagctaatgtactatatccagaaactcttgcagaaaaggttattggctctggaaacaaatatggatttgaagttgaagtattcgatgaaaagaaaattaatgaacttggaatggaatctttcctatcagtagctaaaggatcagaactttctcctagacttattgtaatgagatattttggagatgaaagcaaaaaggacgacatattaggtctagttggaaagggagtcacttatgattcaggtggatattctatcaagccaactagcagcatggattcaatgaaatcagacatgggtggagctgcatcagttattggagcaataagtgctatagcaaagaaaaagctaaagataaatgttgtaggagtaattgctgcatgtgaaaatttaatatctggcaaagcatataaaccaggagatataattggttctatggctggtaaatacattgaagttttaaatacagatgcagaaggaagacttactcttatagatgcggtacattatataattgaaaaggaaaaagttaataaggttatagatttagctacattaacaggagctgccttagttgcacttggagttactacaacagctgtagtatctaataacgatgagttttataaagagttagaaagcgcatcacttaaagctgatgaaaaagtttggagattacctgactttgatgattataaaaaacttattaagtccgatatagcagatttaaaaaatactggaggcaggcatgcaggtactattactgctggattatttataggcgaatttgtacaaaataagccttggttacatttagatattgcaggtacagcatggactgaaaaggaaagtagctattgttctaaaggtggtacaggagttggtgtaaggactctttactatttagcaaagaataggtattaagatcagtaaaagcgctctaacagtttttattaaatttcttctagaaaatagaacttattagcttctaaaaagctagtaagttttttattctttaggaatttatcacaagtgttgattaaccaaatttttactttaaattattaacttatttttgatatttttcaaaaataagttaatagatatatagacttcgaccttaagactttttttaagcaattttcttacaaattgaattagtgataatttaacatattttaaatttttagtcgtttcaacataagtaaattgaagcaaaacataagctatcaatgatatgaaaagttgattatagacagcattttcagttgttcca

SEQ ID NO: 14 - DNA, 94175 bp, Clostridium beijerinckii
gttataatatactataaatttcttattaaagtctacttaaaaaaattaaggtgagaagatttatataaaaactcttctcaccttaaataaatatccccttaaaaattttacggtaacatatatatgttgcaattcacaatgcacaatgaacatttcacaattacagctaaaattcttttaatatttttagaattatgctgaagaattatttttgcaatatatatataattatactaccataaaatttttcacttactttgaattactatagcatatggatatataaagctagatatgcctttttgcttctatatcttcgtttatcagttaaaatcaattctattagaattctaacagatagttatacattcgttaacaaactttaacccttcttttatattcctatgctttagtacctttatatcaaatccaaatactttataaattaactgtacacaatatcctattccaatggcagtgactaacgttccaattccgacaaacccgcctagaatccatccaataattagggctcctgcttctataaatagtcttattattccaattggtttacctgtaagcttaactaatgcaatcataagaccatccctaggaccacatcccatttcacatccaatatacaaatagcttcctaatgctgtaacaaataagcttccaattaacattattatgcctgtatatatgttattacaaactggaatgattttagaatgtattattaaatccataaaacatccaattactatcatattcgctatagttcccatcccaactttaagccctaggatacttgtgattgctactattattattccaactataatgcttgcctgtccaatagttaaactagttacatttgttaatccttggtgaaatacgtcccatggacttaagcctaaattcgaattaagagccaaaacagttcctagtgcgcataataaaaatccgaatgtcattctaattataagtgctaataatttcttcatacttctcctttacatttctcaattttttggaattataggccaaattacctatcataatcccattaacttaaacattagtttcacgtgtgcaaagctgactataagctaatctttcaactaatgtcagtttacatcaatttaatgaaatattcaattcattttttaatttaaatcataattattactgaaataaattcactaaatactaatactgctacactctcttttgtaataaactatctaaaaacaaatcaaatcctaaacaatgttattaaaaatgttaatattataatacacaagttatcctacatttattttccataataataaaattaaaactaaatttaagtttattaaagctcatgtttagcaactttaggcaatttaaataattttatctttattttttctttatattagattaaaattattattaagcaaaaataacaatatagttaagagggaatactacttcaagtaaatattcttttcttaatttaaatacacttataagtgaggtaagactatgtcaaacgaaataaattcttctaattttataagaaatatcgttgtagaagatctagaaagcggaaagcataaagagataattactcgttttccaccagaacctaacggttacttacatataggccacgctaaatcaattcttttaaattttggtttagctgatgagtttaaaggaaaaactcatttaagatttgatgatactaaccctgttaaagaagatacagaatatgttgaatcaattaaagaagatgtacaatggcttggtggtcattgggatgaacttttctttgcatctaactattttgatgaaatgtacaatagagctgttctactaataaaaaaaggtaaagcttatgtttgtgacttaacagctgaagaagctaaagaatataaaggtacactaactcagcctggtaaagacagcccttatagaaatagatccgttgaagaaaatttagatttatttgaaagaatgaaaaatggtgaatttgctgacggcgaaaaagttcttagagctaaaatagacatggcatcaccaaatataaatatgagagatcctgttatatatagaatatctcattctactcatcacaatactggtgataaatggtgcatatacccaatgtacgattttgctcatccattagaagatgctattgaacatgttacacactctatttgtactttagagtttgaagatcacagaccactttatgactgggtagtaagagaatgtgaaatgaccgcttccccaaggcaaatagaatttgcaagattaaatatgactaatactgttatgagtaaaagaaaattaaaacaattagttgatgaaaaagttgttgatggatgggatgaccctagaatgcctactatttctggccttagaagaaaaggatgtactcctgatgcgctaagaaatttctgcagcgctatcggtgttgctaaggctaattctgttgttgattcccaaatgctagattattttataagagaggatttacaacttaaggcgccattgtctatggctgtgttaaatcctttaaagcttgtaataactaattatcctgaaaatgagacagaaatgctttcaatagagaataatgcaaaagatgaaactcaaggtacaagacttgttccattctctagggaactatacattgaaaaagaagactttatggaaaatccaccaaagaaatactttaggttattccctggtaatgaggttagactaaaaggagcatactttgttaaatgtaacgaagtaatcaaggatgaaaatggtgaggtagtagaaattcattgtacttatgatccagaaacaaagagtggttctggctttaccggcagaaaagttaaaggaacaatccattgggtagatgtaaaaacttgtcttcctgctgaattcaggttatatgagcctttaattttagatgatgcaccagaaaatgaaggaaaacacttccttgaacaaattaatccaaactcactagaaatattacaaggctttattgaaccaactgcatttaaagatgctaaacctcaagataaattccaaatggttagaaatggtttctttaatgtagatactaaatatacaactgctgataagttagtatttaatagaatagtaccattaaaatcatcatttaagttaagctaattatgcaacttgaaaaggcagagaaatctaatgtataagatttctctgccttaatttatttttaatctcctaatccagataattttatacaaaactatctgatcaaaattttttataccacttaaaaattcttcaccattgtcatcataaccaagccataaattccacctaattttctatatttcgataaaaggtaacatttactatcaagttgataaattacatttcgataatagagtaagtttatatattagggggaatgcaaatgattacaaaatctacaaaaaagacaaaaggcttacctataaaaacaaaacttattttagtaatgattttattgctgagtatacctgtacttgtactcggattagtaagttattatgtagcaagagctgaacttgaaaatagcgggaagattttattaaaaaatagtgtagaaatgacattacaagtgattgatgcaaatcaaaagcttgtagatcaaggaaaactatctcttgatgacgctcaagaaagagttagagaatatatgcttagcgaaaaacaagcggatggtacaagaaaaatcaatcaaaatttaagcttaggtaaaagtggttatttgttagcttatactcaagatggagttgaagcagctcatccaagtttagaaggcaaaagcgtactagattataaggataaaaagactggtacattattcgttaaagatcaaattaaagtagctaatgatggcggaggctatttaacttattggtggacacttcctaattcagataagatttcagacaaaataacttatcaaaagactgatccgcattggggatgggtagtttgcgctggtacttacatgaatgattttaatgttggttcaaataatattcttattactactctgattatattattgtcagtaattattttaggttctgcagtaattatgatatttgcaaaacacatatctactccaattaaagaaattagtgacgctgtagatactgtagcttcaggtaatttgaatattaaggctatgaaaatcaaaaatagagatgaaattggtaatctaaataattcctttaatataatggttagaaatgttaacgattttataagttcagttaaagattcagttaatgttgtttttgactcctctaaattgttagatgaaattgttgctgaaaatacagcttcgattaatgaagtatcagattccgttgaagagatcgctaaaggttcaaatgaacaggctaaagaaactgaaaacggagttataagagttaagaatttatcggagaagatagatttagttacaaaactgacaatagaaactaatgatattgcagttaaaacaactaatataagcaacagaggtttagaagcaattgatttactttcaaaaaaatcaattgaaaatagcaaagccactgaaaaaactagtgccataataatggaagtagataaaacttctattgaaattggatctattactgaggcaataagtcagatttcagaacaaacaaatttattatctttaaatgctgctatagaagctgcaagagctggtgagcaaggaaaaggctttgctgtagttgctgaagaagttagaaaattggcttctcaatcttcaatgtctgcttcaaaagttaaagaattaatcaatggaatccaagataaatcaaaagctgctgtaaaagccattgaagacggaaagttaatagctaaggaacaaaataattctgtaatagacgctaaggatatatttgttgaaatattaaaatctgtagaaaagattacaaacgatatgaaaaacctaaaaacttatagccttgaaatggaaaacgagaaaaatgaaatagttgaagttttagagactctttctgcttcaactgaagaaagctctgctgccactgaacaaatttctgctacaactgagcagcaactagcaagtgtaaatcaaatagctaaacatactcaagacttaaataaacttgcagagaagcttagagacgcagttaatgcatttcaagtttaaatgaattaagttcaaactttcccacaaaattaaaaaggcatagtgtttggagtacatccaccctatgccttttggttatggtttatatatttaaaaatttatcaaatctgtttcttgtattttcttcccctatgatttgcattatagtataaatgtcaggtgaattagttctatgagttaatgccgctctaactgctcctgcaacatccgaaatcatacctttatattgatctggatttgccttaaattcttttctattagcgcaatagccaagtctaattcctatttcctttaagtcatcaaaccaagcttcttgactttctacatcaaatttaaattctttcttgtaaatttctactatttcttttgctgcttctaatgtaactccctttggaagttcaatttcttctgctgattctttatagaatagttcatcaaagaaatagaaaatcttactttttacttcatcccattttgcaaaatcttttcttggttttggaccttctttatctatattgaagatttcctttgccatagtttcattttctgtaactaatttatacatttcttcatcaaattccttagcccatgctgtatagtattcataaacatcagtagctttcatagcagcaattctatcttttgatacatcgtttaatttaactaaatcaaataatgctccactcttacccatcttttctaaatgaacttcgaattcatggtagtcagccttaggattttcagctctccattcttcataagtagagtttactatattaagtaaatattcaattacagttactactgggaatccaacttctttgtagtaagaaacagctgcttctgcatcttttctctttgaaagctttctttttgatccaccatcttgcttcattattgttggaatatgagcatatcttggtgcttcaaaacctaaaacttcaaataattgaacgtgtataggaagtgatgataaccattcttctcctcttattacatctgttgttctcattaaataatcgtctattgcatgagcaaaatgataagttggaagcccatcccctttaataagtactacatcttgattattttctgggaatgagatatctccctttattaagtcgtgaaattcaacccttgtttcgggatttcctggagattttaatcttataatatatttttctccgttttcaattctctttattgcttcttcttcagttatatttctaaacttagcgtattctccatagtaaccaggagttattttatttgctatttgtctttctctaagttcagctaattcttctggggtacagaaatctggataagctaaaccttttataagtaaatcttttgcaaaagtattatatatttcagctctttgactttgtctgtatggaccatattcacctttagatgtttcttctcctgtcataccttcactaaaatccataccaaaattatgcatagtagctattgtatcttctattgcaccttcaacttctctcttttgatcagtatcttctattctcaaataaaaaacaccttcactttggcttgctaatctttcatttattaatgcagcaaaaactccacctatatgttggaatccagttggacttggtgcatatctagtaactcttgcaccttccttaagacttctctttggatatttttcaacgtaatattcagttgtatgttcaacattcccaaatattatatctgctaatttttcaaaactcattatttgtatctctccttatcattcttccttacaaggtattataagccccttgtcatggcaatttatatcaagtgaaacttgattcaggtagggtttgatccccatctgaatcctagttgaacttatccaggagcgtgcagccgttatcccccgcttaaagaagtgtgggtattacggatgctagctatcggataaaccacataataaatatgtagaataaattaaaattatttaattatcataatttgataacactacaaaatattaatatcctaattgttttcctacgattattacttttatcctacctttaacaaattgtcctctgataattgtaaaatcattgcatattctattaggacttttacaatccacacaataccctaatttagtacatggagtatctttacctaatctttttgcatcaatcggagcagcataatttctaactcttttttctgcttcttctatatctttaacaattttatttgttccagttattaaaataacctgcttcgggccataaatcattggtgcaactctacttccattaccatcaatattgtatagttctccactttcagtcaaggcattggtactacacataaaagtatcagcagaaaagttttgtatataaatacctttcttttcttcacttgtaataccttctctatacttatctaaaaatatataattttcctcacgaagaaagtctataacacctgtttcaaacaacgtcatagaatcgccaacccctacaacagaattttcatctatgagttgttttaaaagttcttttaattcattatcatcatttacaaagaaaccatccatattgcgttgccttaaattttttatagttctattaatttgttcttctttgtaccatgaaatattaatctccatataatatatagtcctttctaagttaaatacaaaaaagcccttcgtcctaaaatatccttaggacgaaaggctgacttccgcgttaccacctaaattgattaatttaaacatactaattttaaatttcaaatacgtttgatttaatcctcttaattatctttaagggaataaccccataaatatactacgctttaaggcatataccttatgctttctatttattactcaaaagcttccttcaatagttttaaattctaggattacaccctccctagatctcttataattaaaatcttatttactcttctttttcattgcaattctctatatttatattttatatagtatttacaaaatacaaatcaattatacattttggaaatgctaatgtaaagataatttatcttattataacaaaaaatgcaattatcttaacttgctacattcattttacattccaggcatttgcgacatgtttgacatactatttattatttcaggattaaccattccaaatatcattgcaatatgagcaacaactagaaatcctccaataagtataaaatgaatttttgctttctctcttgatgttctattcctaaaaattaatcctaactccattagagctataggcaaaaggaagataactccacttaaataaaaaccaactgccaatacatcaacccaagtatgccatccaccagtatttgttagagggattacagcatttattaataggtaaataaatattcctgtaaagtaaattccatcgaatataccgacaactttatttagagttcttaacccacctttttgtacattgttgaaaataatgaaaaattcagtaattgtaagtgtttccgcacaaataactggtattgccataaaaataattaaattccaaggttgattatccgctaatagtgacatgtaatgtgtcatattcataattatttcctccatataatttatctaattttcataatctatattacaaaattaatatgaagattttatgaagatgcctagaacaaatttatataaatgtagaattctaaatagtctcagcatataatatctaaagtaattaattaaagtgataagatgagatacattttagatgttaaagagtgtgaatttttagggaaaggcaaggaaggcgctgtttatttaactccagaaggatatgccttaaagatattttataataaaaagaaagctaaaaacgaagctgacctgcttgaaaaagttaatggcagtagattctttccgaaagtattatttattgctaacaacatgattttaagagattatgttgaaggtgataatctaagttcttatataaaaaagaatggattatcttataatctatctatcgaaataataaatcttatagaagagtttaaaactttaaaatttacaagacttgacataagagatgcccatatatttgttaacaaaaatgagcaaattcaagttatagatccaagaaaggtttttgtaaaaaagactccttatcctaaggagattattaaagttttagtaaaattaaatgtttttgaggatttcttaaaacatgttttaagttataaacctaaacttattaaatactggattgatggatataattactttagatatacatctaaaaaagtgatacgcattaatatgtttgcttcttagattttaatttaaattaatcttcctaatagctccattaagtatattataactctgaatttattcgttttataatatacttaattttaggcttaagttaaattcttagctttttttcttttaatgtatagtacaatcactattcctaataccattccaataatacttatcaattgtgcaattcttatattaccaagcattaagctgtctgttcttaatccttctataaatacccttcctaaagaatatagcgttatataacttgctactacaacaccatcctcattatttttctttttatagagaattaatagcaaaatcaaacaaaccacaatgttccaaattgattcatataaaaatgttggattgaagtaactgccttcaatatacatgcctttctgtataaagcttggaaaatggcttataaatgaatgtgaaacttctcccccatgcgcctctccattcataaaatttccccatctcccaattgcttgggccaaaataattgatggtgctgctagatctaagtattttagcatatttaatttctttatcttaaagaatacatatgtagcaataaacccaccaattaatcctccgtgaatagctaatccaccttttctaatgttaaacatatctattaaattgtttttataattttcaaattcaaatattacataatatgctcttgcaccaataattgcaacaggaaaggcaataaaaaagcaatctaatattatgtcaaagtctattcctttctttttacaattatagtttgctaatagtatagctactattactccaagagctattaatataccataccacctaatttcataggttccaatttgaaatgctaccggattcataaaacaccgcctcttcctataaacttatatattttctaaaaatctgcttcatagaagtttatcttaaatcatcaattaatattataactgaaataatttcgtaaagaataaattatactgattagaacttatatattatagcatttattttaaaatataactgtaaaatttatgttatgataaaattaatgcatacctaccagcttttaaaggtgtcaggtatgcattctttatatttttaaatacagactttattttcaaatatttcttttcttgctagacttcaatctttgctattgaagttttcactgatacaccatcaatacgatcaagctgctctgtaaaatcatttattgtttcttctgattcccctgtaagagctatagatataactgataactcatcagcaaaaggtatccccatccttccttttatgcttcctctaaatgatgctactacatcattaaattcatcttgcacttcctttggatgctctaatattgcgctcactactcctattttagacattttcattcctccattgattttatgtaaaaaaacaagatcttcctttttatgaagatcttcttttcatcaatgtatagtttatctattttttcttaacttattcattattcatattattctattccaacttatttttaattaatgtattgccatctctagaaatgattcctttagaatatgattgaaccaattcccctttatattttatgtttttattacttgttaattctaatacactattatctgatttactattaatataaactttacctgaataatcgattagtatatcatttttatcaacaggtttcgcaagttttaattgattccatttcctctgactatcagataacacgctgtaatatatatttttaattttgttgtctgctacttcgccaaaatatacattatcattaacatcagctcctaatatttttgcacttttaacattaggtattgatacatttccttttgtatttaatatagttatactgttattttcctccattatcgcattagtgctagttgttggtactacaacatttcctataactttttcacttttaaccttcttcaactgattcattacgtttgcgtaatacaaatcacattttccactactcttcttcacttctatatataaactatgagttaatgttgaaaatacaacattattaatttcatcctttgtactctcaagcttaattctaaccttttttaaatcaaagtctgcaagatcccttgcttctccttttttagcatcaaaagatataggctcaaaatagtacgcacctttttcctttatcttttggattattatcatattatcttcactattaagccatctatagaatacaatttctgatccactatctgtatcacatactttttccttatcatcattgctatctaatgttttaagcttactgtcttctatatatgatacatatcttgcatctgaagatactttaatttcacttactcccttttttatattaatctctgttttcttatcagccacattatcctcatctttaacttcttcagcttttatattaagatcagatgccaaatatactttatcaaaatataaaaatatgcattgctgtaatattagagcaagcgcacaccatgctaatcttcttttaatatttctcatcacttatcctccttttactgttccacataaaatgctgtagcaacggttctttcaccatcccaagcattaggagaatttataacatttcctttataatacatagttgaagaatatcctccatcaagagcacctgcattaacagcacctctttccatcattatctcttgaacatcatataaactcgctcctggtgacgttatctttctgccatctataactaatagaattatagttccatcttgtttctgaccaactgcagttctaggattaagcccatcttccattttattttttacttgtctaatcccattaattacaatattaggtcttctaaaacacatagcttcctgtacattcatcttttttaaatcagccaaactatgatccccaactactagttctccactttttgtaaatgcaattacattttcaacttttttctcatctgcaccagactttggataaataacatttccgcctgatattacaaatccaccaggttcagatccagtacctgcataagcagttccatcagttgatttatcaatgaatgatccaccattaatagctgcaacagcattattatcttccgccatctgacttgtcttttcacccattttacctaaaaacttagtcattgcaaccttcatttttaatggatttttcacttctagcacatatccatcaaatctctgagtatgtatatcgtatcgatttatttcatttccaactttatatttaacatttatttttttcatatcttgaaaaacttcttgactatcactctcttcatctattccaagaagtttatttaatgctgactgtggaattatatcatttattaaatatgcatgccttgttgctaggactgttgatataaatgtttttctcgtattatcatatggtccaaagaacaataccaatggtgttgttatagctaaaaagataaacatatccaataatccctttaaaagtactctcgaattagattttcttttctttcttttgtgcgttttttttcttggcttatggtttgtttgtttatccatatattcctccgaaatctatatttatttaatattttcattatctcctattatataggaaataatcctctgagaggttacaaaaaaattaagaattccatatttatacaattcacttctattttctaaagtctttcttttttagaatagacagggagaattctaaaaatagacttcatcttctattttaaaatcctccccaattctaaactaaatttttaagccatattctttgcttgtatcttctaaatccaagtataaatttgtatacttcttcaaatgtaaccattgcatatacgaaatatatctgaagctcaagtaacattccacctaaataggcaaacggtatgccaactaaccaaactccagtaatatctagcattaatgcagctttagtgtcgccaccacttctaagtataccaacaatatttacccaattaaatatcttaaatggcaaatagcacgaaaaaactattaggcatctgctaatatctactgctacactttcagttacattaaatagcataattattggacttctaataaacaagcatgttgcagacattattaaagcaaaaataaactgtagtattataaaatactttgcatgactttctgcatcatccaatttattagcacctaattcatttcccaatataaccgcagttgctgcacttatcccctgaaatacaactgtcattatttgttcaactgtttgggttattgtgattgctgcaacagctccatcccccattcttccatatactaaagaatacattgttactcctaatccccacataaattcattaattataactggagatacagttgaagcatataatcttgtaaaattcttattaaaagatataagttctttaaattttgcagctgcaggtcctttttcataatatactatagctaaaatacatgtgcattcaattgttctagctattatagttgcaatagcttctccttgtaccccaagagctggtacaccaaaatgtccaaatattaaagtataatttagcattactttaatacaaatagaaaacactgttatgacaacaggggcttttacctgatttacccctcttaaaagtgctacataaacatttgtaactgcagttaaaggataactaatggcagctatagctaaatacgatgcacctatttttatcgtattttcatttggtgtaaaaatactcataactatttcaggacatattaaactcggtattacaaaaataattgatccaactaagccaataatcagagacatacctaatactcttcttatattttttatatcatttttgccaaaatattgggctgttaaaatcgaagacccactaacgacaccaaataatagtaatgtaaaaacaaaaaatactttatttgcaaggccaactgctgcaattgaactctgacctaaacttccaatcattacagtatccacaagattcaagcttgtgtttaacagagcttgtaatgttataggtactgtaatagatatagctttgtgtataaatttcttatcttccaaaatgttttttaaagtctcagttattatcatatttagtacctcattatctgcgctttcttaatatcaaattctattttactttagtttactcagctgcgtctaccatatatttaatattttttaagattttgtgggtatacacaatgaaatataatttaatgatcttggttgcgcttcgcgcttttttataaggtgcgtacttttttatcagttgttcttattacatattactaacacttttttaattaataatatgtttttggttgctctcctttttataaggtaagtgctttttctaattttaaatgatcttggttgcgcttcgcgctttttttagaggtgtatatcttttatatttttaatctggtataatgatgtaatgtttaaattaattatatatgtgtcataatatatacaaaaccttgaaaaataacttattttgtgttatttttcaaattagattgtcattcacatatattaataaacattaaatcatgaaagaggtgcttaaccataaatacaaattataaaactcaagaaaataaatatactgaaaaaggtaatcttactgaaattactgtcttaaaaaaagatggaagtgaactagtttgcaagatagacacattcgacgctaaaaaagttaaagaagctggaatttggtttgctgaatggcataaggatttcaataatcatcttgttcaaactttagagactgctaaagttaatggaaaaacagtttccactaaaaaatcaattcaatctgttattttagatgttaatccaaagactccaataaaacacttaaacggaaatactttagataacagaaaagaaaatttagaattatataatagaagtttaaaaaatgattgtactaaaatcgatcacgatacaatgggtataattttaagagataaattcggaaatcataaggatactgctttaatttcaatggaagatgtaaataaagtagtaaaagacggttacaactgggttctttacaaaaagggtactgaaactatggttgttgcaaatacttctgaaggtagaattcgtttagacaggttaattatggacccagacgaaacaatgaaagtacatcatataaatttaaatcctttagataatagaagaaaaaatttagaaaatcaacctatttaattaatttattttattagttctttttctagaatttaaagattattgtaattaaacaaaataataaagcatacattaaatgtgtgctttattattttattatttctctcatatgtataactagaatttaattttcatatagctaattaacatttttttcaaaaaatagtatttttatttatgttaattgggtgtaaactattaagtgagagaatttttgtatgactaatatgaggtgattaatttgactaactttaaaatactttttgatgatataacaaaaatcaaatttgatgctattgtaaatgctgcgaatgcatctctactgggtggtggaggagttgacggtgctattcacaaggcttgcggagaaaaactattagatgagtgtagacagttaaatggctgtttgactggtagatcaaaattaacaagatcttataacttgagtgaccacggtgtgcattgggtaatacatactgtagggcccatttaccgaaataacggctcagaggaaaaatacttaagaaatgcttatcgttctgtttttgaaatagctgctaattactcggaattttattcaaagcagtgtaatgagattctaaataaaaatctttatcgctttaatactgataaacaaagagactttatactaaaagaacttgatgattatattaatgatcatcccattaaaactattgctttaccatctataagcacaggcgcctattcctatccattagatgaagcctgcaatatagcattagatgagattttatcatttataaataactctccagatacctttgatgaaattgcaatggtttgcttagatgagaaaacatataatatgtacaaatctttgtatgaagaaagattacaaaagtaaaagagaagataaattattatcttctcttttactttgcttattaagcagaattatcattaattattcagttaaaaatatgtgtatattattctatcttataatattatgcaaaatatctatctaataatcctttgaatgcttttccatgtctagcttcatctttacacatttcatgaactgtatcatgaattgcatctaagtttaatttcttagcaagtgttgctaaatcttttttaccttgacatgcaccatgttctgcatcaactctagcttgtaagttagcttttgtatctgctactactacttcaccaagtaattcagcaaatttagcagcatgttctgcttcttcaaatgctattctcttataagcttctgcaacttctggatatccttctctatcagcttgtcttgacatagctaagtacattccaacttctgtacattctccaacaaagtttgcttgtaatccatcaattacttctttatcaacacctttagcaactccgattacatgctcatcagcaaaagctagatctccgctttgttcaacaaatttttctgctcctactccacacactggacatttttctggagctgtttctccttcataaatataaccacacactgtacaaacgaattttttcataatctcttcctcctaaaattttaatttatttattttttatttatatcatttaattttatcttttgttttcttgtttcctacattttttattatataataataattatccgttgtaaagactttttttataaatatttcaaattttcctgaaatacttattatttactgcttaactcctatcgctcctgttttggccacgataacattatactggattctataataaaaaattcctacaaattaaaattaaattcatattttacagaaatacataatatgtccaatatacagtcatacaaatgttaatattatctgaaaattttattatgtatatatgaactttattgtttatatgcttaaatttactgtataattgatttatattgaattttataaggagtgttttttattgtttggatatgttactccattaaaagcagaaatgaaagtaaaagattttgctagatttaaatgctattattgtggattatgttgccatataaaaaaagaatttggtaatataccgaggatgtctttaaattatgatatgacttttttaggtttactattagatgcattaaatccagaagagctagaaatttctcatcacagatgttctcttcaccctactgaaaaaaaaattgtaatagctaataacaaggcgttatcttatgcctctgctatgaatatatccctgttttattataaactgttagatgatgctcatgatgataaaaattacaaaagtaaatttttatcacttcttttatccccttataaaagaaaatttcctagttcaatcattagaattaataacaacataatggaatctttaaataagctttccactttagaagatagtaaatcatttaattctatagatgaaatatgtgatccttttagcgatttagttggcggaattttacgtgactatccttataaattaatcgatgacggattggatttaaggaatactttatatagattaggatattcaataggaaaatggatttatctaatagatgccttagatgatttgaaatctgatatggaaaataaaaaatttaatccaataaatttcttgtataacaaaaattctttaacatacgataaatttatggaattcatacagcctaaaatagaatttacaattttaaattgtggatatagttgtaaagaaaacttagaaaaattaaacctaaaaagaaatgaggatatattatataatataattgaattaggtttaatggataaatatatgaacatagttaaaaatccagaaaatacaaatgagactaaaaggagagatttataatgaatccatatgaaatattaggtgtaaagccaggtgcaagccaagatgaaataaaaagtgcttatagaaaacttattaagcaataccatcctgaccaatatggtgataatccattaaaaaatttagcacaagagaaaatgatcgaaattaatgaggcttatgaggcattaacaaaaaatcctggaagtaacagttataattccaatagtacatctagttataacaattcatcaagtaactcatatgattttcaagaaataagaagacttattcaatctggaaattatgcagcagctgaaagtcgtttaaattctataaataacaaatctgctgaatggcattatttatatggtgcaataatgcttaacaaagggtggtttgattcagcacttgatcatatgactacagctgttaatatggatccaaataattttgaatataggcagggcttgaactcattaaggcaaagaggtaataattactctaatccttactatagaactacaaatactagtaatgctgacatgtgtaattgttgtataaatctttggtgtcttgattccttatgcgaatgtgctggcggagatttaattggctgctgctaatataaatatgattaactcttttattttataatatatatgttctaaatattataattcattctttaaaaaactggctgactgccactacattaacttatactttaaagtaaacttctatgaattaaactttttagaacatatatataagttgcatttatttagtgaggtgaatatcttatgaaggcaaaatatatagctgaaaacggaataactatagcattaacattaattgtactttatgctgcttctatacttccagtaagcactttaacaatattgacaatagcttcttgcttaattcctatctcaataataagaacttcaataaaaaatactatattagtttatgtagcctcaagtattcttagtttatttttgattccaaccaatattgccgtctattatatatcattctttgggatttatggaatagtaaaatatttttcagaaaaacttagaaatattccactggaattattttttaaattaatcgcttttaatgcatcacttctagtaatttattttatttttactaatcttttagtcgattttaacattgattatcctttatatatgatatggattgctgggcaaattgtacttttagtttatgattacgcattgactattatcataagtttctatttgaagcgaatacataataacatatagacaaattaagagtataagaaataaatcatatttatttcttatactcttaatacatatttatatatactttttaatatactcagtctaactaatatcatttcaattactttcatgattaattgatttccgctatttcataatcgcttggacttttttattactgctcatatatttctatattttataatcaaattatttagaaattctactgttcttataggtgcttttcctattgacgtttcccctgccaaaagaaatccagtagctccgatttttatgaaattatatatgctctctacctctgaaatcgatggcatttttccatttttcatgctattaaggatatgcgtagctataattatctccttatctttatctcctagaacttcttttattattctttcttcataaataggagtatcttctatagatgtttctggaatcaaatcacctctgcctataacaattccatctgcttcacctaaaatgctttttatattattaactccatttaatgtttctattttagcccaaattttaggcttaaattgatttgattttctgttatttagaaataatttaacatcatcaatatctttcttttcctcaacgaacgattggcatattatatctactttattgttaactccccaaactattgcgtccttatcattttcatttagtggcaactcttttctttcaagattctttatattgcaacccttccattttctaataactcctccccgaattgtagttgcctttattaatccatcaactttatctatgatatcgaaagtcatcgtattgtcctttattcctatttgtttataatctttttcattcaaaattttgttttttatatttaatgggataactttaattttatttttactattttttactacttcactatatttgtcttctccacaaaaataaattacttctccattataaactttgaaaatatattggaatttaccagatactcttaccttagttcctgaaagatctagcattacttggatatcactctttatatctttagccatttttaaaaattctaaaaattcttctgcgcttccgtgtataaagttaaatcgtaaagcatttactccactctctattatccctttaagtactgctctatcttttacattagggcctaccgttcctattatatacataaactaatctcccaaattatcactactttttattcatattatagaatcttcgtaattatcacttattggctaactgaaaagttctaaaaaataactaaaagaataaatttaatagtatataacgtatttctaggaggtatacttttgaaaaaattaacttttgctttcacaattttatttctctgtttcaccttgagcagctgtgctcttcaaagtcctaaatacataaacttttcagtaaaaccaagtaatcattattatattgatgaaattaaagctaaaattttaaataatcaaaacttcacgctttatgtatttgatactaatctatataaggaaatagaagttccaagtgaagaaaattcaataattgaagattttgtttcagctctaacaactgttaattattctgacgaatcagttgatgcaaaagaacctttcagaataaaaatactttttgaagataatagccagtatctatttaggatttttaatgattcaactatatcagtttcaccttgggatgggaattataaggaagatattatatcaattaaagatttaccgctaagatacaatccattcgatttttgtaatcatatagctaataaacctttatcaaaatagatatttttataaaaagatcatggcacaattgttttaatttatatacacataagttggaaaatgtgaatattaacttatgttataaatatccgccactaagttttattttagtatacttgtataagtatcttatgatatgattatattattaaaatttgcataacatatttttatattattccaagttaatctacaataaattagataattttattactataaaccttaaattaaattggaggttaaattatatgcttaaagtggactttcacgttcatacatcttcttcagatggaacattatcccctaaggaagtggttaaaagggcccatgataacaatgttaagtacttagctataactgatcacgataccttaagtggtttagataaagctattgaagaaagcttaaaatatgatatcacgctaattcctggaattgaattatcaactcaacacaataatgaaagtgtacatcttttgggattctttagagataataactttaaaaatgatgatcttattagagaactaactaatattaaggatcataggataatgagagctaaacttatggttgataagcttaaagatgaatttaacatagaagttagttttgaaaaaattctaaaagaagctaatgatactattgcaaggcctcatattgctagagaaatagtcaattgcggatatccttataacctagaggaagttttcaataaatttattgggaaaggttgtaaagcatatgtcccaaccttaaaactttctactagcgacggattgaaattactaaaaagatataatgctcttgtatttttagctcaccctaaattaataaatgattctaatattgatgaattattgctaatgaattttgatggaattgaatcaatttattttcaaaatacacaagatgaaacttccagattcctctctttagcagatgaacacaatttgttagtttcttgtggttccgattttcacggtgatttagaatcagatgatcgtcatggggacattggctgtatgcaatttcctagtaactatctatcgaaatttctatccgctttagatccaccactattataatattaggtgattaaattaactgtcaataaaaaaagatattatcagtccttagacttgataatatcttttttcttaatttattgagattaagcctctattaaaaaagctttatatccattcactgtttcaaatatatcaactttacttgcaacttcccaaggtgcatgcatattgtgaagtgcaactccacaatctattacttccatattgtattgagctaatatatatgcaattgttccaccgccaccagcatcaacttttccaagctctgcagtttgaattgaaacattatgcttttccattatatttctaagctctgccatatactcagcactagcatcattagaacctgattttcctctagctccagtatatttgttaaataccattccttttccaaagaatgcagaattcttcttttccattactgatgggtaattagggtcaaaagctgcactaacatcggatgatagcatctttgaattagtaagacatcttcttaatttaagatcagaatatccctcaattctatcaatgatttctgcaactatattttcaaaaaatcttgagtgcattccagttgctccgatactacctacttcttctttgtcaaccaatagacagcagcaagttttatcaggctcttttatttcaaacatagccattagtgaagtatatgaacatactctatcatcatgcccataagccataaccatacttctatctaaaccataatctctagcctttccagctggtacaatctcaatttcagcagataaaaagtcttcttcttcaaaatcatatttttcttttaataactttaatatatttcccttaacagcatcttttttgcttccctttaaaggcatacttccaactaatacattaagatcttcaccttctactactttgtcagcttttttgcccatttgatctcctgctaagtgaattaaaagatcagatactccaacaacaggatcattatcatcttcacctatgcaaatatctattacagtaccatctttctttgctactactccgtgtaatgctagtggcaatgtaacccattggtattttttaattccaccgtaataatgcgtatcaagtaatgctaactcactatcttcataaagtggattttgctttaaatctaatcttggtgaatcaatgtgagctcctaatatctttagccccttttctatagattcacttcctacaataaacaacgcaacagcttttcctttgttatttgcaaaaaccttgtcgcctggttttaattgtttattattttttataatttcctctatatcttcatagccttcagctttagctaatctaagtacttccttaacacattctctttcagttttacatttagacataaaattcttatatccttcacaaaactcgaatatgctttgaacttctttctcatcatatttattccatgcatttttgcttaaatcttttttttcattttccatagtcaatcctccttttgatgataaatatatatctcatattctaagcatttcaaatcatttacttagacttgagttatgtaaaaatagttacatactatattaatcattaagctcattcattctattttctattacatcaactggtgtaattttagacattaatgcgtgtctataatttactgctgctgcttctataataaccgcgatatttctacctggtctaataggaaccgttaatttcttcacgttaattcctagtatattcatatattcattatctattcctagcctatcataatcattgtcatctttccaatgttcaaaatgcataactagccttatctctttctcttgaactactgaacttaatccatatagtgttgtaacatcaattatgccaaggcctctgacctctaacattccaacggttattttaggtgatcttcctattagctgtccatctatgtcctttatatcaactgcatcatctgtgacaagtctatgtcccctttttatcaactctaatgcagtttcactctttcctattccactctctccagtaatcaatattcctataccagatacatctaccaaaactccatgcaatcttgtttctggtgcaagcttatcagctagatatattgtagttttgcttataaattgtgtagtaactaaattacttctaacaaaccatatattgtgctttttcgcttcctttataaactctggatgtggctccaatcctctagttatgattaagcaatttatgtcaaagctaaaatattttttaactctttttttccttaattcaatttgcatataatctaagaagctccattctgctttacctataacctggattctctctggagcaaaataattataaaagcctgcaagctgtagtcccggtctatttatatcatttactgaaatttcaacatcttcttttccttctacaagcacttctaagtttaaatcatcaattaactttttaactaaaacacccaattatcatcatccctttttcttattgttaagttctataccttctaattgcgctctaaaatttttcttaacattatctatatatctttttcttaatctactttgcaaatccttctcctcattacttaattctctttcttgactagtcttatataatgaattgattttttctataacttcttctattttagccttttcaatgtccatcatattttcatcctttctatccgtatatcaataattttaccatttaaaataatataatcaacccgaattttttcgacaccatttattcttcttcgtaatcgtttgtcgaacactttgtctgtaaaatatatacaattatgttctattcaggtatgaatctactagaaaaacaaattattaaccgttttattaaacatttctgcaaattattgtcattaattgtattatgaaatatttttacaaattttcttttcttgtttataataatcatataacaaaaaccaagtctgataaaaagaggtgttagtatgaaaacttgggtaatttttaaactaaaatgtaatattgtacttaggaaaaacctacttaacttattattattgtttttttcaccaagtaaaacatttatagttgatttatctcaaaatttggacaagtacattgtcttatatcaaaaagaattgatttcaatatattataagcaacataactctaaatctgtaaaaaacatagctgcttaaaatatagcaataaataaaatataaaaatagctactttataagaactagaatatttaattataactttagttttatgttaatataactgaataccaaactagatataggtttggtattttctttttagtttatattttattgtacataaaaaaacacctctaatagaggtgttgaattcaatcatagctcccaacatgccgttcacctatatattcaagtcctgcgcctcgcaggtgggttaaactcaattcattcctgtcttctactgacacaatactgtgcttttaatgaagcctgacatttatgaatatattgtaaatcccgataatgtaatgtaggttgaatatcataagctttacgcacatctcaggaaatctatgatttaattataacataaggaaatatattttcaatagtattttaataccagttttactcatagtaatcgtttaaaatatcttccatttctatatctgttaactcttcagaaaatgctgctataaacttgaaatatccactatttccattttccattccgaattctttatatttagattctagttcaaactcatctgatatttcttcaattattgattctacattatctacggcaatatctcttaagtaaggaatgtaatattcgttataccattcatcactttctggttcaaaatcactttcttcagttgagtatgcttttgcagcgcttaattcttctttgtcaaagtcataataaaattttattatcacataattgcttttgtgttttatttcttcaacatctgctaaatcattgtcttccaaaaaatcaattatttctgaactcttcattaaatttcactcctatttaatacaataatttcttatattctttctttatttcctcaaattccttatcatcttccacaaggtttaattcttcattgccttcttcattaatatctattctaaatgcaaacatatcatcacacttttcatctactggtgatagtaacaaatatccttgttcttctaaatatatctttgcaatagcttcaaaatcaactttatttccattttcatctttaaacgacattatttctttttcttccaaaatgttcacctcattgtattctaatttgaaattgtttttcttaagattcttagtcaaataacatttaacatacttctcaattttacaactttaaatttattctatccttattatatgatatttagtatttttgtctatatcttttttattattttctataactttccatataattttaaaaaacaaagctgaatgcatgtaaatataatgcactcagctttaaatatgaacggctctattatattctataaattataagtactaattatccttatctctgtaaagctctttgagtcttgaattctccaaaaacattataaatgtttttctttcttgcttttgccatagctttaactattgcatatgctattatgctatctgctgaatgatgcaatattgcaccaacaactgtaatgatcaatgcaggataaacggcaactgaaaatcctataaatggtattgtaactaaagcctctaagattccatggattggagctgttattgctattgccttaacatagcttttatttttcataattatcattgctccaacatatcctacaactatatgagttgctgcccttgccactactggcgctggtgttccagctattaaaaatccaattgtagagcctattccaactacagctgccacaaaaggcgatatcaacattgataacatcataggtacatgagccgctaatgttgcagtaaagtatggtggaataactattcttaaaaatccaaactgaataggaattattattgctaatgctgtaagtaatccggcatacaccatttgttttattttattattcattatattttctcctcctcttgcatcacatgtatatacactagtatatagcatgtctaattataagtaaatgcatttgacaaaatatatttgtatttatatttcaaacttaagcttatttatgtagcactatcataatattgaatttatttcatttaactcttataattgtaattatgttaaatttaatatttagtaatctttactcatattatctttaaaattttttaatttatacaaggagatttacgatggaaaatatatatattctcggaactggttccgcaatggttacaaaatgctataatacatgttttactttatctaacgaagacgagcacttccttattgatgcaggtggtggtaatacaatcctatcaaatctagaaaagttaaatatatcaattaataaaatacataatatgtttatatctcataatcataatgatcatatactaggaagcgtttgggttatccgtgctgtagcacaaagcatactaaatgataaatactctggaaatttaaatatctattgccacaaaacttcaatagatgctataaaatcaatttcttcatttgtgcttcaaaaaaaatttttaaaattatttgatgatagaatattatttaatggaattgaggataactatacagcaactatattaaatagaaaaactactttcttcgatataaaaagcacaaaagatctccaacatggattcacaacaacattaaataacggtaagtctctaacatttttaggtgacgaaccttatagagaaactgtgaagaaatattgtgctaatgtagattatttattccatgaagcattttgcctttactctcaaaaagaaatattcaaaccatatgaaaaacaccatgctaccgcaaaagacgcttgcaaaaatgcacaggatttaaatgttaagaatgttattttatatcatacagaagataaaaatctaaagaatagaaaagaattgtacataaatgaaggtaaagaggagttcagcggaaagatatacatgcctgatgatttagatataatagaattataatattttataatttagctttagtataaattcttgtaatttaaaaggttgtcctatgcatttttaatgcataggataaccctttaaatattagtttcttaatttattatttactatgaaagtactcttcttgcaatttctactgattcctttgcatctttggcatagaagtctgcacctattctttctgctgtatcttttgtaagtactgctccaccaacaaatatctttccattgtacccatcttcccttagcgcttttatcgtttcctccatgcttttaagtgtcgttgtcataagcgcacttaatccaattaaagatgcattatgtttttttgcttcctctacaacagtctttataggtacatccttccctaaatctatcatttcatagccatagttttctaagataacttttactatatttttacctatatcatgaatatctccttttactgtagctataattatcttaccctttgatatagtttgagaattagttctagatatttcttccttcaaaatggtaaatgaattttttaccgtttcagctgcttgaattagctgcggtaaaaaaagttcccctttttcatatttttctccaaccatatctaatgctggaattaaatgctcattaactatttcaagctccttcttttcttttaataattcaacagtggcttgcttcgcctcttcttttagtcctttaacgacaatatactttaaatcatgaactgtatttatatttgaattaatctttgctgctccattacctttaatagtgacttctcttgataattctacatttgcataattattaatataactttcagcgcctttatcataattatataaaacattgtaagaatcaataactctagtcattccattcacattaggattaattattggtaaatctagcccattggcaagagctagagccaagaaagtctcattaattaattctctattaggaaggccaaacgatatatttgaaactccaagtactgttttaactcctaatttctctttaaccattcttacagcttttaaagtttcttgaacttctttctgctgagctgacacagttaaaactaaacaatctataaatacatcttcttttcttattccgtattccgctgctttacttattattttttctgcaatctcaaatctttcttctgcttttgctggaatacctctttcatctaatgttaaacctactacacttgcgccgtatttttttactataggaagtattctatctaaaacttcatcttctccatttacagaattcaatataggttttccattataatatctgagccctgtctctattgctttatgatcagaagaatctatttgaagtggtgtatccatgatgccttgaatctctctaattactttatgcatcatatctgcctcatcaatttcaggtaatcctacattaacatctagaatgtgagctccaacttctatttgagaaactgcttgatttaatatataatctaaatctccattttttaaagcttccttaaatatctttttgcctgtagggttaattcgttcacctatgattctaacaccatctatccttactacttttgacggtgtacaaactgcggaataatattctttttccatggacacaagtttcttatttctcgttattttatacaattcctcgatatattctggacttgttccacaacatccacctatcactcttacccctaggtcaattaatccacataatgtatctgcaaattcttctttagtaacatcatattttgtttcattacctattgatagtgttggaagtcctgcattaggctgaaccattactggaatatgtgataagctgcatatttcttcaacaattggttttagctgctttggccccaaagagcaattaacgccaagtgcatctactcctaatccttctaatacaagtaccatggcttctggagtacatccggtgaatgttctcaaattttcttcaaatgtcattgtacaaaatattggcaaacttgaattttcctttgctgcaagcactgcggccttaagctcgtataaatctgtcattgtttcaattaaaattatatcaacaccagatttaaccccttgaattatttgtcgtttaaaaatttcatacgctctgtcaaaacttagagttcccatagactctaaaagttcccctataggacctacatccagtgctatatatgtttcactatttcctttagcttttttggcgatattaactgccgcatctattgcttcttcaaccactaaattacaaagttttagtttaagctcattagcaccaaaagtattagtagttattacattagcaccgctagatatatattctctatggatttcttctattatatatggctcttttagatttaagatttcaggattttctcctaatttcagccctttcttttgaagcattgttcccatagctccatcaaatattaatatgttatttcttatatattccctaatccccacagatttctccctctcttctaaaactgcaatttttgtagttagtacattttttgcagctctttattttcttttcacttcccctatttattatccctattattgctgtaacagatttcctaggaaatagtaaattattttctgatacagttagtccaatttttttctgggcatctaatgcccttaaaaagctactttgaacatctaacggcaaatctccataacctggactatacctaaaagttatatccttattattcaatatagctttttccttaacaatcctttctacataatcacatacttcctctactgccgttgtagcacaagcatctaatataagtgcttttgttaaatttattttttcatataatctcgtttttctttccacatcatttcccaaagttactgccattaatacgcacttttttgaatctttaagatgctcttttatatcttttccatataaaattagttttgtattaacaacctctatagcctcatcaagctgtattatatctttatattcatacataaatcttggggtaattatcttcttgatttcttctctacattcctcaataagatttacaatattttcatctatatcctgtcctttatatccaagatacctaagtacttcattcttgtttatctgtagtttcaaatctcccatatattgatcaccaccttattactaatctcaaagcattaccatgtcctataaattttcattattactcttcacaattatttatataatctttcctttgcggaatttattttaacaaaaaaagcctaaaggtattcctttaggcttaaatgcttttcaataccttatctaccagcttttacgctgcaggatttagcaccaagtaattctataaaatttaccggttgctgggtttcttcgggccagtccctccaccactcttgataagttcctatattttttaattatatattataatatcttgtttgtaaatgtttcatctttaactttaaatacttcacttaaaatataaaatgtctaaatatactaactttatcttttaattaacagcaatattatagaaatcgcactaaaagataaacttattaacattatgtaatttacgacttgtacagtagtaagacctcttttctctaatctaaaatgtatctggcttctatctgcttgatacactggtttcccttccgagaatcttttaataatgacaaataaattatcaaatataggtactgctaaagcaagtattggtataaatagacttaaaacagttgcctgtttaaatgccccctccaatgctgttatacttaaaataaatcctaaaaaattagctccagaatctcccataaaaacttttgccgggaatctattataatacaaaaatcccaaaattgttccaactaacattatagatactaatgcagaatcactttgttctaatataattgctgctaagaaaaatgttattgcagatatgagggataaccctcctgccaatccatccataccatcagaccagttaattacagttgtaactccaaatatccaagttattgtaaggataaattgtattgtagtgttcaactctacataactgcctgtaaaaggatttgtaaatccttgaaaaaaaacacctgccttaaacactaagattgcagataatagctgaataactaatcttggaaatatagcaaattcttttcctttagtcttataccagtcatctattaaaccaattattattatcattgttgctgcaacaaaaacagttaattgttgtagcagcttcatatcatcccttgggaatataaaatatgaaacaaaaaaaccaaaatacaatgctaaacctccacatagtggtgttggcactttatgttgttttcttttgctgggcttatccgtgaaatgtaatttgttagctagtttcataagaaatggcatggtaattaatgcagttataagtgaaattaccattgctaatacataatccatctttcctactccttagttaaatctacagtagtaaattatatccaagtattccatcttggtttacttcctatttgattatactattaaagatatcttatatcaattacaaaattattacggtataattaaaaactaagaacataatttttttccttttaaaatactacttctttttcacctttagttgtattccaatattcaaaactaacgcaatagctaataaaactaatgcaactaacattatattatgtaaaccaccgtacataatctgcttcataagtggtaataaatttttgggtaaatcacctgcgctttgggagtcactcaacttatttaatgcttcaatagtaacttctccatgagattcagccacacctttgtttaaagcgttatttaaaattactccatatattgatgacataaatgtttgacttaaaatacgtaaaagatatgcaaatgatgtcgcaattggaatatctcgtttttcggcatcctgttgtacgcttatttgtaatatattgaaacttaaccccaaaccaaatccctcaaatgctcctgctattaatataatccataatggtatagatattccagctaatgccataattccaaaagaaattataaacgctaatgttcctagagcaactgtacgatacttacccaatcctggctgcatagctggtccaactactgagcccagaaaattagtaatagaccctggaatctgagtcacccctccaattaaagcacttactcctaataatccttgcgcccacattggtatgtatatattaaaggcaacaaatgcgccccataaaagagaaaataatatgaaatcaactactaatggtccatttttaaaaagtctattaggtattataggatccgctgccttttcttcaactttaaatagtactatcaataaaataagacttataataatcaaactactaaccaagcttaatgaagctgtctctatcatttgaatacctgttaaaagagttaccaagctaactatcataattacagcacctaagtaatcaattttttctaccgtagaaatcttttggggctctttaaagaaaatttgaacacttagtattgaaattaatgcgattggaacattgatatagaatacccaatgccaactaaaagtatcaactatccagccgcctattaaaggccctataattgctgctgcactaaagcttgctgtcgcatatccaattaccttagccctctttcttaagtttgtatacaaatctgcataaatgataaatgggatagtgttcattccacctgcccctattcccataatggttcttgcaataagaaaaaaaattatattacttgataatgcctgaaatattgaaccaattgcaaataataatgtggctatttgatatgttcttcggttcccaatacgctctcctaatttgcttcaaagaggagttactactgccattcctaataaaaaaacagctactatccaccccatgtattgaattccatgtaaatcacttatgattgctggtaatgctgtgttgacaattgtcccatctaaaccagctattgcatttgacagcaataacgcaagtgttacaatcaaatttcctttcttactcatcctctaaaaattcctccttagctaaacttattatattcagtaattcataaaaaaatgctttattatgaattggctaaatattgtagaatacatttctatctttttgtcatatataacttatcacttgaagttaactccaagtcaagatgttttttttcagagattcaataattataaatataaacaaaaaactctttacactttttaattacgattcaagtgtaaagatgattgattgtcatattattatatcctggccattcatttaattcaaaatcagattttcttaagataacaatgaatttaaatttaaatattaacatatgtttatatttaaatattatcaaagatatatattttcaaacatatatagttaaatatttatatactttaatatttaactattaaaatatataaatatttataggaaacatcaggggttggacccatttcaataatttggatacattttctaggttaaatcattctcgttattagatcttttgtcttgaccatttgtttataaagtttatagtttcattccaacaatttatatttgcctttgcaaaaccatctatatcgtctggatatttatttgaaggatatatagattgatacggtacagttagcatatgtccagatttttcgtatgtgatatgtttatattcatgtttaaaatgagcttttctaagcaattccacgattatttcacagtgagttttagaaggccaaattttatcttttaaagatgaagccataagaattggtccgtttattttttctactggaatcatagcttcataaacatttccatcctcaatgagcttcctgtacatccaagccatagcttctttatttcctatcatcatttttacaagtgtctgaatcaaaatagagaaactaaattttatatatggtatttctctccttttgtacatccacgatgaatgtttagaaggaaacttattagcttttaacccctcataaacataacagcttggcgtattagcaatgacgcaacttatgtctttaaaaatagatgcggcaagtaaaaccatttctccacctttagatctaccataaattccaatcttatttttggccactgtagattgtttttttaaccaatctatcgcattttcaacacattcaagctccacacagcttaaacttttattagttccttcaagaccaaaataacatacagctagtgctgaatatccgtgcattgcaaatattccagcaattgcctgtgccttttcaagtctaccatcgcttccactcaaaacaataatcgctggcttgggtatattttcctttgaagtaaaatatcttcctaaaagtttatcttctactacatctacacttgaaataaattcatcacaataaattcttttatgtgtttttgacgcaataactcttccattacgctctacctgaaaggtcattgtataatctctgttctctccaatatcacttaatcttataggaattttagttttatagttttcttttacagtcatagaatagaaaagccccattttatctgcctctttatatgttccctcaacaggcttagcattttctaaatctatagttccactttcatccgccacaaaaaccgcataagattcccactctgctttattccctacatcaaatatagaagtatttatgcaataataatcattgcttaaggcgcgaattaatactctttcattttttaaaagtccacttatttttattgttacaggttcatcaacttttgatgtttcaggcataatacttatcgtacaattattctccattaacctctcccccaaatattaactctttcttcatagccagtccaattgctgccatcatagtttgctatttttttcaacaaatcccacaaattttctagttccttttcctcaaggtcattaaacatatcttttaaaaatttatttcctttttcgtaatactctcccataatttctctacattctttagttatttttatatttatagcacgtttatctttttcatttttctccaaaagcacatagttctttttttgtaagctatcaataatgtgctttacgttctgttttgtacatcccatcttatctgctattttgctataagatgcattgtcttctggtaaatgtgaaattgtcaaaagcaccatccattgacgtacagttattctttcatccatcttatccccttgtacttgaatcttgtttgataaatagaaaattgttgaaaaaatttgctgtatataatattcgttcacttttttaatctccccaatataattttagttaacatgttgtctatttaactatactcctcttttctaaaaataaaaatatattttattcgtaaatgcaaaaattaaagcttaataatactaattatcaagctttttacaaaagtttattatctaatcatataaaagagtaacactcatattattcctatgcatgttactctttgctatattcaaataatccttttatcttatttaacctacatagatataaataagtctcaatattttcttatattacttacatacatctaatatattcagccctatcattaaataaataataagtatcctcttctaatatttctccagtttcaatatatttctctatgttaattttaaacttttctaaatgatattctttaaatgaatattgttctttaagtttttcttttatactcttttcttcctctttctccatgtcacttctcaaaaattctggaagaccacgtttcttattaaatattaagtaattaaatctaataatctcttttaaatatttgttactttcttgtaatacactttcactataatctaaaaatactttatagtattcagcatttcctatgtttttgctaaaataacctttatcttcaaagaacattcctagactataataaaaatcaaatggtaactcaaattttctctcaaaatatctaattatatgattaaacttttgagaattataatatttatctaccatctcttctaccttttttagttttaataactcttcgtatgagatcttatccgtttttaatatctcatatggcggatatggtgagtattccattccatatttgtctgcatcttctctcatagaagatccctttaataactttaaaaaaccaagttgtatttcttctggttttatttcatacatatcattaaaagactttttgaaagattcataatcttctccaggaagtcctgctattagatctaaatgctgatctatatttcttaatgcttcaatttctaaaactttttcttttatatcactgaaattaacaaatctatttatatttcttaaaacttcgtcattagtagtttgaacgccaacttcaaatctaaatcttccttttggagcttttgataaaagttctatttcctgtggctttaatatgtctgctgatatctcaaaatgaaattgagtattcgtatcttgatttattaagaaatcccatattgccatagcaaatttagaattacagttaaatgtacggtcaacaaatttaactaatctaacttccttatttataaaatacattaaatcctttaatactctatcaatatctaaaaatctaactccatgacttgtagatgaaagacagtatttacagttaaaaggacaccctcgtgaagcctcataatatacaattttattagtcaaatcttcattttcttcatatggaaaaaatatttcatccattgacataagtggacgcttttcattggaataaactatatcattaactttataatgaagccctctgacatcttccagtttaattttacctaatttatatagaataaaatctctataagttttttctccttcaccttcaataacatattctcctacattatttttcaagaaacttcttgagtcaaatgaaacttctggtccaccatataaaatttctatattagaatccactctctttatcaaattagccactcttgagataagttcaacattccaaatatatgttgaaaatgctacaatatctggtttttctttaattatttcttcaagtattctaccttccctatcgtttatagtgaattcttttattttgctttcataatccatatctcttgtaaaactttttaagtatctaactgctaaattactatgaatgaatttagagtcaatcgctgtaattaataccttcataattaatattctcctctacttcagctttagtcttcagtttctttcctcttatgaagaaaacatcttcccaagctttagtttcttctatttcaaaatatttttcaagaattttttttatttcttcaatattcgaatttaaaagtatatttaaattcttaaatgtaaactccttaactttttcattttgtaatattacttttatcttattattaaatatttttcccctttctttattaatatcccaaataaatatttcaccagattcttttatatatgaacttatttctcttattaatctttctttttctaaactagtccatattttatttaactcaaagaaaaatgtacatgcatcatattttctatcttttagctctactttactatcgctagatacatagtctaatgatatctcatcctttgcttcctttgatatattatatattataccaagatttttttctcctacatctaatatatctccttgaaatataatattctctagattaattaccaatgtttttcccataacatctcctccattatcactaataccttttattatattttagcatttattccataaatttgaatataaattatttttgtttattagattacttaaataataaaactgtcttaagttgataaaacatcacttaagacagttcaattttctatttattattttttatatccgcgcttagaataaaatttaaatattattaagcaggttagtataaataaaaatacaaatataaatatccaaattggttttggaagattaaatttcaatccaaaatcattagattgtaatttatatatacaacccattccactatctaatatataaatatctccatctgaatatttaattccctgtattttactcttatcttttaactttaataagtcatatacaacactttctgaatttattccagctataaggttctctttactattaaaatatacattcgaattcttttctaatatttttccatctttatctatggctaagtatcttatcgcactaacttctggatattgatatataggtgcttgaactattttattaggaggattagcaataagaggtgatactaatttttcccctttaaaccttggtgaacttataggatctccaccactaaaatcaggccaaccataccattttcctttatctagtttatacaaataatcaaaatctctattaataggcctatcccctatattctccattccaccaacaattccaattagatttccttcactatctagatcccatccctttacatttcttattcctgaagcatataatgatgtcttatcgttatttagattcacttcaattatacaagagtttgctatactctgggcttttattttttgccctccttcactggaatttccatatggcataaaagctcctgttttcttttcaccataattgaatccatttaatgttacatctatagagcttttatcataaggtattttgttctgtgaatactcgctatcattagatgctattcctgaattcgtagcacttcctatcgctaaaagtaattttgaatcctttataattaaattcctatctaaatatttcccttcactaggtatattccctaaaatgctttttaaactttttgatgctaaatcatattcatataaatctgttttagaaataaaatacaatttattattataataaagcaagttttctatttctaaggatttatcctccaataaagtttcttccctaccatctattttaataactttaatataattattgtaagctatataggtattttggttttcatctttctcaaaagctacagaatctttacaatttttataaacaacactccaactaacattattttttaatgtattcatcctatattcattagataatttaaatacagcaaaagctagtacaactattataattgatataatcaaaaactttagaaatcttttcactacacttccctcctttacctctataattaaattctaaaaatacttcctatgtacaaatcataatatccatattaaatttatattgtaaatttaataaaataagacctctctttaaaaatcttatttgttttacatattaaaataagagcaataactcacataaaatatatggattattactcctactaatttttatattctttttaactatgtaaagatgtttatatatgttaatcaatattccataaattaaagattttcagctaattctcctaatttcttagctgttgagtttaactccgctatagatgctactatttcttctaatgcagctgattggccttgtgagacatcattagatttaattaaaccatcatttatgctatttattgatgttgatatatgttttataactgaatttatctgttttattgactcatttgaagaatttgatagtttcctaatttcttgggcaacaacattaaatcctcttcctgcatcgccagctctagccgcttcaattgcagcatttaaccctaataaatttgtctgtgatgaaattccttgaataaatgttactatattatctgtatctttggttttttcattagtttctttagtttccaataataattcttcattcattgtcgctaactcttgtacatcttttgcaacttcgtttatagttattgatatttgtgataaagtttccgttaaatttttagttatactcatcacagcattttttctttctaaactttttcctacgacaaaaacacctacaactttaccctcttctttaattggaattgcgaatgatttaaaagcagttccatatacatgctctggcacaacttttatcatagtattcccagttctcaacacttcaattatagctcctccttctggaattatatctcccttatttgtgtttaattccaatttagggctgtactttgtatataaatattgcttagtatcagttaatgccatagatacatcttcatcaaaaaggacttctagagatggtaatgcattatagaaaaaatttatcatatcgttatctgaaattttgttcattatgtttcccccacttagtacaatcgttttttataatttagccacagataattatatctttttatcacttctttgtaaatatttgttttattttatatcattatgcctttatatctaaaattttcaaattcatatttagttatcattttgaatattatttaaagtaatttaaaggagtgaatgaactttgggcaaagataattttttaaaaaattcttttttattagtgtcctctaacgtaactacgggtatactcggttttatattttccatatatctttctaaagtcctaggtgccgaaggaatgggactctataatttagttatgcctatttacaatttatttatatgtcttatgactgcagggatagttgcttctatatctaaaataactgctgtctatgcacaaaaaggagaacataaaaatatagaaaaaacagttagagttgtttcattatttaatatatcttgggcactcttggtaggtatactagtatttatatgtgccccactaattgggaaatatggtgtaaatgatgttcgtactataaatgcaataaaagttatctgtccagctatggtatgtatagcaatttcaaatatacttaaaggatacttttacggaacttctaagattacagtgccagctataattgatatttttgaaaaggccatgagaattctaactgtaagcatgcttatattttttactaaagctaatactttagaaggtatggtaaccttagctacagttgcattatgcattggtgaatttcaaagcttatttttcctctatatttactacaaatactcaattagaaaaatgcccatttctcacgaaaagactgaaagcagatttcagcttctctttgatgtggtaattatagcaattccactttgtgcaaatggctttttaactaatattctagggactcttgcaacactaattgttcctcggcgtttactagtagctggttttacttatactgaagctttaagtatgataggtaaatatactgggatggctcttagcataataacaataccgttaattgtagtctcaacaattaatacattattaattccagatctttctcaaagcctagttttaggaaaacaatatgaagcctctgttagaataagaaaggtccttaaagttgctttcttgcttggtatagcgacaacaataatttgtaatgttattcctcatagccttggtgagatgttttatggacgaaacgatttaggtctgtatattagatttgcttcacttactgcaccaatattctttcctgcagtaactatgtttggaatattaaacggacttaataggcaaggaataattttaagaaactcattaatagaagccgtaattgaattgatatgtttatacatatttactgctattcatgcaattaatatatttggttatagtttaactatgcttgtagcgtgtacaattggctttattctcaatatgtacgaggttaacaaacatattgaacttaatttaaacaagtttaatatagtaatatatatattgcttggatttttaactttcttaattataaacatattttcaaaacatatgttcacgaattctatagtcataaataactttattataatgggtcttgttttcttaatttttacgtaccttggtacctttggagaaaatgaatattaatatctatgtaacccagttatttatatagtttagcttaataaggctttgttcttgtttaaagcaaattgggatttaactataaaatttttgctagtgtacattatataatcctatgaagccgtctggccatagtagatattataaatacactgactaaatgtttatagttaaatcccattctttacttttgaagtttttttctcaaaaatctaggtaaatagttgaatattctaggtgatatactgtctatatcattcttttttattccacctattaacatcattgaatataaataaacaaatccagctatagaaataattaaaatcgttgtgattgcttttaataaagtatttccattagctaatgttagtataactgatgttggtgtcttgagcataaatattatacctgccattattgcagaagcaaaaagaggtttaactgcgcttctaaaaagaggaatcttaactctaagtgccttttttaatgctcttttatttaagatcattggtattgcaaaccataaaaagtttcctgctactactcctaaaatattaatttctggtatccctactaatatgtaattagctattattttagctactatccctatactaaatgttccaagcacatagtaaagcttattcatactttgaagtattattgtttgtatttgcacaacagccatgagaaccaaaactactgatcccattaccattaattcaaacccttgatcagttccataaagcaattcaaaaacctcttgtcctaagcaagaaaggcctacagctgctggtattgttattattaatgttattctaaaagcaaaagaagtttttcttcttatttccttcttatcttttaatgccatagctgctgaaacagccggtaatacggttgtcccaagggcagtaactattatcaatggaacagataataaggtcttatatctcccaagaaccccataaagcacgtgggattgctgtaaattaaatcctgcaaatgctaatctactatttacgttcaccatatctactaagctaccaaaattctgaagccctgaacttaatgttattggtaagccgtatttaattaactttcttatgatatgcttagttcttactcttttaacattttgttgagcatacatagaatcttcttcaaaattcttctttccataaacatataccatatatagacatgcaacgaaagcacctacggaagtacctatagttccccctgcactaccatattcaacacttatatgtactaggaaatatgcacaagctaaactaattgcgatatttattacttgttctaatacttgtgataccgcaattgcagtcatactatttcttccttgaaaatatcctctatacgatgataaaagcgatgtaacaaatatacttggcgcaagcatcaaaattccataagaagctgctgggtttccaatcatatttccaataggaaaagcaaacagcattaaaaatatagttaataccgcaccaactaaagataaaagagttcttgatattttaagagctcttacagcatcgtttggttttcctaatgctgtaagctctgcaaccactttagcaatagctggttgagtccctaagttggtaactgcatatacaaataaaaacacttcataacaattctgatatattccatatccatctaacccaattattctttgaagcagtggtatataaaaaactgatataactttggttaaaagccctgctattgaaagaattaaaaagcctctgctactattggctgattgatcttccataattacctcctatctaagtgagaacttaaatacatcttgctttattttttttaatattggaggtaatgccgatgctatagtcttgttttttagatattctaactttccattaatttttctaaaattcaacttataagcatataaatactgaaaatttagaccatatttactttcaaaaaatgaatttaatttcttatctccatatttattatctccaattatagggtttcctaaatgtgctaaatgtgctctaatttgatgacttcttcctgtaattaagtgtatttctaaaagtgaatatgcaccattgctttccactatacttatttccattgatattttttttgagttcttaacctcagtgtcgtatatcttagatgtgttagtttcaggattctttaatatgtacgcctcataaagtccagctcttatttttccttttgctaaagcgtaataatattttcttatttcgtcttctctaatagcttcatttatggcttttaaaccttcgaaagtctttccgaacatgaccattcctgaagtatttctatctaatctattgcatgctgctggtgtaaatgttatttcgttttctggaatataatcacccttatcatttaaataagaaagaacataatctgtaagagtaggttcttcactattattgctatctgaatgaaccaatacatctggccatttttcaattactactacattttcatcttcatatgcaatcttgattcttttaggatcaactttaataaacttttcttttttatcttctttgttactttgtatgtattttatttctactacatcgccttcttgtaagaagtatttctcattttgttttgtcccattaacccttatatctttttttcttaaagctttaaaaattgcgcttaatggcacatcttttaataattttcttaaaaatttatctaatctctgacctgcctcgtttggacctatttctattttcaaatataatcactcctaaatttattacccttagcattatctagttttttaaacatattgtcaatttattttacataaaatcgcaaaataatactattactttgttaaataattaaatgctgccaaagcttgaatagaaactccaattggaagacaatcctcatctatattaaacaaattactatgtgctggctcagtagtattcttttctttatttcctgaacctaaaaaataaaatgcacttggtctttcatttgcaaaataagcaaaactttcaactcccattttaggcgctttttgttctaaaacattttcttttcctaaaatttcatttgcgctatcacttattaaatctacaaactcatcatcattatataagcaaggataactttcttctattttcacttctgctttagctcttgacataactgcaatcccatttacaatttcatttaatctttttattgcaaatgctctatcttcttttgtcattgttctaatcatcccacttaaagtagcttctcctggaataatattctgagcagttcctgcatgtaatgtaccaacagttataacaatcggattaactggtgatatttctctgcttactattgtttgaagtgctactacaatgtgactggcaataacaataggatcaacagtagtatgaggtgatgctccatgaccgccttgacctgttatctttatactaaacggatttgaagctgcattaactacacctttttttatttttatagtgccacattttgtttcctcatcaacgtgaagcccaataacacaatcaactcttggattatctaaaactccctcgtttatcataggcgtagctccaccagtagtttcttcagcaggttcaaataataactttactgtaccggaaaacttatctttattatcgtttaataactttgctgctcccataagtattgttgtatgagcatcatgtccgcaagcgtgcattcttccatcaatttttgatttaaattcgcaagttttcatatccttaataggaagcgcatcaatatctcctcttaaggctatagttttattatttccttcttttgtaccttttataattccacatacgcctgttttggctacttgaatataaggaatattattagattctaaaaaatccttgattactttagatgtcctaacctcttcaaatccaagttctggatgttcatgtaaatcccttcttatttttataagttcatcttttataagattagcttcttttttaaaatctatcatttctctaatccctccatatttaataataattagatttttaagcatatttaaagaagacaatatgccaattgtacaaaataaattcgtatatggacttattttaattttgaatatgcctaaattcaagatattagctctaagaaataataaactttaattatcactccaaaaaacttctattatatctccatcttttatatttgctgtgtatggtgccttttccccgtttaaattcaagttaattattccttttggaactgttaagtcaaaatctatatattcaaatatatctactattagatattgaacttttcctttcaatactatattttctccattgatattaactgttatatttctaaactcttctctaccaattgctatttcgattttatctgaattaatattttcactatcttcattgcaaccttctatattttcgctttctatcacatctacataatcttccttatgatttaccttagcagcatcttcacttcctatatatgaatccattgctttaattacgatatgatcaccttctgaaatttcataattatcttccaagtattctccaccttttagtaatattacttcttcttttaatatatacttcttaaattcatcaactttacatggtaagaatactcttatttcatcaccattttttattatataatctaactcttctcttttctcattaacaagcgttacaggttctatattcataatattatcatctaaataaatagaaactgaatttatgtttcttatattttctgataatttaggtgatgcatcttttccattctgtgcgtattctagtattatattgtcatttgctttaacttctgtttcaagagttgcttcctctccatttattctgatctttgcattagttccatattcaccaaaaacaattcttttacatccattatagttaaacctgacacttttaccatttttacttataagtagcgatggatttattcctgcctgaagcaatacatccattatagtatgtttatgggagttaaataaactaattggatcattatttaaaataacatcaataaaatcatttcccatactacgtattgctgttaaagctattcctagaacagttacacctgatgatcccatatcattatctgaaacacactctatcactgcctgcctatctttaatagctattctttgaggtggtaattttaatttatcagcaatagcctctaaaattccgggtgtatgagctccacctcctactaaaaatacagcacttggagccttgcccccatttaattctaaaatctttttagatatttcttctccagtcttaataacaatagaatcaattagtttgtatacactttctgatgatattatattttccatacccagaacatcaatatattttatttcttcttctttcactatagatctttttatattttcagcagtattaaagtctactaaatattcttgaacaatagtttctgtgatctcatctccagccattggaaccattccatatgcagatatactttctttagaacttatggctatatccgaagttccagctcctatatctacaagcgcgatattaagcagtcttaaatttttaggtatagcagcttccatagcagctataggctctaaagtcaaatttacaacctttaaattaaccctattcattactgcataaagtgaatcaattacagacctaggtaaaaaagttgctataacttctgcacctatattttctcccttatgccctaataaattagatattaaaaatccatttaagtagaaatttctaactgaatatccaacacaatatagttttccttcagttgtagaagctatctgctcctctgccttttttacagcactcaattcaagacttcttatgatttctttattaacttcttcatcatcattaagctcaatatctgctcttacatcaatagttcttaaaaacctacctgccgccgcaatagatacttcatttagctgtatttcaagttcatcttcgagataattcttaactttttgaacaacagacgccactaaattaatatcgtgtatttgcccatccaccatggctctttcttcatgctctaaatatttctcgcatacaacttggaacttcttatcttttactattcctactgtacctataattgacctagttcctatatctaaggcaaaaattatatccttttgattaaatctttttaattccatataaacacaaccaacctttattgttttatttatatttttaactcctgcataaatatactataaattatatattataagccaattacatacaatgacttaaaatatttgttcacaattttgcattacttcaacttatttacttattaacttccctctgctaaaatggtagaaggtgtaattgccgtgattttaatacataaaaatgattgactatggaaataaatgtatacaaaattaaaatcattagtttttaagagggggataacatgcaaagtagacctaatatatctttattaaaaaataactacttagagacctatcatgctatacaagcatgtttgatgcaacataactttagccttttattaccaagaaatatagaaaaacaaatttttgatattgtacttacagctcaaaatcaaaaggttccaacaaaaaaattagaatgcaacaaagatctggataagttttgtaataagttaatttatgagtataattcttcagtgtctgctattcaacaagtacttgaaggcatatttactttttcaatactagtttttttctttactttactagatgttttatttgaaaagggagtattaatgagcaccttaattacttgtattctaatatctatagggtatttcatctcaaatactattttaagacataaggaaacatccagttctaagcttcgctccttattaatctttggaattgtgttaattccatttatgattatgtcttttctaaagactaaaattccttctttagctgtcacctttccatttcttgatagtttagtattaacattagtaactggtgttattagctttctttcatactccatactttcaaaaaagtatgatttgtttatatttataagacgtaaataatttaatattttagaatgtatatatactacaatttaattcctacattattatttaaattaagcacttggattattagaattttaaatgtaagtttattattgcaacatatataaaagctagaaagtacttaactttctagcttttgtgcttttattataataaatacaaatctcccataaaggagctaagcaatgttaaaagaaaataaatattaaaaggatgttaatattatatgagaacattaatcatttaattcgcaacatttattgttctaaataaagtgttaatgaaaagtctaaaatctcccccttaaataaataaggtgggagattttatctgaagagatgtttaaaattatatgggtataatatattatgcagaaactcatataataatactaactttatcgacttactaaatcattatttaagtatgatttctgcttatacataattaggattaaatatgttcacctatactaaatccctaatgactttttagttaaaaatccaatttctctactgaatttctgtaaactaactctgcattatctcccgctttctttcttagacctcttgccttgactactttcactaatccatacattactactgcaattacagctataggtaccaatgttctaattcctattccatttccactggcaaatcctaattttgagcaaacaacatacattgataccatcaagaataatactactccacaagcttcataacgatatttccatggcttaatatctactactttattgtcttttaacacatattccttttctcttggttttattttaccaataattagcataatcatacatgtgattacaaataagattcctaattgatgaaggaaatgcatttctggttttattattagttgaagtgttccataagttaatacaaaaaatattattgatatttttgctgctatagccggtaccttttttgttacatatcctataaaaactattgtgaatataggcacattgaagaacccatttactgtttgcaagtattggaataatccttgtggtgcatacattataaatggtgctatagtcattgaaattatagctaacacaagtccaaatatcttaccctttgatattatttccttatcagactttccttttccaaatacaggactatatacatttaatgcaaataaggttgacgcactatttaacactccattaaacacacttaatactgatccaaacatagctgctgcaaagaaaccaattaaaggttttggtaatacatcgtttactagtcttgaatataataagtctggattttcaacacctgctccatatatatgaaaagctactattcctggtactataactattaatggtgttaatacttttaaaagtcctgcaaaaattattcccttttgcccttctgctaaatttttagctgctaatgctctttgaatgattgcttgatcagttccccaataataaagattaactaaaagcattcctgtaaataaagttccaaaaggtataggatcttgtgatgttcctatagcattgaatttatctgaatgattaactaatatatttgataatcctgtcgaaaagcttccatgaccaaaatatattattccaaatataggtactattaatcctccaatagctaatcctataccatttaatgtgtctgatactgcaactgcttttaatccaccaagtatagcataaataaatcctattataccgataatccaaaccataatccaaatgctagctgtatagcttataccaaacatttcttgcacgttaaatatttgagccaatgcaatagcaccagaataaagagttattggaagtagattcgaaacataacctaataaaaataatattgaaactatctttttaacacctgaatcgaaacgttcttcaagaaaatcaggcacggttgtaaccccttgttttaaatatcttggaagtaaaaataaagctacaattacaagagtaataccagagccaacttcccagcccataacactcatattgcttgagtaagcttgagcactcatacctacaaaattagatgcacttaaatttgtaagtaataaagatgcccctatcacaccacctgtcaaactacgtccacctaagaaataagaatcttttgaattatttttttgcccctttagcttacgatacgtaattgttgctactaatacgatgcaaaataaaaatgaaataacggttaacatgcttttttcctcctttaaaattacgaacgtttacatctcacatagaattccacaatttattttaataagtactctaaatataaactgttcatatttccgtaaactacagtatgttattgttttctgtaatcgttaatcacattatattgaaatcgttccattataaaaatctcatttattaacttttcttataaaatattaacttaattaaaaataaattttatatagccctctttcatagttggttttaaaaaataataaacatttctttactccgatttctatacagcactcaattaaaaatattcatcatttttaatttaagatatattctacaccacatctttaatttataattatccagtacataaatttaaatccactattaagtacataccttcactagaattcctatactcttagtgctataatttcctatggtgatgatcaatgaaggtaaaaaaaatcacaaagataagaaatcgaataactatatatttttcaattataatacttggattaactttagctgttacgtcctctataagttctattttttctaaagaaataattaaacaatataataacgttgctactgagaaaataactgtaatttctaaaatccttaatgaaaatttagattctataagacatgattcttatatgattgaaaatgataaaaatatttatgattatatgtctaaagttaatagaaataactctgcaactccagaaactaatgcagaattttttaatactctttcagaatattgtaaatggagtaactatataatttctataattcctttgacaacagataaaaaaataatggatcctctttattcacaatatccttataatgaattaatttatggaaataaagaattggacaactttattgaaagtggatattcaaataaattttcttctcctaatacttttccatttaattatgagaatgccgactatgaaaaaagaacaactataacttatttttctaggtatttggataaagaaaactactcccttatcggctaccttatgatcaatataaagaaaaagaatttatttatgaacatagatgattactgccatggagtctttgatagcacttttattgttgataaaaatggtaatctgatttataaaataggaaatattgattatgacaatataatgcttgaaaaagttaataatgatactgtaaatgttaataacgtaaagtatatggaatttaatagtgttatagaagcatatccagaatggagagtcattggattaatatctttggactctttaaccagaaaccttgattctattcgatggttaatttattgtattggtatttttagtattgcagttgtactttttatcagccactttacttcaaagaaaattacagatcctatatatgatattacaaaagcaatgaataagtttgaaaatggagaatggccagacaaactagaagccaaaaccgaagacgaacttaagtatcttataattagttttaataaaatgatttacaatataaaaaatctaattgaacaaatctataaggaagaagaggaaaacaaaaagcttgaagttgaatccatgaaaacccaactggatttactgcaatcacaaataaatcctcattttatacataatacactaaatacaataaactatttggctataaaaaataatcaaaatgaaataagagaacttattcaatcatttaatggtctgctaagacaaagcatatcaacaagtaaaaagcttataacgttaaaagatgaacttacatgcactcaaaattatctgaagatacagaagtatagatatggagatatagttaaactagtatgtaatattcctgaagaattgaataactgtttagtgcccaaacttattcttcagccacttattgaaaattctctttatcatggaatagtacctaaaggttgtgctgggactataaaaatagatatattgccacaaaaagattttataaaaataaaagttatcgatgatggcgtaggaattagtaagagaaaatcaactcacaaaggctttaatggtataagcctagataacataagcgaaagactcagactatattttggaagcgaatatgacttaaaagtatatagcaaaacaggaattggaacttgtatagaattcaatattccatacatttactagagcacattcgggaaataacaagtcagtgtgccttaattctaaaaaaggaggcaaatagcatgtataaagtaatgattgtagacgatgaaatacctgcacgagaaattctcttgtgcatcataaattgggaagacactgattttagaatagtatatagcgcttcaaatggtaaagacgcactggacaaatatactgatataaaaccagatcttattattacagatatacaaatgcctattatagatggtttagatttaatagaagaagtacagaaaataaataaatctcaaaaatttttaatattaagctgctatgaggactttacgtatgcgcaaagagctatgaaaatgggcgtaacagactacttgataaaagatttaataacacctaatgatctatatggaatattagcaaaaactaaaactgatcttgataatataactataaaaaagagtgaaataaaaaaagaacataaacttttaaatttcctaaaggaaaataaggatattgcactaagaaagcttatatttaatgatataagtcaagacgattgttataaccttattgaaaaccttaaccttaatctaaacggaaaactttttgttcttttccttatccagatagataacttttttaaatatatagaagatgagaatttctatacaaatacccttaatgaaataataaaaaatgtttctgaaaccatcgaagaactcaatattggtgaatgtttttatagtgaaaatggagaattcacagctattgtacgcttgtcgccaaccattagtgaagcggatataataaatgagtgttattatttagcgcaggaaataagaaaaaggatttccctcatgcataatatcagcttaacaataagtgtgagctcaacatttaaaaagccatttaaaataaagaaatactttgatgaagcatttaaactttctaaaatgaaggtattcctaggcaatgatactataattttaaataatacctttgtaaaaaatttagatttagatactgatactttagcaaaaagaattaatgccattaatatagctattgaacaaaataatattgaaaacttaaaatcagagttaactcacttatatgataaagatatacgaggatttatgcagtttaattatctaaattatataaactcctctctcctagatttagtagtaagaacctgtaatagatattctatagcttatgaagatattttttcaacttcatacctacctatagaaatattatcaacaaaagaaaccgttgaagaaatgagcggatggtttattgagatctttactaaaataataaatattaattttaataactcttttaaaaataaatatagtaaaaaggttgctgattccatagattacataaacaaaaatctctttaatcaatctcttagtctaacagatatagcagaaaacattaatgtccataaagtttatttatgcagaatctttaaagaagaaacaggtgaaaatgttacgcagtatattttaaaagctagaattgaaaaatctaaagaaataattttatcaactaactataagctttatgaaatatcagacaaacttggatttaatagtcctcaacaatttagtattttatttaaaaaagttacaggtatcactccgaaccaattcagagactcttattttaaaaatctatagttgggtaatggcttataactactccaaatatacattttaaaaattttgaaaggaatttatatttacatgaataagaaaatacttttagttgtaataataattttatctagttttgctttctcttgtgatactacaacttctaaacagagctcaaaaaaatctgatttagttattgccgttatttacaaaactttagatgaagcttggtttcaggaagaaagtgaggctgctaaaaataaggctttagctatgggggctaaagatgtaattactatagatgctaaaatgaatcctgatgtgtatttatctgctttggataatttaattactcaaaaagtagatggtatattaatatgcgttcctgatcaaaaattaagtaaaatcactatagatagatgtaagaaatcaaatattgctgttatagcctgcgacgatccgcttactgatgatgaaggtaattatattgcaccatttgtcggaatagattctaatcaaattggaagggatatgactagtctcatggtagattatttagaaaagaataataaattaagtgatcctaattcttcaggacttctgcttatgtcaatggattctgtatctagctgcatacctagaactgaaggacagttagaaacatttaaagatagacttccaagctttccaagagaaaatatttttcaagccgaatataatggacaatcagaaaaaagtttttattctgccgcatcaactataacgtctaataaaaatataaagaattggtttgtcatgtctgcaaatgaagctggcaccattggtgcaataaaagcactggatcaatctggtcttgcagaaaatgctgttgctgtaggggtaggtggatatgtagcaaaggatgaatttcaaaaagaaaactctcctcttatagcgtctgcatacataagtgctacagaagttggagaaattgcagctcaggaacttatggagaaccttttgcttaataaaaatattcctgataaatatttggtaaaagataaagtgattacaaaggataattataaaagtcttgtgatcaaataatttaacaataaaataactccattcacataataatttctcaactgttacatgaatggagttccaccaacttaaatttaattattatctttttaatttaacattttgatatcaaattgttatcaaccaaaattttcaaggaaaaactcctaaaaagtccatcatcaaacttcaatttaatcttatctttgtcattttcatcaaatcctgcgatttctccaataccataagttctatgggctactttatttcctatctcgtatccataagtatcaacaggcatatcatttaattttccttctacaacaaacctcgaaacatccttaaattgacctttcctgctccttggagaaaatagatacaggttatctatcgccctagttattccaacataaaataatcttcgttcttcctcaatattttcctttatacttgatgcatgaggtatagtttcctctacacaatttataacatagacattcttaaattccattccttttactccatgtatagtacttaagataactccttctctcttagtttttcttttactttcctctatactttgttttacttcctctatatgttctagaaattcaaatatagttttatatccttctgctgataatttaaattcttctattatatcttctaaatcctcaaaactttgattaaatttattagcatattcctgaagataatctctatatcctaaatccattactatatatgcaattgctgatgataaagatatcttatttaaatagtttatatcttttcttaactcatcaagctttttcttttgaaatggtggtgtatcttctttgctaataattatagtaaatggactctcttctctatcataattttttatataaaataaatttcccttacttatatatctgaaaggcctatttattatttgcaagaagctatttctatcaaattcatttacacttaatcttaaatatgatattaaatccctgcaaataaaatgctcaaaaaaattatattctctatcaagcagtgtaaatgggatctttcttttagttaatacatcaataacagacatagactctatattggttctatacaatactgcattatcttcataattaattcctaaagttttattatttataactatatcagtcaaactttcagcctgcatcttttcattatatggattaaaccacttaacaatgccatcacactctttattccattttatttctttattatttcgcttttcattatacgctattacagtttttgatttatcaactatattcattctgcttctataatttatagataaataatattttttcccacccataaatattttatcaaagttaaccatatactctggctttgaccctctaaaagaataaatacattgatcttcatctcccactgcaaaaaaattattatcttccccatcatttattaaccttaaaaaatctatttgcatttcatcacaatcttgaaactcatcaactaaaacatacttgaataatttcctataagacaacaacatattcttatcattctttagcaattctaatacttctatagctagatcgtcaaaatctcttttgttgtgttcttttttatattcttcatatttttctaatgcttcttcaaaaatttcttttgcaattgatggcttaaattcatttagaggaactcttgaagttttatacaaagaaatgttatttattgcttctttaattttatcttcattaacttcatcaaagtacttacctaaaatattactaactattttgtgaacaacggccccatcaactatgtcgatatttcttccacatctcaaaagtatcttataaaataagccatggaatgtcccaaaaaaaggcgaactgtttgtatcaaatttagatacatatctattcttcatattctgcgctgcagcttttgtaaatgtaattactattatatttccattagctactcttttatgctttactagataatcaactctatttattataaccgtagtttttccagatccaggtgctgcaactatcaagacatttttttcttctgcttttactgcatccatctgatatttatcaagatcgtaccccactgtaatgctccttctttcattcctatttacatttcagcatttatgaatttctttatataagacttacatattttaaattctttccatatttactatatgaatttcattttctctcataatactgaatattttctacttaaattcaaaaaattaatatatgtctgattttaagttataagcaactatattgtaatcaaactcttatagatgtacaatagttttatgcattttaatttataatggattaaacgataattataaaataaaattatttacatgttttttaaaggagattattatggataataaatctagttttaatgttaaggatgaacgaaatttaacgatgttagttgatttttatgaattgactatgggtaatggttatttccgtaaaggacttaaagacaaaatagcatactttgatatgttctttaggcgaatccccgatgatggcggatactgtataatggctggagttgaacaattaattgattatttaagcactttaaaatttactgatgacgacattacttatctaagagataaacacgccttctccgaagaatttcttgactatctaagggacttcgattttagttgcgatgtttgggctgttccagaagggaacccagtatttccaaacgaacctcttgtaactgttcgtggccctgtaattcaggctcaattccttgaaacaatgattcttttaacaataaatcatcagacactaattgctacaaaagctaatagaatttgtagagcagcagatgggcgtcctgtaatggaatttggttcaagaagagctcaaggttatgacggcgcaatttatggtgctagagcagctattataggtggatgtagttcaacagcctgcactatgtcagacagaatgtttaatatacctgctgttggaactatggctcatagttgggttcaattatacgatacagaatatgatgcttttaaagcctgggctgaaatttatccagatgattgtgtattacttattgatacctacaatgtcataaagtcaggaattccaaatgcaataaaagtatttaatgaagttttaaaacctcttggcaagagacctcgtggcataagaatagattctggcgatattacttatctaacaagaaaatgcagaaagatgttagatgaagctggatatgaagattgtggaattgtagtttctaactctcttgatgagcatattataaaagatgtattagatcaaggtgcatgtataaactcttttggagttggtgagcgacttataactgctaagtcagaaccagtttttggcggcgtttataaattagttgcattggaaggtgataatgacattatccctaaaattaaaataagcgaaaatgaagaaaaaataacaaatccaggttttaagaagataataagaatatttgataaaaactctcacaaggccattgcggatttaattactttaagagatgaaaacattaacgagaatgaaccattaataatattcgaccctattcatacatggaagagaaaaaaaatcaagaactattacactaaagaacttcaatcaccaatattcaaaagtggaaagtgcgtgtataaatctcctacagttttagaaataaaagatttttcaaaacttgaaactgataagctgtggcctgaagtacttagatttgaaaatcctcatacttattatgttgatttatcacaaaatttatggtctttaaaacattctcttcttcataaatatacaaactcttatgaagcacaagagtaaaactctacaaaactaagttaattcgcgaacttatctataaatattataatatttttatagatcaaataaacatatacttcttttatcaataaaaatatagattagaatattttcatatattctaatctatatttctttagcattaatagttaatatttgttcttttttcgtcatcatatataggcaaatttagaaaaccgtagtcttccttcataatttccttaaaatcgatactgcttgactcactacattcattaaaaatgcaaagcttatcatcttgcccttttaatgattcactttttatagggcattcactataacactccactttctcttttgttgttgaccaaaatggacacctactcataaaacccgccatccttttctcatcctaataatttataaatctcataaatttatgaattcattatattacaaacgcccttaaaagtaaagattttacaatggaattctatgtaaaattaaggagcattttttataatgctccttaatttttataattatatttgacaaatattcttaacaactgatatatttataagttcattttggaatgctctaagtaatgccttttccaaaactttttctttatcaaagttctctatgtctctacattcagaaaaaactttatttttctcgcctttaacatttttataagttaatgtcacatatggcttgtcatattctacttctaatatttttattccccaagatatttgtgcgaagtctccatcaacagttaattttgttaattcctttaacttctcattatccttgcttggatcatttacaattattaattcgtccccaactttatattttcccacaaaaatacgcctcctcatcaatttctatttatatttttatcataggctaaatgattttgattaagtctgtaataaaaattatcatttttttgtagaaatagtaattataattactatagtatgttaattaattaacacactctgcttagttatattttaacagacttttctttaatgtacaacaaatttttgatattttcattcaattatcagaaaattaattgaaattgcatgtttatttataattaaatgttcaaattaagcaaactcaatctttttctttgcatttttattaacaatatttctctaaataataataattgtttaaaaatagtattaattaattagttgactccttctttatttctatgctataatcgatacataaaactaatagaagtgaggtttttaaaatggatcaaatagcttcagttttcaaagaaaaaaagctaaaattaactcctcaacgacttgcagtatataactatttaattaatactacttctcatccttcagcagacgttatttattctgatattcatatccaatatccaactatgagtttagctactgtatataaagcattaaaaacattagttgatgtaggattaattcaagaaataaatgttggtgaaggaaactttagatatgatggtaattcattacctcatcctcacttacaatgcttaagttgcggaagagtagatgattttaaagatctatctctagataatcttaatgctttagcaaaagagcatactgattatcagattgtttcaaataaggtttatttttatggttattgtagcaactgcaaataattgttatttttttcatcctgatcataacttaggcaaaaaatattttgcgtgaagttatggtctttttttattttatcgcttttatattattaatatgcatcactatatcaacatataatttattgaggtgatacataatgaaaatcataatattaaagaaaaggattttagtaaactcagtactatatatatcagcattatttttaattttaggtatggtttactttatttctaataagtttaaatctttacaaactatatctccaataaacattacccaaaatacacaatatgacttaacaggtgatggcaaaaaagatacttttcaattattaagctcacaaaataaggttgattttaatataaattgttttgataatgatcattatctttccaatcaacttagtgacaaaacacttttcacgactaatcttcattttgagcctaaagtttattttcataatctttctagagataatattcctgaaattatacttcttggctctaaaaatgataagtctatgtcttatgtatttaagtggaataaaaaaaactttaatttgctctattcaagtaataataatatttttggtatattggattgtaaaaattctaagactcctcaatgttattcaatatcatcatcagaagggctttcttcattaaatagctttatgctcattaataatgatattttagatactagtaaggataatacaaatcttccttcattagattctgcaacgagttttattaatttagttgagcttccttacgtagttgatgatcttccagatatcttctcttctacaattgacaaagagaatttatctttactttggagtttagataaagataattattcgtatacttttcaaaatgcctttttttatgattataagtggactgagtcattagagccctcagctataaggtggagactatcttttgaaaaaagcaatcttaaaggtacaaataataaaagtgagttgatattattaatagattttgaaaagcaaggttcttcttataaaataaatagtatacaaaaagctaaataaatataaaaggccgcattagcggcctaaagggggatgaggggttacttaatgaagtaaaaaatttatccgatagttgaactgccattaacacatcaaactctttaaatgttaaccaaacggcattaaacttctggataagcttaactagattttagatgtaaatacctctctaaatcaagtcttacttaataatccattaagtttgtaagagaatactttctctattacattaatattattgacatgatttctttttgtatacacaattcaaaaaataatttttatgcttctttaagttctccattcttataagcttcaatgattctatcaataaactttattctatccggatgagcataacttctaattgccattaaaaattctaagttcgcatccttatccttaatatttctatttgttgtaacattgttctttttaacgcctttatcttcatttagattttcagaatttttaggattcgtattgctagaatattctttaggatttgaatacatattcttattatttacattgctttgacttccactcatattcccttgaaataagttattatctaaatttaaccccatcatttgagctattgaatttaaatttcccaaattaaatccatttgtattcattgaagctaacatattccccatattattcatatcaaaatttccacctagtaatcccattaactgcataggatcaattccgaaaggtgtatttctagcattatcattaatattagaactagtatcatttgatgtttgatcttgttctctatgtttatgcttagccattttaaaatcctctcacttaaaattgtctctttttaatatatgtatatcattctaaaaatgtttatgtttttacgcatttttttagagggccattaaagccctctatccactatcctagcagcagcaattactttctcctcgtccgcctcctaaaagattagagaagcatccaccacataatataaatagtaaaataattaaatatgatttgttacagtttaataaacctgacccgcatgctattaatagaaatatgattggtgtacaaccacttcctaataaaccatctgaagcatttgatcttggctcatagcagcaacattcattgtgtcttttttcacagcaacatttattcttccttttagacatatttatctctccttcctaaaaattaagaatcttaacaattagcagcacaaccaaaattattaccgaaaggacttactcctccgccaaatccacaattgttaaatcctccgcctattccattgttattattgcaaaggaataatagtactaatataaacaaatatggtgcacaactacctaagaatccactattagctccgcctttgttgcaacagcaatctttcttttcacagcagcaatcgcactttttctcacagcagcaatcacaacttcctacgttgcctcttcctaaattatttcttccacagccacaatagaataatattaataaaatccaaatccagctgttaaatccgcaaccaccattattgaatccttgtccacagcctcctataccccctggaaaacctccgattcctggtccaccaaagtttggcccgcaaccacaattgttagaacttgaatctgaacaatcatcatcacatgaatttaaaccatttaggatatcattcatctccatttttattcctccttggaaatatttttttcttttttatactatatattattcctacctaaaatttttgacactattttttataacttataattatttaaattttttatcagctattttaataaataatgtcattacttaaatagaaataacctcttacaaatattatatctgtaagaggttatttgtttactattatataaaaatttatataaatattttactaatctaaatctgtcgcaaattctaagaaaagattatctattagttcatctttcccatctttatttaatgatgagaaaaaatataatttgtcatctgaatttaatttgagtgtttcttttataactttctcatttttctttaattcattccgtgtaagtttatcgctctttgtagcaactactataacgtcataaccaaaatgttttatccattcatgcataattatatcatcacctgttggcttatgcctagaatctacaagcaagacaactcttttcagctgttctctaccagtcaaatacatttcaacagttttcccccagctatccttctccgccttcgaaacttttgcatatccatatccaggcaaatcaactaaataaaaatcatcatttataagaaaaaagttaactaatctagtttttcctggagtctgactaacctttgcaagtttttttctattggttaatgaatttatcagcgaactctttcctacattagatcttccaacaaatgcaacttccactctattatctatgggatattgattcttctttactgccgacgtaataaaatctgatttcttaattctcattagtatcctctccaattagtgcatttttcaatacctcattaacttctttagcagaaataatattcaagctatttctaatcgaatttggtatcttatctatatctttctcattttctttaggaattattatagtatctactcctgctctaaatgctgctaaagatttttcctttagcccaccaatcggaagcactcttcctgttaatgtaacttcacctgtcattgctacattatgcttaaccttcttaccggatagtgctgatacaagtgcagttaccatagtcacgcctgccgatggaccatccttaggcactgcaccttctggtgcatgaatatggatatccttttctttataaaaagtttcatttatcccaaacttaattgcattagctctaacataactgtaggctgttcttgccgactcttgcataacatctccaagcttacctgtaagttcaagttttcctgatccagtcataaccatagcttctattggaagcgtatcgcctccatatgcagtccatgccattcctgtaactactccaaccttgtccaccttatcaatttgatcaaaatcaaacgtcttcttacctaataatttttcaacactttcattattaattaggaattccttttgttctctttttaacatttctgctaatacttttcttattaaagaacttaattttctttctaatccacgaactcctgattctcttgtatatccctcgataaccattctaatagaatcgtcttctatatcaattttatcttgcggaatatcaagttctttaaatatcttagggataaggtgatttttagctatattgaatttttcttcatacgtatatcccgatacttcaataacttccattctatctaaaagcggccttggtattgtttctaaagaatttgctgttgctataaacataaccttagacaaatccattggtacttctaaataactatctctaaaatctttgttttgctcactatctaatatttctaataatgcatcagatggatcacctttatagctcgaactaattttatctatctcatcaaaaagcattaatggattcatagattttgcctctttcattgcatagactattctacctggaattgcaccaacatatgtctttctatgacctcttatttcagcttcatccttcattccacctacggatattcttgtatattttctattaatggcattagctatagattttgctatagatgtctttcccacacccggagggccaactaaacaaagaataggtcctttttgggacttactgaattgttttactgctaaatactctataattctatctttaacgtcttccaatccatagtgctcattatctaaaacttctcttgctttagtaacatcaatattttcctttgtattcttaccccaagggatatccaatacccagtctaaatatgcctttacaacattgccttctgatgacgtaggactcatacttttaagtcttgataactcgtaattaaccttttctttaacttcattaggaagtttagctttcttgattttttcttcatacttagctatttctttcttgtcctcatcatcttcacccaattcttcttgaattgcgcgcaattgctctcttagataaaattccttctgctcttttgcaactgtattctttactttattagcaatctttttttggatttttgctatagaaatctctattttaattctttctagtactttctctactctcttggttatatctactatttccaaaatttcttgtttaagcttttcatcagttattgcataagaagctaccatgtctacaaactgacttggtttttcaagtgaatctattgatttaactgcttctccaaaattatcttcacttaacttaagtagtttcataaattctttatccaagaatttaatataggcgtctaattcctcattcttaaccactttatcatctaatttttttactgaaacttttatataactttcttcttcctctatatatttaactattttacctctttcttggccttccacaagaactctaatagtattatcagacatctttaagatttgctttattttacatatggttccaatcgaatatatttcatcttgattaggttcttctatcattgaatctttttgccctacaagaaaaacttcttgttcatctaacatagcttgttcaatagctgctatggatttttctcttcccacatcaaaatgtacaaccacactaggaaaaacagtcaatcctcttaaaggaattagcggaatcgtatatagctttttcatagtactatttccccccatatcttaattacattatttattttgacttatctagtatacacataataaatatttttttcaatgattctaaaaataaaaaactcattatatattgtagagtttacaaaacaagtatacctagtcacttgctttgtaaacttataataattttgtttaatcaaacagcatatacactactataaatactctttagtttatctattataacataatatattaattttaaaagaaaaagtgtaaaaatattaagatttattcatattttactgtactaattaaaaatataactttacaagttattcaaaatgttattgccttcagctgataatatttctcgctcgctttcattaattatatcttcttctatagccaacttaattacctctttaaaatttgttacaggaattatttctatttcacatatttcatgtagtgattcatcatagttttcttgtggaattataactttttttgcaccagctttaaaggctgcagatattttggccttcactcctcctatcgcttttacagatcctaatatgcttatttctccagtcatagcaacaaacctgtttattttctgcttagttatagcgctatagatcgctgtcgcaatacttataccagctgatgggccatcaactggaattcctcctgatatatttacatgtatatcatatctatcagttaataaatcgaataaattatccaatactgtaagcacattttgaacagatgcaaaagcagtgcttttcatttttatttttttattgttattagttatctcttcctcttcaactattccagttattttaagttcccctcttctacctgtaacttttttacaactaacttcaagcggcattaacattccaatgtttgctccatatactgctaatccattaacaaccccaactctagattgagatggtatcttatttgaaattattttgttatactgtccattctccaatacccatttaatatcatctaatgtaatctcacttctatcttcattaatagcaattccagatgccaactgaatcaaatttattacttctctaccatttgtgcaatatttacttacttcttcaacaccatcttttgaaatttgcaatccaactttattaacacaattttcagctattttctctatttcttcaggcaataatgccctaaaaaagatttcaacgcatcttgatcttatagctggtatgatttcatgtggcgctcttgttgttgctcctattaatctaaaatcagcaggaagcccattatcaaatacttcctttatgtacttaggcatattagtatcttctgaactatagtatgagctatctaaaaacacttttctatcttctaataccttcaataacttatttaactcaattggatgaagctctccaatctcatctaaaaataatacacccccatgagcttttgtaacagctcctgcctttggttgtggaattccagctatacctaaagaaccagcgccttgataaatcggatcatgcactgaacctattagtggatctgctattcctctctcatcaaatctcaatgtggttgcatctaactcaacaaattttgacttttctgtaaatggcgatagtttggattttctagcttcctccaacaccaatctagctgctgctgtctttccaacccctggtggtccgtaaattataacatgttgaggattcggcccgcaaagagctgcctttaatgctttaatccctttttcttgccctattacctcatcaaaactagatggtctacttttttcagtaagtggcttagacaaacttatttgtcttaatctatttagattatttaattccttagtattttccctatcaattattatctccctatttttttgtggtttacttattgcattacacataacataaaccatgagaattagaactataatttgcaaaatcattaatatatttgtcataatctttaaatatacttacctttactaatatatacattttatttccttattattactaaagtaaatatactttgcctccttcaatttttattattagtattatttgcttattattacaaatatattcttgattttgaaatataaataaaaacaatccaatatttaaaatactaaaaacttgtaaaaacgctaaataagtcagtatatataaaaaaatatatactgacttattattctcgctaatattaagctgattcaatatctttcttagtcctagcttttactaaagtaggtctaatctttccctcttccaatctttcaattctaggctgcttcttctctttgatagcctcttcagttattataacattagttattctattatcagaaggtatctcatacattatttcattcattatatcttcaataatagctcttaaacctctggcaccagtctgtctgctaatcgcttcttctgctattgcgattaatgactcttcgtcaaactctaacttaacatcatctagctcgaataatttcttatattgctttacaagagcatttttaggtttagttaaaatttgaattaaagcttctttatctaaagactctaaagtaactagtattggaagtcttccaacaaattcaggaattaacccaaactttaataagtctgctggcataatttcttttagtaagcttccaacatccttttcatgtttagcttgaatttgtgctccaaatcccatagaactctttcttgttctattttctattatcttatcaacaccatcaaaagctccaccacaaataaataatatattagaagtatttatttggataaactcttgatgaggatgctttcttccaccttgtggaggaacagatgcaacagttccttctagtatctttaacaatgcttgttgaacaccttcacctgatacatcacgagtaatagatggattttctgattttctagcaattttatctatttcgtctatataaataatgcctctttcagctttttctacatcataatctgcattctgtattagtttaagaagaatattttctacatcttctccaacatatccagcttctgttaatgttgtagcatcagcaattgcaaaaggtacatttaaaaatcttgctaatgtttgagcaagtagtgttttacctgaaccagttggccctagtagtaaaatgttactttttgataattcaacatcaatatcttctttattagtattaattcttttataatgattataaactgctactgctaaagatttttttgctctttcttgcccaatgacataagaatctaagtattctttaatctcatttggctttggtacacttttagggtcaaaatcaacagtttcttggaattcatctgctataatttcagaacataaatcaatacattcatcacaaatatatactcccggacctgcaattaatctttttacttgttcttgagttttgccgcagaaagaacactttaactgcttcttttcatcatatttagccatacattcacctcacttaaaaacgtataaattgaaaattcaatcttatttatcttttcctattttatgcgtagttattacttcatcaactaacccataagctttagcttcttctgcagacatgaagttatctctttctacatctgctttaattgtttctaaaggcttaccagtattttcacttaaaattctatttaaagtttctttcatctttaatattcttttagcatgtatttcaaaatctgttgcttgaccttgaaaaccgcctagtggttgatgtatcataacttcagcgtttggaagtgcaaatctctttccttttgttccagaagaaagtaaaaatgctcccattgaagctgccatccctatacatattgttgatacgtcacacttaatatattgcatagtatcatatatagcatttccagctgttattgatcctcctggactatttatatatatatatatatctttatctggatcttcactttctaaaaataataattgtgctactattaaattagcgctatcatcattcacttctccacttaacatgattattctttcttttaataatcttgaaaatatatcataggaacgttctcctctacttgtttgttctacaaccataggtactaaagccatataaatcctccttttactattatactttttctaattctaattatatattttttttattactttgttaattcttatttgaataaattgccacaagattttagccattttttctggatcttttggtccataaatctttcccaattctaaagctcttgcatttaactcttcttcagttgctttaatttcttctgtttttgcaatagcttcaagaactaaatcagctttaacttttctttctgcattttctttcataaagtctctcattttttcagttgtatttcctgtgaattccatatattgttctaagcttaaaccttgatattttaatcttccttcaagatcttgcatcatggcatcaatttctttatttaccataacttctggaatatccatttttgagttttcaattactgcagttataacagcttcttcgaattctctttctgccttttcatcgttatttttttctaatgtcttttcaagattttcttttaattctgcaaatgtgtcaactgctgatacatctttagcaaattcatcatctaattctggcaattctttaactttaattgacttaatttcaacttcaaacattgctggttttccgtttaattcttcttttccataagcttctgggaaagtaacatttacttcttttttatccccaactgctaaaccgattaattgttcttcaaaattatcaatgaaagtaccagaacctatttctaaagaataatcagagccttctccaccttcaaaagcaactccatctatgtatcctttgaaatcaataacagctatatcccctttagctatatttccctctgttttaacttctattctagcatttttttcttgcatttctttaatttgcttatctatttcagtatcttctactttatatataggcttctttatatctaatcctttatactctccaagttctacttctggataagtagtaactgtagcagtataaactaattctttaccttctcctaattccactatatcaacttgtgggtaatctacaggtttaatattttctgcatttaatgcttctggatatgattcatctatagcaaaattaactgcgtcatcatagaatacttcaactccatagaactttttaaccattgccataggaacctttccttttctaaatccaggtatattatatctgcccttattcttattataagctttagttaacgctgcatcgaatttttcagcttcaacccttatttctaattttatcacatttgtttctattttttccactttagctttcattttattctttcctcctaaatagtgtgcatctaatttaactaagtcattataccataaacacttaaatcttatcaaataatttattaatattatctctattgaatataattaccatttacatcgataaaatatactctaccatcaacagtaattttaacgcctttttcttccttttcaccaatttctatattagctccagctaaatcccacataaccttatcttcattagttgaaatatcagtcatccatagatactttttaagatttccacctccaaaatatggcctattagttacaaatattattttatcttcactaataaattttggattctgattccataagtattttggatttgattgaattgtagcttctttagtaaaaacacttccacttgtagatacatattgatcttttgatatcaccttgtttgttccatctaaattatatagagtaattactgaatttgtatcttccacaattatttccttaccagatggacttatactgtaactaacaccattatcgctagtatctaaagttttgaaaacttttccggtattagcatcatctacataaattgcttttgcaacatttccactcgctagagttatatttatatattcttccaccggtttttgaagttcttcttgaactacttcctcatcttttttctcatcagatgtttcttgtttttctgctttagtttgttctgaagaattattagtatcactatcaatccatgcctgtatattttgtttaatattttcataatctattggattatacgctattttaattgatagcgcagatgttattaatattattgccaaaaatattattatcgcatttcttcttcttcgcttcatccttttttcatattctctactaaaaatacttggctttcccaaagatggccccctccaaatctttctaatgtattataatataaacaaattcattatatattattcttttgtttaaatctacaacatattttatatttttataatcatataatcctagatcaaaaaataatattattttttacaactgttcttactattgcagcttgagcaattaccttttttattttctccctttaagcagcaacctccacattccaataacccttcttttttaagttcttctagtgttaatttacaaacattttctgaatactcttcataatctatggtatttttcaacaattcttctttatatattttaatcatttcattctcctacacatattattttattttgtaattatatattgcaatattaaatttatatattaatttaatattttcattcttaatctacattaaattcaagttagtttctacataatatctatattatacacctataaatttcttataattttttctatataaaaaagccattacttagcaatataaactttacttatttctcttatattttaattgtcataatataaaaaattattgtttttttttgtgattattgtataattaaattatcaatattgtaacaaatagcccatacactttatggtttatcgccataaaattttataaacccacaataacatgttcatttatttcctttctcgagtggacatgcgaaaacctgtactatatatacaggttttcttttttatatttaatattataagtattcttgcctataattaataaaaaatttactttgtgtttatctaatattataatactcaacttataattgacaatcaaccgttaaaattttgtaattctaaaacttatgttattcagatttccgcatcttaacatcaaaaaaaggattgttcagacaaacaatcctacttttatacttataataccgcttaattacaaatagaacttatttaaacatttgttatcggttttctttcacctttaaaattattaattttatttctcctcttttccaattctgctcctacttcttcaattgaaatattcatttgagccattagaacaagtaagtgataagtaagatcacaaatctcatttatctgttcttctttattattttctttacaactaattataacttccgtgcattcttctccaactttttttagtatcttgtttgttcccttttcaaaaagatacttcgtataggatccctcttcaccttctgtttttctttttaatatagtctcatataaagcctttatattttcatccatttttaatcctccaatgcttctcatatataaattacaaatccctataaaaacaagttctatttcctgtatggcatgccgctccaacttgctcagctaatatcaaaatggtatcattatcacaatctatttttatttctttcacatactgaaaatgtcccgaagttgctcctttattccaaagttcatccctacttctactgtaaaaccaagttgtattatcctctaatgtcttatttaaactttcttttgacatataggctaacattaaaacctctttagttttataatcttgaactatagttggaatcaatccattcatcttttcaaaatcaacttgttccactctcttgcaaatctccatacaatttttctcccttcagatatatactagctatttgctttttatataatcttaaacttatatacgtactgaaacatttttatcatgtaaatatcttttaacctcatcaacagttaactccccatagtgaaaaagagaagcggcaagtgctgcatccgctatattacttttaaatacatcataaaaatcttctaaacaaccgcatccacctgaagctattaccggaacattagttatatcacttacagcttttgttaattccaaatcaaagccttttttagttccatctgcatccatagatgttaaaagaatttctcctgctccaagcgctgttgcttcttcaatccactttagcagatccaatcctgtatcaattcttcctccgtttattacaacattccatcctgtattatcagatcttttctttgcatcagctgccaatactatacactgacttccaaaatagaaagctccttcttttataagcattttatttctaacagctgctgagtttaaactcaccttatctgctcctgctctaagtattgactttatatcatctaaagtctgaagtcctccacccactgtaaatgggatgaaaattttttcagctacactttgaacaactttttccattatcccacgtttttcatgagttgctgttatatctaaaaatactaattcatccgctccttgcttattataatattctgcaagtgcaacaggatcacctacatcgaccaatccctcaaaattaattcctttaacaacccttccttcttttacatcaaggcatggaataattctcttagtatgcatccagttatctcccctctttagaaatttctattgctttttctaaagacaatgttttagcatatatagctttacctgttattgccccatataagtctatgttttttaattctttaatattttcaatatccttaattccaccagaagctgtaatatcaatacttactgttctcttaagttttttaagcatttctacattaggtccttctaatgttccatctttactaatatcggttactattatattcttaacaccaatattctccatctttttagcaaattctatatagtcaaggtcactggccgcaagccatccccttccatatactttgccatctttacagtctattccaactgctattttgctatcatatattgctattgccttttttagtaactcttcatcttccattgctatagttccaagaattactcttgctactccattatctaaaagatatttaatagtttcaaaagatcttattcctccacctagttccacaggaatattaagctcattagcaattttaattactaactcatgattttgattacttccacttttagccccatctaaatctactaaatgtatatattctgctcccatatcttgaaaagattttgctgtttcaaatacatcatctgcaacaatttcttttttattataatctccctgatacaatcttactggcttgccatcaattatatcaattgctggtaaaattatcatttaatcaactccccaaaattttttaaaatggccaaacctacagatccacttttttccggatgaaattgagctcctattacatttttgcacctaactacacctggtatcttattttccccatattcgctgtatgctaccaaatcttcatcattataaccttgtgcaaaataagaatgcacataataaacaaatcccccttcatctatacctctgaaaagttcatcgcttctactaaacaccaaatcattccaaccaatatgtgggatctttatattattaactttatcatctttcattttaataatactaccctttaataagccgagcccttttctttcaattccttcaaatccattttcaaataataattgcataccgagacatattccaagaagcggtttattcctttttacttcttctgatattattttgtctaaagataacttttcaatagtttccatagcatctgggaatgctccaacgcctggtaatattaatgcatcagcagctctgatttcatctttactacatgagatcttattctcaatctcaagataatccagggcattcttaacgctttttaagtttcccattccatagtctattataactatcattatataaccccctcctataataaagatcaaaatgaataacaaatgataagttagcatctctattccccaagctttacagatattttactaataatcatcattattcatttttctcttttataattttttataagcttcctttagtagatggtatatcattatcactacttctagatatagcttctttaattgctcttccaaaagctttaaataaagcttctattttatgatgatcattttcaccatataaaacttttaaatgaagtgttattccagcattaaatgcaaaggctctgaaaaactcaaccaccatttcagttgacatttcaccaactttttctctcttaaaatcacaatcaaaaaccaaaaagggtctattgctcacatcaattgacgctaaagcaagcgtttcatccattggtacataaaaagttccatatctgtttatgccatgcttatctcctagtgattctttaaatgcttctcctaatgttattccgatatcttctattgtatgatgatcacatacataagaatctcctttagcaaacacatccaagttaaccttactattaaatgaaaacaaagttaacatgtggtctagaaatccaatccctgtatttatttcactattcccgtttccatctaagtcaatttctactctaacactagtttctttagttattctttctcttcttgagcttctatctgacatactaattctccttaaaacgaataattgtattttaaatatagttttccaaaagaattctataaattaataatatctatataaaacataatctttctatagtcaagcatatctaagaaaataatatgcaaatgatataattattttttattgaatcaaatattatccctttaaataaatcaatataccaacttattattttcctaaacatgccaagtatttatacatatataaaaatcttttttattccttcaactactttcctattttgcattggtgaaccaactgtaattctgaaactgtcatcattaaaatttctaattattatcccaatactctcaagtcccttaataagagcttccttatgaggtgttcgtccaaagatgtagtttccctttgacggatagaattgtattttcattgcggcatttttttcaacctcttttaaattctcatataattcttctctttgtttaactatttgttttgcatttttaacaacattttctgggtatctcaaagccattgaggccagattttgcgaaaacgaacttattgtatatggaattttataatttaataattcagaaatattactctcatgagttatcaaaaatcctactctcaacgatgcaagcccccaagcctttgacaaggttcttgtaacaaccaagtttttatatttatttatatatggaatcattgattttccgtagaattcataataagcctcatctacaagaacaacagtatttttaaaaacttctaaaatattaactatatcttctaactctattccaattccagtaggattattgggatttgaaaagataattaaatctacggcttcttgttttcctatatttataaattcctgaacattaaaattcatagtttgccctatatcatatttctttaattctccaccaaatcttgaaacaaaaaaatcatacattgtaaaatctggtcctagagttaatgccttctttccatttttaatagccttacttacaacaagttcaagcatttcatcagacccatttcctacaattatatttttgctctctatatttgcataatttgcatataattctttaatggtagtcatctcatttgtaggatacctatggaaaagtacattagttaagcaagatttcattttcattagtatctttgggtccatctctagataaatttcattgctatctagatttattgtatactcatcatacgaatttatatactcattatacgttcccattctctaatctcactttcacagaattagcatgagctgtaagtccttccttgcttgctaatgttataattttttctccattttccataagtgcttcttctgaataataaatgaaagaagatttttttataaaactatcaactgataacggtgaaaagaaccttgctgtaccacttgtaggtaatacatgatttgttcccccaaaataatctcctataggctctggacagtatcttcctaaaaatacagaccctgcatttctaaccatacctaaatatttcattggatcatctaccattagctctaaatgctctggagctatagaattagaaatgttaatacattcttctattgttctacaaattattgcacttccaaaattttcaagggaagttcttattatttcttctctttcaagagtctttacttgtcgttccaactccatctcaactctcttgtgtaattcttttgatgttgtgattaatattgatgatgctaatttatcatgctctgcctgtgacattaaatctgctgctacaaaacacggattagatttctcatcagcaataactaatatttcactgggccctgcaatcatatctatatcaacttctccaaatactaatttctttgcagtagcaacaaatatatttcctggtccaacaattttatcaacctttttaatgctctctgttccataagccaaagctgcaacagcttgtgctcctccaactttatatattttattaattcctgctattcttgcagccactccaatatatggattaattcctccatttttatctggtggagttaccataacaatttcatctactcctgctacttttgcaggtattacattcataagcactgatgatggataagcagcagttccacctggaacataaactccaactctttctaaaggcaatactctctgccctaggtatactcctttatcttttgtcattaaaaatccatttgatttttgtttttcgtgatactcttttatatttgctttagcttcttctaatgcttcaatgaactctttctccactttattaaaacattcatcaatttcaaaagttgatacttctaaagttttaagttcaaccttatcaaatgacttcgtaagttcaaataaagctttatccccatcttttttcactcttgatagaatactatttacacttgagattatctcttgttccgtttctgtaactctacctttaagttcactaattaagctttctttattactctcggtaatctccattaaatttaacatataattaatagcccccctttgacttgataaaaaagtaataacaacaaaaaatactctttaaattttatttattattttttgttaattactcaagatatcataatcaattttatcaacatctcacgaattttgtcaattattaatcactttcttaatcctatctataaaatcccatatttcattctgcttcattttaaaactagctttattcactatcaatctagcacttatctcacaaatcctatctataacaactaaaccattttcctttaaagttgttccagtttccatgatatccacaattccatcgcataggcctaatattggtgcaagttctactgatccctctatttttataacttctacatccatccctttctttttaaaataatcctttgcaacttttggatatttacttcctatttttatatgaccaacttttttgaaaatatcactttctggtaatgatgctactatgaatccacactttccaaatcccaaatccaaaacttcatagcaattgttatcactttccaaaatagtatcttttccaactactccaagatcagctaccccatgttcaacataagttattgaatctgctgcctttaccaaaaaataatttatatcctgcgttttatctttaaacacaagttttctacctttgctttttaattctgaaggatcaaatttcgccttatctaagatctttatggtttcttcttctaatcttccctttgttaatgctatgcttatgctcatttttaatattccccacccttaactacttttatttctttcatatcttcatttggtaataaatcaacgatatacccttgattcctaagctcttcactttttttaatagcttcaattctagtatttttattatagtatatcttatatatattttccttttcacttgctattttattgaactttacagtttgaatcacagcatcaatatctatcgaaaatcctactgctggaacacatttttctgagagctcaattaaattatcatatcgcccacctctcagtaacgtattgccaacaccttcaccataacctctaaaaataattcctgtgtaataattcagtctcggaaccattcctaaatcaaatgtcacatttttaccatagcccaacaaatctagttcctggtataatgcctccagataatcaagattttttcttaactcttcattaaatgctaactttttagcctcttccaaaatctgtttatccccaaacatccaaggcaacttattaaaaaatgccttatactcttcctttatatctaaattctctaaataatcctccaaacttttcatgtttttatcttctataaactgcgcaatagcctctttatattcctgctctatttctaaatttttaaatgccccattaaaaaaaccgatatttcctatttcaagcttaaaatcatttaatcctaatttcttcaaagcttctaatgccaatactaatatttctaaatcagatttttcatcttcaagtcctataaattcaacaccgcaatctgtatattcattcctctttcctccaagacttgcgtgaactctaaaaacattcgaggtatacctaagctttattggtaattctacatctttgagcttagtctccacaactcttgctattggaattgtcatatctggcctcaaaattaatatacgacccctattatcgaagaacttgtacatatcttcttctcttaaagtttgtgaattatagttgaaagtttcataaaactccagcgtcggtgttataacttctttatatccccatttttcaaaaagtttatcaatgtctttttctaaaatacgttttactgcacattcatctaatactaaatcccttgttccttctggaagtatgttcttcttattcattttccaccccacctattcttattgcttaatctctatattgttttatcgttttatcagtttagcgtgctaaattatcatttaatttatgataacttattttttctaccatgtcaatcatttcaaaaacctttatatagttatttataagttatatgttaaatattcttatatccttaattttaactatatagaaattagtgttataatataatagtttatttgtaaaagtatttttaatactggaaatatattgaaaggggactttttacattgattactaaagatatacacttaaacgcaataaaaaaaatgcacatccataccaaaacttctgaatcagtacgtcttggtattctccttgcaattgttggaggtttcttagatgcttacacctttgtctgcagaggtgaagtttttgctaatgctcagactggtaaccttgttttacttggaatagctcttacgaagagaaatcctggccaagcaattacagctttactgcctattttagcattcgtgcttggggtgatatttaccgaaaggataaaagatattaaagttccatcaatgacttttgctacaaatgcggaacgtataattttaattattgaaattattgtgctttttattataggatttataccaactacagtccctaacatatttgtaacagttccaatttcatttgtgtcatcagttcaaatcgcatcttttggaaaactaattgactctccatatagtacagctatgtgcacaggtaatttgcgttccgcatctcaagctgcttataaagcatttatagaaaaagataaaaaacttgctttcaaaagtattcgctacttagttataatctttttctttattgttggagcttatttaggcggaatcttaactttacacgttggcggcaaatcaatttggttcgccgtagtaatattaattatttcagtaggcttatttagctttgataaatatatttttgatcataacaacaaagaacaaataacaagtgtaacttagaatgtcattaaaatatttaaattatataaaaaaatacctcaggtaaaataaacctgaggtatttttctaaaatgttacaacttcaatattttcaattgatttttgtactaattcatccacatttaatttttcttcttctttcattattgcatcaagttttggatttgtcttcggatgctttggaacaaatattgtacaacagtcttcataaggcaaaattgaagtctcatatgttcctatttttcttgctatttccattatatctgttttatccattgcaattaacggcctaaatgctggtctatcagcacaattatcacttacaataagaccatccatagtctgacttgcaacttggcctatactttctcccgtacttactgaatttattccatacttatctgcaagtctacatgctatcctcatcataaatcttctcattattattgtaagttcatcttctctacatttatttataatttccatttgaatatctgtaaaaggaactatgtacaaattaattttttctgtatattgagctaatattttcgctaaatctttaactttatcctttgctctttccgatgtatatgggtgactgtgataataaacacaacttacttcaacacctcttttagccatcatgtatcctgccactggggaatcaataccaccagataacattaacattgtactaccattcattccatacggaagacctgctgcgccctttgttatatcagtatttgcccaaacataagcataattatttcttatttcaatatttattaaaatatctggatttttaacatcaacatttatttctccatctaaattagtaagaacatatgctcctactttccttgaaacttccatagaattcaattcaaattttttattagctctatttgtaataatcttaaaagtatttccttctgattgtctaaccttttctaacgcaacctcttgtatactattaaaatctatgtcaacttctctaactaaacatacttcaagtatcccaaaaactttactgatcctattaatactttcttctatttcatcagtttttataaaatatcttccactatcgtgtataaattcagcttttatcccatcaagttttttagctatattatctcttaattttctttcaaatttacctctgtttaacccctttaaaaatatttctggtgcgtactttactaaaataagttctctcattatttttttatcctccttaaaaatttaagtcctttttctaaaatgtctactacataatctatctctgattcatcattatcatccgaaaaagaaaatctaattcctcctgatatttcatccttagttaatcctaaagattttaacacataactaccaccaattctctctctttccttagaagaacacgctgatcctgtagacacatatattcctgattcctctaaataatgaagcaatacttcgcctcttacacctctaaaagaaacattcaatatataaggtgaaaaatcattatttagtagactatttatctttatattatcgatattacttaatttatcaacgaattttttctttatttgaaataccttttcgtaattttttttcatattatcatttgaaatcttagaagctaaagccattcccataattccagatatattttgtgtacccgctcttattccaaactcttgagatccaccttctatcaacggtgataaagaactagtattttttatatatataaatcctacacctttaggtccatgaaatttatgagcactcactgttagaaaatctatattcattttctttacgtctataggtaatttaccatagctttgaactgcatcaacatgaaatttagttctattgctacttgctcttattatgtctcctatttcttttagatcttggattactccaacttcattatttacatgcattattgaaaccaatacagtttccttagttatagctttttttagctgttctaagttaatcttaccatcttcatttatctctaaaaatgttactttaatattattttcttctaatttctttatagtattcaaaatagaagcatgttcaaaaggagttgtaataagatgagttccgcttttcaaaagcccctttagaactaaattatttccttcacttccacccgaagtaaaatgtatttcattttcacttgcgtttatagttttagctaatatacctctgcattctttaagttttctttcacttttcaaccccaaattatgtaaggaagacggatttccgtaaaattccttcataccaaaactcacttcatctattacctcatcaagcggctttgttgttgaactattatcaaaataaacttccatataagtcttcttcctttcaagtttataaacgtctaaagatcaattataaaatatattcttcccttattatcttataaacttactatgtaatatacatgttttattataacaaaaaaataatccctgcatagtatttttttaaatatataaaatgaagcagtaaataagaatttcttacttactgcttctgatagagagagaaaattaataaggaataatttcttagtattaatttttgctatacttttcgtaatatttaataagaccttgagttcctagatcacccaaattatcgttatctaatgttttatacatttttagcacttcatttaatacgcctaaatttatggaattatccgtagactcttctattgctaaattcatatccttaataaaatgttttatataaaaaccagggtcaaaatctccttttaacatacgaggagccatatttttcatttgccaacttcccgctgcaccttcacttatactatcaagcatggtctgaacatctaatcctactccttttgcatacgtaattgcttcgcacactccagctatcgcaccagctaaagctatctgatttgccattttagtatgctgtccattcccagcttttccttcataaattatattggttccaagtgcagataaaacatctttgtgtttttcaaaaacttctaaatctccaccaaccattatagataatgtagcattctttgcacctacatctcctcctgatactggcgcatccaaagcatatatttctctctttttagcctcattataaatttttatagaaagcttcggacttgtagtagtcatgtcaattatacaagactcttttttagcattctctaaaatgccattttccccaaaataaacttcttctacatctttaggatatcctacaattgttattatgacatctctattatttgcacaacttttaacatcgtcgcaccatttagcaccttcatttataacatcaagaactttttcttttgtccttgtataaatagatacctcatatcctttcttcattaggtttctaaccatagattttcccattacacctacacctataaatccaattgtcttcacttcaaactcctccatttttagttataatattttgtatcctcatatttaacttcttaaaattagtattaagaatctttttctacgtcaatccatgtcattttactttttaatctattaatttctgcttcctgatcttttattattgttttataataaacttctttatctccccactctttacttaaattgtttattaatgatgccatttcgtcagcacttcctacaattctattaaagagcattaagttggacttaagtatttccggaatttcattatgggaatatcttaacctatgatctatttccccatatccttcctcaaaaattgttctaacctgtatctccgctattaccttttcattgattggataaaattcaactaaataatgaactgatcgatatccagaggcttttgaccttacttctataataggatcatcaaaaacatctatattatctccttctcttacatttgcagtaatctcagttacattccaagtttttattataaaatcatgtatcccctgccattggtctttaaatatatgtataactctaattcctattaaatcatttatttcatttctataattatttactgtaaattcaaaatcatctccgtatttattttttctatcttctgtctttcttataactttttctattaatctctcaggatctttaatccttgatttaacagaatgcaccattctctgcgatcgtaaaatgtttgctataaatgcagcctggctttcataagaagttttataatttatgtagtcttcgtagatttccttaagattttcaatattaatattatttttagaaattatttctttagcctgaggatatttttccaaaaatatatctatgttaaaactttttttcattctgcatactcctctataaattccattaatttcgatactatatagattatactacattaggcataatcaaaaaataacaaatccatctgccacatctattttccatcatgctgcatcagcagattgccctactagcttgctatgatcccactctactttcttgcctgatgaaaaataatcatagcattttgaccttgttattctctttcatatgccttaattaaaaattatttcaaaaaacttcaaccaaaataagattgaagttttttattaaaattatatggtttataataactaatagtttagattaaatttctatgaaatagtccttttcaaggtatataaatgtaaattgtttattatagcccaaatttttatatgcaaaatacttgtaaagaatatgctatccagcttctaatttaattcttagcaaatttttcagttctatttcttgtctataaattttgatattatcattgtacagacagtatttcctgatgaatttaataatgtcgctggtgcatcaattattgtagctattacaagcattatagctaatgcttcctgtggaaatccaaatatacttaaaatgagcatttcaccaatcgccccacctcctggcaccgccccaactactgcaccaatgagaagccctgctcctaatataggaaataaggaactaatagtatttatgtctctgccaaatatagcaaacaagaacattattttatatattcctccaattactgaaccatccttatgaatattgactccaagtggcattattatattagccaaggtatctgatacccccatatttttagttgcttttatatttactggtatgcaggcagcactagagcatgttgctaatgcagttattgaaggttctgctgcatttttccaaaacaatttcacgccttcttttctacttgctatataagcatatatactgaagaatacaaagaagtatattatggagacaaccaagtatagtataaatatttttgcatacccacttaatatttgtcctcctaattgtccaattacatttgcaaaataagctccaagtccaattggtgcataatacataattatatttacaactttcattgtcactgtagctccactgcttaaaaatgacgcaaaagccttgccttgttccttagaaatcatagttccaaaacctattaatatagaaaataatattagtgctaacaaattatttctggataaaagttcagaaaaatcccctacacttatactcgaaacaatcttttctaaaactcctacacttttaggtgtatctatactattagtggtcattagattattaaacattgatggatccaacccaactgctggattaaacattttgaaactaattactcctattatgcctgaaataattgcagtaattccaaatgtaatcaatgttattataaatattcttccgagcctttttgatttatccatattagctatcgcggaagcaatactaaagaatactataggaactaacattgtaaatattaaattcaaaaataaatttcctagtggagcaaatattttagctttatctcccatgataatacctatcgccccgcctaataatatcgataacactagaatcaatgacgatttatagttctttaaaaatctcaattttctcacccctaaattttgatgcttaaattataaatactagcactatccaagagctttcctaacaatttccctatcatcaaaatatattttatctttacctattatctgataatcttcatgcccttttcctgctattattaataaatcatcgtctttcaaaagttttaatcctttttcaatagctttctttctatcaacaattttctcataagttgaatttatgacttccattccttcttcaatgtcttcaattatttttatcggatcttctgtccttggattatctgatgttattatgcaataatctgataaaattcctgccgccattcccattacttttctcttactcttatctctatctccaccacaaccaaatacagtaataagtttgcctttagtcgtctctcttgccatcattaatagtctttctagcgcatccggagtgtgtgcgtaatcaactattatatttttatttaaattattttttatcatttctagtcttcccggaacatgtcttagattagataaacagcttataatgtcacccatatccatgccaagacctatacaagctcctatagcagccaaaacattatatacggttatttttccaggaatatttacttttacatctgtaatacaccaccagcgccattttatgtccctaaatttgattttgaatattatacaatcatttctatatctaatctcagttgctctaatatcagcctctttatttattccataagttaaaatcttgcaactagccttttgtataatttcttctgctattccatcatctagatttataactcctagctcacattttttaaacaattttatcttttcattcttataattctccattgttccatgttcttcaagatgatcttgagatagatttgtaaatactccaactttaaaatcacaatactcaactctctgttttgctaatgcagacgaagtgacttccattacaatattttcagcacctttattaataaattccctaaataatccttgtaattctaatgattcaggtgttgtaggattaaccttttgtatgcttgctttttctttattaaattcatatcccaaagttcctattatagctgttctttttttatatgactccaatatgtcttttatataatgtataactgtagtctttccgttggtacctgttactccaaccaaattaatttctttagaaggttcattataaaacacgttagctatacttgctaaagctaacttagtatttcttacttttattactgttatattttcattatctattttaatttcttcctgtatcactattgctaaagcgccactttttattgcttcatctatatagtcgtgaccatctgcattagccccctttatgcagataaacactgaacctcctttcacttttctagaatcataactaacactcctagcatctatatcaacactgccgctaattatttcgtaatctaaatcttttaataaattgtataacttcatttttattcctccaagaattacttaacttcttatatcttcattatatacaacattttcgcattaaatagtgcatatattgcttgatatactgcaaaaagtgctttatgattttaatatatatgttgcaattgaatttttacattattattataattgtgcacttagcttactggaattttaaatgtaagtttattattactacatatataaaactaagatttatatatacacttcttagagt

SEQ ID NO: 15 - DNA, 87872 bp, Clostridium beijerinckii
gataataagtatgtaacaaaagttacaatatttatttgtttatgaatatttatcttatagctgaaaattttagtattaacactgaaataacaagaaaattattaattgtccaatctgcactaaattattgtctataaaattatagaatatatattgccaatatggtattatagttttgacaaaggtgtctttattattaataaaggcatttttttatattcttttattgaaaattaagattataagaaaatgctaagctaaacagaaattatcggtagtttagaatcaacaattaaactacttagggggagttaaaatgaattttaattataatttaccaataaatcttctatttgggagagggagaagtaatgaaataggaactgaggttgctaagtatggaaagaaagcgcttattgtaactgggagaaacagtacaaaaaaaagtggtttacttgataaaaccatagatttgttgaatgaagcaaaagttcaatatgaaatttttgataaagtagaacaaaatccacttactacaactgtatatgaaggtgtagatgttataaaagaaactggatgtgatgttgttttaggacttggtggtggaagcattatggatgcagccaagagtatagccttttcagctaaaaatcctggagatatatcagaatatatatttggtattaaacaagggagtgaagcattgcctatagttctagttccgacaacatgtgggactggaagtgaaggaaactgtttttcagttcttacaaatcctgaaactaaggataagaaatcccttagaacaaatataattattgcaaaagcatcaattattgacccagaacttatggtgacaatgccaaagagcatacttgcatctgttggatttgatgcattagcgcataatatggaagcgtatttatcaaaaataggacagccattaacagatatgaaagcattttatggaataaaattattatcagagaacttaattaaagtgtacaatgatccaagtgatttagatgcatgggatagtgtaactttagcaagtacattaggtggaatggtgataggaatagcaggagtaactgcacctcatggacttgaacatccagctagcggattacatgatattgttcatggcaaaggattggcagcccttacaccaattattgctgaaaaatcgtgggaaagtaatttagaaaagtacagtaacatatctaaattattaggaggaactgatgcaaaagattgtgcagatgctataagaaactttctgaaaaaaattgatttgaaagttactttaggagagcttgggattacagaaaaagatgtagaatggatggctgaaaactgtatgaaggtttcaaaaccaagtatagcaaatcatcctaaggaattttcattagaagaaattaaggatatatattacaagtcattataatatagaaatttaaaataatttattagatgcaaaggcgcactgaaataaaaatcagtgcgccttttgtgttatcaagattaaaaaaatatttattaggaggaataattatggaaaaatcaggtttaaagaaggataatttaagtattattgaaacagtggctttatcagtggctattatagcaccaacagcagcgatgtcattaaatatatctctaatggcgcagacatgctcgttttctgcaccacttgtatttctaatttcaactatagtagtaggtcttgtatcatattcgattataaaatttaatcattatatatctgcatcaggctcactttatgcttttactaaaacagccctaggaaataaaatgggatttacatctggatgggcactattacttgcctatattgcattagcaggaggcactgcagcagggtttggtaatttcttctctggatttttatctgtatttggatttcatgtaaattggatgccaatctcaataatagcatctattgcaatgattgcattaggaatcattgatgcaaagatatgtaatagaattattctagtaatagaaggaatatcaatattgcttatactactactttcagttgtaattttaattaaagttggtactacaaatggtttgagcttgattccttttaagagtaacggggttagcacatcagctttagcttcaacttcagtatttgcatttctttcttttataggttttgaaagtgcttcaagtttaggtgaagaaacaaagaatcctaaaaaattcattccaatagcaataataagtgctgtatttttatcaggtttattttatttagtttgtagttatgcacaagttataggttttggtcttgatgcaaaaggacttgaggcgttatcttcttcaacacttccactttcagatttatcaacaaaatatatgacagcaggatttggtacaatattgatgttggttgctgcatgttcaaacttttcttgtgcgcttggatcttactgtgctggttcaagaatgttatttgcattaggtagagatggaataatgccaaaagcgatgatgaaaatacatcctaaacacaatacaccatattttggattgatattaataataataatatcagatatagttcaaattgcattatttaaacatgatggtatagaagtgtttggttatttggcaacaataggatcattagctatacttgtttcgtatatatttacaagtataggagctatggtttattttacaagaaacaaagtatggggaaaaactcatttaataataccaatagcatcaatagcagccttgttatatgtattatattctaatgtttatcctataccagagtttcctaataacctattcccatatatagtattggcatggattgtaataggttttgttattagtaatatatttggaaaaagtaagattaaaagtgatgaaaagagagagggttacgtattagaagtaaggggatggaaagatgaaaataaaagttacttgcgttcaaatggagccaaaactaaataatgtaaagtataatttagaaaagatggttacattcataaatgagattatggagaaagatagtgaaactgacttaatagtatttcctgagttaataacatctggatatgaatgtggtaataaatttaaagaactagctgaagtagtggaaagtagtaatagtataaaagtcataagtgaacttgcaaaaaaatttgggaccaatatagtttatggctttccagaaagagatggtaatctaacagatgttctttacaattcatctgtgtgtatagatagtagcgggagagtggcaggagtatatagaaaagtacatctatttgatacagaaaaaagatattttaaagcaggctgtgagttcccgatttttaatacctcttttggaaaaattggagtaatgatttgctgggatactgcatttcctgaagttgcaaggacgtattgcttgaaaggggctgagcttcttgtggttaatactaattgggaaaagccatattctgatgattgggatctagtaacaagagcacgagcatttgataattgcatatatttagtagcagctaatagaattggacaagataaagaattgggcttttttggccatagtaaaatagtagatcctgttggaagaccattaaaagagttaaatgatgagatagagggaatagtatctggggaaatagatttagaattgcctagaaagcttagatcagaatactacactttatttcaagatagaagacctgaactatacaaagagataataaaagagtaattacaagttaaaatatttaacaaggaagttagatattgcatacaaattgtagttggattgatagatttagacattatttaataaacttagtgttgaatcaaatagtgtgcatactgcacaaaaaaattgttatttatggttatagaaatagggtaactaccatgataatattatcctaacgcaaaacaatgtaataatttaatattaaatgcgaaggcgcactgtaagaaaaaacggtgcgcctttttcttattactttagatgaagtggagttgagaatatgtataaggttaatgaattatcaaagaaatatggagagctagaggttttaaaaaatataagtgtggatataaaagaaggggaagtagtttgcataataggaccatcaggatctggtaaaagcacatttttaaggtgtttaaatttatttgaagttccaacaggtggggaaatgttctatgatggtaaaaatatactgggtaagaatgttgatagccgttctcttagggaagaagtaggaatggtatttcaaaaatataatttatttccactacacacagtgatagaaaatgttattttggcacctgtgcttacaaaaaagaaaaatagaaaagaggctgaggaaatagctctagaacttcttaaaaaggttggtttaaaagacaaagcagatgtatatcctaggactctatctggtggacaacagcaaagagttgcaatagcaagagcgctagcaatggaaccaaggatgctcttatttgatgaacctacatcagcgttagatccagaattggttggtgatgtgttagatgttatgaagcaattagctaaggatggtatgactatggtagttgttactcatgaaatgggatttgctagagatgtatctgacagagtaatttttatggacaagggttatatagttgaagaggggaaaccaaaagagatttttgcaaatcccaaaaatccaagaacaaaggagtttttatctagagtcttaaactaaattcacatgttaaatttgaaattactatagataataaaaagattcaacattaaaaataattacgaaaaggggaaattaattatgaaaaaactagggaaaaaattattagttgtaacaatggttataatgagttgtattggatttatgacaggatgtggttcgggaagttctagtactacatcaacatcatcaagtaatgataaatcaaaggatacattagcagctgcaaaagaaaaaggggtattaacagttgcttcatcaaatgatgaaccatttgcatttatggatgctaaaacaaatgaatttactggaattgatgcagaaatcataacagaagttgcaaaaagattgggaattaataaagttgaaatgaagcaaataccatttgaaaacctgttggttgagttaaataataatacagtagatatagtaacagatggaatgtatgttaaagacgagcgtaagaaattagcattatttacaaacatatggtataaggaaggcgaagccatagtaattcctaaggattcaaaaattgcaagtaaagacgatttaaagaatgcaacattgggagggcaaaaaggtacagcgtttcttgaaacagctcaaaagtggcaacaagatggatcagtgaaagatgttaaagtatttggaagtcaatctgaattaatgttagcagtaaatactggtaaggtagatgcatgtataactgacggaatggttgccggatacacactatcacaagatagcagtcttaatttaaagatattatctccatataaagctgaaacatctggaatgatagcagcagcagttagaaaaaatgataaagctttagcagatgcagttaacgaacagattgatgaaatgaagaaagatggaacaatattaaaacttcttaagaagtatggaatgaatgaagattattttgtatcagtagaagatggtaaagcttctgacaagtaacaatataaactaaaaaagaatccagacgggttcttttttagaaggggaggaaatatatatggatattctatctaatttggattttggtacagctttcaagttcttagtaccttcattaaaggcaggtctttgggttgtagtacaagcgacggtatttggatttttttagcaataattttaggattatttattgcaattggacgtattagtaaaataaaaattttaagaggatttttattagtatttttagaatttataagaggaactcctttattagttcaattagtatatatgtattatgtagtaccgcttttagtatctatcattgtacaaatctggaatccaggatatcaatttaaaataagttcgctagttgcgggaacactaggtcttgggattaactatggatgttacatatcggaagttattcgttcatcaatattatcaatagatggagggcaaacagaagcagcattagcattaggacttacaagtaatcaaactatgtttagaataataataccgcaggcacttcgaaatgtaatacctgtttttggaaattaccttgtaatgatgttaaaagatacatcacttcttgcatatgtctcggttagtgaactattattacgtactcaaagttatgcgtctcagtcatttttaactattgaatcatatacaattttagcaggattttatttaatattaagtttgccactttcacaactagtaaaattagtagaaaagaagatgttgaaatttaactagtggggtatatggtgaacaattatttaggtgtcacctggtaaattattttctattataaacgtttatgtaaaaactgtaactaagaatcaaggtatttacccatattaaaagagcatatgaaaaattgttagtagaaggttgagcaaattctgattatatcaataaatattgagagtaagaagaatttgatcaaccttctttttaatatgaaaaaattatcataatattatatctttttttatgaggagatattattataaaaatataataaataaagatgacattttaaataattagaggggcaagggtgaagtttatgtcaatttcggtaaaagatatacttaaattagattccttaagaaaaattaatcttgttggtggagaaggtggcttagaaaaaagcatagagtggatatatgtggcggaatgttttgagaatccattggagggaattaaatggctgcaaggtggagaaatcatatttataaccggcgttggaattagagaaaatgaggggctattactagattttattaaaggaattagtgagaaaaatggttcgggcttagtagtaaatataggtccatacataaggaatgtatctgaagaggcgattaaactagctaatgaacttgaaatcccattgttcacattaccttgggaagttaaattggttgaagtctcaagggaaattagtaatgctattattctatctcgtattgaggaaaattctttatcgcattttttgagtaatattctatttggagatggtgaattagaaggagatgcaatacaaaaggctgcatattttggatataatctgtcaggcggatgttgcatatgtgttatagatattgatggtttcgagagatatttaaagttaaagaatttaggtgatgagaaaagtatatctaagattaaaataaactttaggaaaatagttcaagatgtacttgataaacatgcactaaaggtaccaataatagataaggatgatgctgtaatcttttttattaggtcagaagaaaattgcatgaatagattggataaggcgttaaaagagatacagttagctacaaagaatcgcatggatggaatgtctgtaagtgtaggaataggaaactcgtacaaggatttaaaaatgatgaaacaatcattaaatgaagcggagctagcgataaatagtgctaaatgccaaggtttagatggcacaattacaagatacaaagatataaggatttacagcatacttttcagcgttgagaataggagtatattagaaaattatttctcagaagttctaggtccaattagtagttctgatagtaaagataacaatttagttgaaatattggagatgtatctaaatgagaattgtaatatcacagttacagcagaaaagctatttcttcatagaaacacccttaaatataaaattaaaaaaatagaagaactattaaattgtgatttacggaattttaatgattgtattaaagtaaagattgcactagacattggtaaaattcttaaataggaagataaataatatagtcaatgtgcactaatacattaattttgatcatgtattaatctaagttttaatatgtttatgtgtatttgatgttgggactttagtcaaaatagacaaaaacattataatgcttggacatagaaaagaaaaatagaaagtattattatataaacaagttaagaaatttaaataaattttataggcaatggagtctttcgtgtaaataaacatgatggctccttttttatggaattagaaatatattaagaaaataaacgttaatggagggttttataatgatagaagaatcaaatgtaaaattagtaacatcaataccaggtcctaaatcaatagagatattagaggaaagaaaaaaatatgttgccgatggagtttcagtatcaactggtattgctatagctgaagcaaaaggagcattaattaaagatgtagatggaaatgtatttttagattttgcagcaggaattggtgttcaaaatgttggacattgtgatcctgagattgttgaagagataaagaaacaaacagaattatttattcacccaagctataatgtagtaacatatgaatcttacggtgctttggcaaaaaaattaactgaaataacagttggagattacgaaaagaaagtaatgtttgctaatagtggagcagaggcagtagaaaatgctataaaaatagcaaggacttatactaagaaaacaggagtactttcagctactgggtctttccatggtcgtacaaatatgactatgtcaataacaagtaaatataaaccatacaaaaatggttttggaccatttgcaccagaaacatataaatttgatttcccttattcgtatagagcaccacttggagtttcagaagaagaatatgcagatgaatgtattaatagactaaaaactatgcttaaaacaacactttctccagacatgattgcatgtttaataattgagccgttacaaggtgaaggtggatttgtagttccatctgcaaaatacatgagagaattgcaaaaagtttgtaatgagaacaatatagtatttatagttgatgagatacaagcaggatttgcaagaacaggaaaaatgtttgcacatgagcattatggtatagaaccagatattatcactatgtcaaaatcaatagctgctggagtaccgctaagcgcagttgtggctaaaaaggaaataatggattcagcatgtgttggtggaattggcggaacatattctggaagtcctcttggatgcgtagcagcgcttaaagttattgagaagattgaaaaagaaaatctatgtgaaaaatcattaaaacttggcggatatattatggaaagactaaatgagatgaaggaaaagtatacagttataggtgatgtaagaggcttaggtgcaatggtaggattagaatttgtaaaagatagaagcacaaaagtgccagcagcagatttagttaaatctataattaaaaaatgttatgaaaatggtgttatattcttaaatgcaggtatacttggaaatgtaattcgtttcctaccaccactagttatgacagatgaacaagttaaatatggaattgatgtattggaagaatcaataaaagagtgtatataaataatattcaaatattttggaaagtaattttatatatggcatgtaaaaaagtttgacaataaaatatccaagtagtaatattagattaaagcaaagaagctcacacagtgggattctttgcttattttttgtataaaagaaaatttttttacaataataatattaatttagattgtttttacagaataggtttttgagtgtgagcatatggaggggaacatggtagaaacggtagtatctttaggattagcggttgatgaaaagttagtaatcaaaaaaaatagacttacgtcagtaaatattaatgaaaaggctaaaagaatatgtattataacaggtcttcatggagatgaacttgaaggtcaatatgtatgttataaattaataagaaaaattaaagaaaatattaaatacttaaatggaattgttgatatatacccatctttaaatccgcttggaatagattcagtacataggggaatgccaacatttgatttagatatgaatagaatatttccaggatctgaaagcggagcaatggcagaacatgttgcagctaaaattattgaagatatagaaggggctgatatatgcatagacctgcatgcaagcaatatatttttgagagaagtgcctcaagttagagtgagtgagcatataaaggagaaattagtaccttatgcaaagctgttgaatatggattttatatgggttcatccagagtctactgttctggaatcaacacttacatatagcttaaataataaaaatataccaacattgcttgtagagatgggggttggaatgagaattacacaagaatatggggatcaattagtggaaggtatatttaatttaatgaaaaaattggacatatggaatgggacagtaaatcctgtaagagaccccataatatcaactgaaaaagaagtgaattttataaatgctaattcatcaggaatatttatgccttgtgtaaaacatttggatgaaataaaaagagaagaaaaaattggagagatttttaattccttaactggagagatagaagaagaggttatttcatcttgtgatggagtagtatttacattgagagaatacccagttgtttatgaaggatcacttattgcgagggtacttggaggtgtaaaatgataaaagaaataatatatacattaaagtcacctcatagagatgatatgagaataacaggatataaatttggaaaaggtggaaagtcagcatgcatagtaggtgcaataaggggaaatgagatacagcaattatatacgtgttctcaattgattaaaactttaactaagttagagcaaaggggagcaatctcaagacatagcgaaatccttgtgattccttgtgtaaatcctcattcaatgaatataggaaaaagattttggacaatggacaacactgatataaatagaatgttcccaggagaagtgaatggggaaacaactcagagaattgcaagtggtgtttttgaacaagttaaggattatacgtatggaatacagtttgctagtttttatatgccaggagattttattccgcatataaggatgatggaaacaggatatcagagtccaagtcttgcaaatttatttggacttcagtatgtattaattcgtaagccgaaaccttatgataccatgacattaaactacaattggcagatgtggaatgcaagtgccttctctttatatacaaatgcaacagatcaaattgatgaagtttctgccaaacatgcagtagtggctgtattaagatttttaactagaatgggagttataaagtatactagtcacagtggatacatagctagtgttttgcaggaagatgatttgctttcggtaaagactactacaggtggaatatatagaaggttaaaaaatccaggagatggagtggaaagaggcgatgttcttgcagaaataattcatccatatgaaggtgaaattattgaaaaaattacatctcctactgatggaataatcttttttgctcataaatcaccaatggtcatggaaaatgtggttgcatataaaataataagaagacttcatgagtaaaatttacataactattatgaatattagcttttgataattgaaagttatattcatggtggttatttttttgtcataaattttaaatgatattttgattaatgtaataataagtattacataattattataaagtattaagaagtatatgttttcaggaagaatatatttaaaaatagtattaacttttattgacatatgatcatataattgatactataaatatactaattatataggaattgtaggaattataggaggtaacaatggatagtacatttttttcgaaatttataatgataacaagctataaaccaataatatttatagcaattttaataggtctattctatggactttataagttagaaaaggctggattaaacttttcaaaacgtatgattatttcaactgtggtaggattattacttggagttataatacaatttatagcaggatttccgagtaatacaggagatgttgtttggataggtgaggttacaaaatggtatgggctagtaggaaatggattcatggacctattaaaaatgttagtagtaccattagtttttctttcaatgttaaaagttataataaacatggatgaaaaacaaagtttaggaaaacttacttctagatcaatatttgttttattaggaactacagctattgcttcaatagttgctataataatcgggaatttatttagacttggcgttggagttgaagcaatccaaagtaaagctgaattaaaagaaataacatcttttgtagatactatgagaggacttttaccagcaaatccaataaaagcaatggcagatgcaaacatagtggctgttgttatatttgcagcatttcttggaatagctataagaaaactaaataagactaacaaagatattataaaaccagcaatagatgttatagaggcattctataacataatgactactgtagctagaacagttatcagatttatgccatatgctgtattaccactactttcaaatacagttgcatcaaatggaatatcagcaataataaatgtggttaatttcatagttgctttatatgtaagtgttattattgtatttgtaattcatcttgtaataatttcacttaatggcttaaatcctattcaatatttaagaaatgtaattgagccgttagttttggcttttacatctagatcaagtcttggaactttaccagttactattgagactttgaataaaaaagtcggagttgaaaaaggaattgcaagctttgcaggaagccttggagctaatatgggaatgaatggctgtgctgctatatatccagcattaatggctgttacaattgcaaatatgtctggaactccaatggattttagcttctacgctatgctggtaattactataattataagttcctttggaatagctggattaccaggaacagcaataatgtcagtatcagtagtaatatcaggaatgggaatgggaagtttcttccctcttgcaggaggaatacttgcaatagatccgatattagatatggcgagaacagcgcttaatgttgatggatcaatggttacagcagtaacagttgctaagagctttaatgaattggataaagatgtatttaataatgttcaagataaagttatagcagaaggaaattaaaaaaatagaattaagatattaaagaccattaggtgagaatataaatcacctaatggtctttttgaattgagagtgtactaaaaaaattattgacaaaactgttcatactgtatatattgtatatatacagtatgaacacaaaggaggcgaagtagtaatttgaaaatattactttctaataaatctgatttgcctatttatgagcaaattaaagctcaaataaaagaacaaatcctgtcaggcgaaattttagaaaatgagtttttgccatcaataagacagctggcgaaggacttagggataagtgttattaccacaaccagagcttattctgaccttgaaagtgaagggtttatagcaactcttagaggaaagggaagttatgtacttcctaaggatagcgaaatggtaagggaacaatatttaaagaaaatagaagaagccctcatggttgctattgaaaatgggaaactagcaaatatatctaatgatgaattggtggttatgctaaaaacattggcagatgagcaaattacataaagtgaaacttttcagatggagttttatactcaagctgaatttaattgaacttatccagtagcatgtagccgttataagggagtgttacggatgctagctatcggatagaatatgtggaagtttaattattacaatacacgttattattaagaatatgattttaaggagtagggaaatatgaatgcacttgaaataaagaacttaaataaaacatttgatggctttgaacttaaaaatataaatttggaattgccaaaaggttatatattaggatatgtgggacaaaatggtgctgggaaaacaacgactataaaacttataatgaatcaattgaaaaaagatagtggagtaataaaagtatttggcaagagttatgaggatggagaagaagtttataaggacatgataggatttatcggagatgaatgctactttccaataaattttacattaaaagatgtaattaatacactcaaagatttttatacttcatttgatgaaagcaaatttaatgaatatgctggaaaatggaaccttccttataagaaaaaaataaaagaattttcaaagggaatgaaagttaaattatcttttgcaagtattttatcaagaaatacaaaacttcttctattagatgaaccaacaagtggccttgatccagtagttagaaatgaagttttagagatattacaggaatatatagcagatggagaaaaaagtgttctattttcaacccatataacaagtgatcttgaaaagataacagattatctattctttattaataatggagaaaaggtattttatgatataacagagaatgtactagaaaatcatctattggttaaaggtggtcttgatgatttaacagaagaattaaaagagaagttaattggatataagtcttctaattttggatttgaaggattaattgattcaaagaatagagagtatataagtaaagatttgttagtagaaaaaccatcgatggatgacattgtgatattttatatcaatggaaaaagggatcagtaataaaatattctatgcatatacgttgcaagaataattctctatcataattctaaaaatattgcaagaattttaactggaattgtgaattgtgacatatatattatgttttagtattaattctatgtagaatttataaagagaaagaggttctaaaatatgagtagatcaataagttatttaaaatttgatttaagattaataaaagaaagtattaagctttatgtgttagctccagcaatattttgtgctttatttatgttttcaggagaaacatacactatggcattatcatatttatttttctttttaataattttagcaacagtaccatttagtactcaaggtaatgaaaaaagtactcaaatgtattatatgtttcctggtaaaatttctgatatggttcttggtagatttttatatttaataggtgtagctttgtttatatttctcattaatacatctattgtgacttatctatatcagattagtagagttcaaaactttgaagttctaacaatgttcttttgcgggttaatgagcttaataacttgttttattcaatatcctatatattataagtttgggatggaaaaaggaaaagcaatatcaatattagtatatctgttacctgcatttttcatatttgcgttaccatcatttttggtcaataaggatggttttatattagagaattctttagattttattataaataataagttaatattaataattatcagcatgttagtcacaataattataggatatatttcatataaaatttcatataaaatttgtaaagcaaaagaaatatagtgtgtaaagatatttgttaaaaaatatttagaaatattaagtataaattaaggtaaatttaatatttttttctatcatttattaatgaaaaatatgtataatagaaatatgatgaaaagtaaattattaacatacattgtatttttatcatcaagtgaaactttattcaggtggggggtgatccccatctgaatcttagttgaacttatccaggagcgtgcagccgttatctcaggcttaaagaagtgggagttttacggatgctagctatcggataaatatgagtatttacagggggaaagaaaaatgaaaatgaaaaaaactttggcattcattatgacagcagcgttaactgttggaacaatggctggatgtagccaagcaacacttaattatgcacaggaactttcaaatacggctaaatgggaagcaacaacatcaagcattgatggagacttaaatatcaatgtaaaaggaaaagatgggactgaaacaaaacaagaaataaaatttgcagctactggatatacagcaaaagataaatcatatgttgatatgacatttactgatccagcaggaaaacttaatattccagaacttaaagcatattcagatggaactacaagttatataaataagagcttttaccaagggatatcttctttaactggacaaagcgctccaacaggtttaaataatataactcaagagtatataggaattgatactcaagcatcaggtgttgatacaacaaaattaaaagcactaatgactcaaccagatggaatggttgaattcggaaagatgatatttggaggaaatgctgatcttgatttacctttcgttcaaaatggaagagaatatacaataaatcttgatgcagataaaactgtagatttagccgcaaaagcattaaaagcaacagctaataatttagataatcttaatagtacatttaagttaggattgccagctgaaagtattacacagatgaaaactgctgctaacagcacagaatttgataaatcattacctgaaattaaggcatcattatctggaacaactattaattcaaaagaagtgttcacagataatgattatagctcagatttcaatatgaatttacaaattaaagattttggaactattgcattaactatgaaaacaacagatactaagagtgatgtaaaagggataactttcccaactagcacattaaaagtttctcaagaagagtttaacaaattaatgattccagcaacaaacacaactatagcatcatctacaaatgtagtatcaaaataatattttaaaataaaagcagtataaaaaagaaccacttcctatcaagcagataaggagtggttctttttttgaatatatttttagaattaaagtaaatttttgtatgaacatattgttttgaacaatgaaagatgttaagataattttgttcaaaatatgaactggatggaggggaaaaatgagtaaagtaagaacagcagtaattttagcagctggaatgggatcaagattgcaggatataacaaaggatatgttaccaaaaggatttataaaggtaaatgggaaaagcttgatagaaagatctattgagaaattacgaagtctaggcatagataagatttatatagtaacaggacatttgcatgaattttatgatgaactagcaaaagataaaaattatatagaaacaagaaaaaatagaaaatataaagctactggcagcatgacctcactatcaattcttgaaaatgaattaaaagaagactttttgttacttgaaagtgatttaatatatgaggtttatgcactaataaagactataaattttgaagaaaatgattgtattttactaagtggaaaaacagattccggagatgaatgctttgtagaagttagagataataacttatataaaatatctaaaagaagagaagaaataggacatgtatatggggaattggttgggatttctaaaatatcattagcgttgtataaggaaatgttgaagcaatataaagaatttaatagaaaaatatatgattatgatagtatttttgaagataagtgcgaggtgacaaagaaatacgattatgaggatgcaatatttgattctgctaaaaaaagaaaagtaggatatctaaagattgaaaatttagtatggggagaaatagatgataaaaatcatcttgaaagaataaagaaatcaatcataccaaagctagaaaaaatttcagaagagagagcagtatagaggaaaatgtttggatgtgttctaggttaatagattttttatagttaagttttaacatctagaaatatgcatataaaaatgcagaaaataggagagtgtgaaagaatatgaaaacagtttatgttgctatgagtgctgatataattcatcaaggacatttaaacgtactaaatgaagcaagaaaatttggagatataatagtgggattgcatacagatgaggttataagaggttactggagaaatccaataatgaaatatgatgagagaaaagaagtgattagtaatattaaaggcgttatatctgtagttcctcaagaaagcttagatcaagttccaaaccttcttaaaattagacctaactatgttcttcacggggatgattggaaggaaggcttgcaaaaagaattaagagaaaaagttatagaggtgttaaaacaatgggaaggagaacttatagaagttccatatactaaaggtgtttctatttcaaaattagatgaagaattagctcagataggcataacacctcaaaagaggatgaaaagtctaaaagaattaatttattcaaaaaaaccactaagaatacttgaggctcataatggtttaacgggacttattgttgaaaagactaaagttcaaaaggatgggaaaataaaagagtttgatggaatgtggattagttcattatgtgattcaacagctaagggaaaacctgatatagaattggtagatttaacatcaagattaaatacaattaatgatattttagaggtaacaacaaaacctataatagttgatggtgatacaggaggacaaattgaacatttcgtctatacggttaagactttagagagattaggcgtttcagctattatcattgaagataaaactggtcttaagaaaaattcattatttggaacagaggtgcagcaaacgcaagatacaatagaacatttctgtgacaaaataagggctgggagagaggcgagagtaactagtgattttatgataatttcaagaattgaaagtttaattgcaggcgctggaatggatgatgctataaaaagggctaaagcttatattgaagcaggaacagatggaatcatgattcatagtaaagagaaagatggaagagaaatcattgaattctgtagaagatacaatgagtttgaaaaaagagtacctttagtagtagtcccaacttcatataattttatgaaagaggaagagttaatggaattaggagttaacgttattatttatgcaaatcacctgataagaagtgcatatccagcaatggtaaatacagctaaaagcattttagagaatgaaaggtcaaaagaggcttcaatcaactgtatgcctataaaagaaatacttactttgattccaggaggaatgtaaagaaattaattaaacaactgaaattataaatatttgagcgcttgttccatttgcttactattaaaatattatatttggagtatgcctaaaatatagttttcataagcgtaatattaaaggagttaaaaagaatgattgaagtaaaagagttttataatgagctattaaataacaatatagatttctttacgggtgttccagattctttactaaagtctttttgtgcatacattaaggaaaatgtaagtagcgaaaagaatataatttcagctaatgaggggaatgcaataggaatagcggcgggatatcacttagcaacaaagaaaattggcctagtatacatgcaaaactcaggtcttggaaatgcattaaatccacttgcatcacttacagataaattggtttatagtataccagtgcttttaatagttggatggagaggtgagcccaataagaaagatgaacctcaacataagaaacaaggacttgttacaatagaaacattagacattctaagcattaaatatgatattttagataataatacaagcaatgatgaaatgaggaaaaagataaggaaagcaaataattatatgaaggagaataacgagccctatgcattggtagtgaaaaaagatacttttgatgaatatcaaataaagtatgatgagactttgaaattagaaatgactagggaagatgctatagaaatattaatatctaaagcgaaagaaaaatcagttgtagtatcgacaactggaatggcttctcgtgagctttttgaattgagagaaagatataatggagatcatagtaaggattttttaacagtaggatctatgggacatgcatctcaaatagcattggggattgcattaagcagaaaagacagagatgtttattgtattgacggagatggtgctttaataatgcatcttggtggtttagctataataggaaatcaaaatacagataaccttaagcatattttgataaacaatggagctcatgattcagtaggaggtcaggaaaccgtaggatttaaaatagatactttagcaattgctaaagcttgtggatataagaaattctattcgtgtagttcaagagatgaattactcaggttatcagaaaaaataagaaatgaaaaaggtcctatatttttagagataaaagtaaaaaaaggttcaagaaaaaatttgggaagacctacaacaacaccaattgaaaataaagaaatgtttatgaaatttttagagaattaatatacatgtaacaaaaataattcttcattacaattttaaaaatatttcaagaattttagaattgtgaattatgaaacgtgcattgtgaattgcaacatatatatgttataaaaatttcagttcattgaagcctgttttaaataattataaatgcaaacaggatactttgaatgaattatattatttagaatttatgtataaaagaaaatagacaggcggctgagatgttgcttttgataaaactgtataggaggaaattaatttggaaatcagaagaaatatattattaaatccaggaccagctaccacatcggatacagtaaaattcgctcagattgtaccagatatttgccctagagaaaaagaatttgggagcattatggagtttgtatcaagagaacttactgaattagtaggttcaaatgaaaagtatacaactatattatttggaggatcgggaactgcagcagttgaggcgattttaagttcggtagttgataataaaataatattgataattaataatggggcttatggcaagagaatgtgtgaaattgcagaaatatataatttgaattatatagaatttaaaagctctcaaatagaaacaataaacttaaaagagttggaagaagtaattaaaaagaataatgaagaaagcaaaataaataattgtggagctataagccatttagcggtagttcatcatgagactacaacagggatattaaatgacatagaattattaggtgaaatttgtaagaaatatagtattgagatgatagtagatgctatgagttcatttgcaggtattcctatagatatgtataagatgaatataaaatatttagcatcgagttcaaataaatgtatacaaggtatggctggaataagctttgtagtagcagataagaaggctttgaataatactcaaaatataaaacctagaaacctctaccttaatatatacaaacaatattcatattttaaagataattatcaaatgagatttacgccgccagttcaaatactttatgcattaaagcaggcgataatagaggctaagggtgagacaatagagaagagatataagagatataaagagtgttgtgaaattttatgggatggactagataaactcaatttaaatagactaatagataaaaacatatcatcaatgcttttgacttcagtaattgagccacagataaaaaattataaattcgatagattacatgattacttatatagcaggggatttactatatatccaggaaagatatcttcagaaaacacatttagaatagctaatataggtgatatatatcaagatgatatgaggagatttgtaaaaatattagaagagtattttacaggtattatataataatacctgtattagcctaatcttcataactaaaaaatcttttaaatattagtgttaatagaagaactataaccgatattaaggcaatagtaccaccaggtgcactatttatataataagaagatataagtcctatcataacatccacaaaaccaaaaataatagcaaaaattagggtcgtagtgaaccctttttttaattgcatagctgttgcaactggaaccactatgattgatgaaacaacaaggatacccataactcttatagaaagagaaattgttgcaccaacaagcagcgtaaaaatataattaacgagtttaacgtttattccagatgtttttgctccattttcatcaaaagttacatatattaatttgttgtatagaaatagaagacatataaggcatattcctccaacaatggcgattaagcagatatcagaatctgttacagttaaaatacttccaaataaaaatgaatctactttagctgaagctttaccactacttattaaaataatagctattcctaaactcaatgtcaaaacaattgacataacaagttctgcatattttttataatacgttcttagaaattctattacaagagcgcaaatgctagtaaatgaaaatgcagttaaaagtgggtcaatccctaaaacaagaccaattgctacgccagcaaaagatgaatgagataatgtatcaccaatcattgaataacgtctaagaacaataaaaagtcctataaaaggacacagcatagaaacaataaagccagcaataaatgcattttgcataaaacctaattgaaacataaattattaccttcctaaatatagtttaactacttaaattatgttgtaaaatgaatcctcagattctaaatatcttttaaaatcttcatttgtatataatttcatagaacaattttctaattttaaaatgtgtgttgaatactttaatgcaaccttagtgttatgttcaacagagataatagtttttcctaaatccttatttaaactttggagtagaggatagatttcattttggctcttttcatctattccagttgatggttcatctaatattattaaatcaggatcacctattaacgctctagcaataaaaattctttgctgttgtccacctgaaaggtttcctatcaacttattgctgaattcactcatgtttacattttttagagaactttgaatggactttgaattcttaattcccactgtcttggcatggcaagacaaaacttccttaactgttattggaaattctgcattaaaattatcaagtctttgcgaaacgtatgaaattttattagaatctaaacttatacaaccgctatcaggttttagaagacctaatataagttttactagtgtactcttacagcttccgttttcaccaagtatagatagataaattccagtaggtatattaagattaatattttttaataaatctgttccttttgtataggaaaatgatagattttttatagtaatcaaataatcaactccttaaagcattattatattatacactcaaatgcaaataatttgcaatagaatatatttttatattatgattaatatccaatacaataactattttatactacagtactataaaaatttgtcatagaaagccgcctttgattatgaaaatatattctaatcatatgattttatatactatgatagaagggacttttgcattgaaatatgtcttaaattagtatagaattaaatggaaatcgtagtagaaaaacaagaaataggagggacaaatgaaaaaaaagcttatatatatgttattccctattattacagctgtagtaaccgttatgttacttaatatttttttggataaagaaataggagctatgttaaaaagcaaggatttaactgaaataaatatagagtatgggagcagctataaagatagaggactcgtatataatgaatttgttacaaataataactatcaaatattagaggggtcatcagagttaggggcaccagtctcacaattagctacaacctttttccctgtagaaggaatggatacaatcgtaactaatggtagagcatattgccaggacttgactcagatatctaatttaggaagccagaatacccagaggaaaccaaatgttgcatttataatttcacttcagtggtttatgagtgatcatggtgttgacgggacagactttcaagctaattttgcaccagtgcaattttataaatttttatcaaataaggaaataagtgaagaacataaaaagacatatacagctagagtggataagcttttatcaggaagctcacaatatataccagaaaagctttatgcaaaactttatacaaacgataatttaatatctaaagtatcaagtgttatatttaagccatattttgttgcaagggaaaatattgttgaacttaaagacaaaggtctattatatagaaggttaaagaaactacctgaaaaatcagaaaaacagctaagaacagttgattggaatgaagagcataagaaggccgaggaagaagcaaagaaacaagtaactaataatgagttctacgtatatgacacatattatgacaagaatttaaaaaataatttacaatctcaaaaagatataaataaaaatgttgatttaatgaattcaaaagaatttgatgactatgaattatatttagacacttgtgttgatcttggtataaagccatatataattttagcaccaactaatggaagatggtatgattacactggaatgactaagcaaagtagagatgagtttttcgataaagtggaagaaatggctaaagaaagaggatttgaagttttgaacttaaaagatcaagaatatacgccttattttatgtgtgatgtaatgcatctaggatggaaaggatggcttgaaattgatgagcaactttataaacgaaataaagaaaaatagagctttaggatttgcattagtaagttcaattgtagttattttagcaattctagtattaacatttgaaccatttgctgaaataccatttgtatataatcaattttaagggagatataaataatgaagattttagaaggcataaaaaaatactcaaatagtaatagaatcgcattaaaatgtgatggaaatattatgacatatgcagaattagatacaatatcagaatgcatagcagcttttttattaagggaatttaaagatgatagaacgcctattattatatatggtaataaggaaaatttaatgatggcagttatgatggcttctttaaagtcaggaagagcttatataccaatagatattagctatccaaaagagagagtggaggcaattatcagtgaggttcatccaaaggttcttattgattttagtaaagaaagcaatttcgaaagtataaggatcttaaaagataaagatattgaagaaatagtaaaagaatataaagatgttaaagtagaaaaagaaaattgggtaaaagaagatgaaaatgcatacatattattcacttctggaagtactggaaagccaaaaggtgttcaaataagcagtaacaatttagataattttgttgagtggattgcagaatatttaaatttagatgaaaaagaagaagtattcatgaatcaggctgcatactcttttgatttatctgtaacatcaatttacccaggattatgttatgggaaaacattacatggtttttcaaaagaaacactttcaaacttaaagaatatgtttgatgacataagaaaatctgatattaatatatgggtatcaactccttcatttgcaggaatgtgtgttgcagaaaaagattttgattctacaatgcttcagaatttaaaagcgatgatatttgtaggagaggtattaccaaagccattatgcgaggaacttataaatagattcccgggaacaagagtggtaaatggatatggtccaacagaggcaactgtagcagtttcggctaatgatatgagcaaagaattattgttagaagaaggaagcttgcctattggatatccaatgaaaacatcagttgtaaagattgttgatgatgaaggcaacgtgttaggtgatggagaaaaaggagaaatagtaattgtaggtcctagtgtaagcaaaggatactttaataatgaacaagttactgcaaaagcatttttctatgatgattataatggatctaaatgtagagcatatagaacaggtgatttaggttattatgtaaatggaaatttatattattgtggaagaaaggatttccaaataaagcttaatggttttagaatagaaatagaagatatagaaaataacttagttaaagttagtaatataaaaaatgcagctgttgttccaatagagaaagatggaaaaattgcatatttaactgcgtttattgagttaaaagaagataatggcttaagtggattaaaaaatggaataatgataaagaaagagttggccaatttgattccttcatacatggtacctagaaatataaaaattgttaagcaatttccgactaatgtaaatggaaagattgataggaaaaaactattggaggaagtataatgaagttgacacaatacggagattacttttacttatatatcttgctactaacatttattcctgccatagttttagggctaaatgggattaaatcaaaatattatggaataatcgcttcggctttaatgatatatttgattatgggaaaaagtttaggattagctttattttcaatgtttttagttggcgaaatttttgttatatacttatatttgtttgttagaaaaaaaacagataacaaatatttatattggttattcttatttgcatcaataattccgcttatattaactaaagtagcaggggttacacattatgcttcatatattgggtttattggtttatcatatctaaactttaaggcaatacaggtagtaatagaaatttatgatggtagaataactcaaataaattttatgacatttattcattttataacattttttccgaccctaagttctggacctatagacagatggaaaagatttgaggatgatttaaatagaaaagtagaaaagaatatatatttagaagaatatttaattccaggtctgaaaaagatatttattgcaattgcttataaatttatactagcatatttaattgatacatattggttgttaaaaataccttcaggtattacactattaaatagtgtaaattatatgtatgcttacacgatgtatttattctttgattttgcgggatacagcttatttgcggttggatcaagttatatctttggaattaaaacaccagataactttaataaacctttcttaagtaaggatatgaaagaattttggacacgatggcatatatctttatcacgatggtttggagattatattttctcaagatttgtgttaaattctatgagaaaaaagaggtttaagaataggtttatcgcttcccacgtggctcaaattatcactatgtttataatgggattatggcatggactaactgcatactatataatttatggattatatcaaggaattgcattagttctaactgatatttatcagaggaaatcaagtttttataagaaacataaaaaagagaaatggtttaattatgctcaggttttaataacatttcacatagtatgttttggtatgctgatattttcaggatatttatttaaatagaaataatcaagctaagaaattaaaaaaattagtactataagaaggagtatactattatgaaagacaaagttttagaaatatttactgaagttacaggaaatgatgaaatagcagaagattttgatttagatctttttgaagctggattactagattctctagcaataattgaagttttaattcaaatagaagaaaagctaggaatcaaattacaacctacagatttagaaagagaagatatgtcaactgttaataagttggctgcgttcttagaaactagataaaatctatgatatctaaatgtgaactcgcatttaggcacaatcaaaaaaataataaaccagtatgcttgccgaaatgaataatatacttttgttccggtttctaggtaattctgatgggggattctaaggctataaagttgcacccaaagtgctagcctcaaagaacaagctttgaactagcacgtttggaacaacttatagccaaagaatcacatccatcaaaattaccaatgaaacattccacaaaagtatattactcatctctgattgtgttatctatatagatatccaatttaagaattcaacttattagatgaatgtatttacaaatttgctaaaactttaagttcatatcttcactagaaatcataaatatatttgtgaagaaaacatttgaaaatgagctgttaaaggttcttagctgtaggttgttccattttagcttgtcaaactgaaagttggagcgtgctaaggtggctacaacctgctgcttagaaccttcagcgatattttcatagcttttcggaatcaaaatatttatgatttcggtaagttatcacataaatgtagttttaaatttggatatctatatacaaaaaaagaatcagatttatgatatgaaattctagatactagaaaaagggttaatcttttgtgcagtgttgcattgagaataaggctgtaggatttcttcattggaaattgttccactttttgcttgtcctgtgcttgccacaggagcatgcagaaatgggtgcaacttctaatgttagaaatccacagccctattctccagcataccgaaataaaagattaacccttatttcggctagtttattgcataagtatgaatttatttattcgtcaaatattttttctaagcaccagcttttcttatcatcctttttaaagcttcctttaactgaaatggttttatggggagcagccttagaaagtccagatgcttcaacaacagcagtttcaccatcattatatagcagtgacattttttgaactctaaggagtttgttttctgatgagaagccagaagtaaagctatgttctacagaaaatccgaggtccttggaattgtttgatatataaatatcacgagtcataaagaatgaagctataattattattccgaaagaaatagttaaagataacatgagtcttcttttattttttagagtaatatttttctggagtcttcgtcttcttctttttttataaacaaagtactcttcttgaatctgtgcgctattcagcatactgtatacctcctttatttttgatgtacctaaagtatagtttgaagaaattaataaataagattaaattcacagtatatgagtgaacataagaaaatattaccatataattccatataataaaaacaaaagcgtatgacaaagttaaggaaaaaatattattatctgagtggattctgaatatagtcttatatttggaaaaaagtttaccaggttttatttttatggttataaaatgtcttttttgatataattttatatgagaaattaactatatatgttttaaattaagtctatactttattgaactatggctaaaaatagtaatgtaggagatttcataaaacttatatatgttttgatttactaatataaaaataattattataaaaataacaggatggtggaactatggatttttcaagtttagtattaatagaaaaagataaagaaacaggatttataaagaaagagctaggaagttttgaagtaaatgaaggagcattgtttgtaaaaaaactttatgtgttggatgatattgtatatatgtatttcgatacaaataaaaatgtagaagaatgggaatactcagcaatatatgatttatttaataataaagcatttactgaaaaaggatatgaaattgaagaggatttagaagaatacaatcctacatatataataaaatttaattatgtggatgactatgatgtaatgaaagggaagatacaagaagtggtatctataatagataatgagatgaatgcagtatttgaagctattaaaggaaaagaatctgaatatactgaatagataaaagatattttatagtcatttgtgtgcatttcgaaagcatattcttaagaatatatatggtaatattcttgagataaataaggtttagaattttactaaaatttttgtaaagaaaggtgtatttatatgagtgatttaaagaaaagagaagaaatagaagataagtttaaatggaaggttgataagatttataaaagcatagaggattgggaaaaggactttgaagatgtaaaaaatgaagcggttaaattaaaagatttttcaggaaaacttgtgaatggagaagcaatactagattatttaaaattcaatgaaaaagtatctaggaaggcagaaaacttatttatttatgctcatttaaagtgtgatgaagatacttcaaataccacttatcaaagtttaatgagtaaagttgatatatatatggcagagcttgcaagttacacagcattctttgtaccggaaattttaagtttagatgatagctttattaaaagcgaaataaacagattagatggattaaaacaatttgaattcttaatcgaagatatattaaaagaaaagccacacatattatctaaagagatggaagaattgttagcagcggcatcagattgtttggatgctccttcagcaatacacaatatattaactaatgcagatatgacatttggaaaaatagaagatgaagatggtaatgaagttgaattaacagaaggaaactattcttcattcataagaggtaaaaatagagaggtaagaaaagcagcatttgaaagattatttggggaatatgataagttgaaaaatactctagcaacgtctctaagtgcatcaataaaaactttcaattttagcagcagagttagaaaatataataatgcattggaagcatcattgaaacctaataatattcctttagaagtttacaaaaatgcaattaaagtaataaataataatttagattcacttcatagatacgtgaaaattaagaagaaactattaggattagatgaaattcatatgtatgatttatatgttccagtcattgaaattccaaaggaaagaattgagtttaatgatggagtaaatatagtattgaaagcattaaatcctttaggaacagagtatttagatatctttaaaagtggagttaatgatggttggatagatatatatgaaaacaaaggaaaaagaggaggagcatattcttggggtggatatgataccatgccttatgttttgttaaattataataatgagctaggagatgtttcaactttagcacatgaaatggggcattcaattcattcatattattcaagaaaagagcagccatattattatgcaaattacacattattctgcgcagaagtcgcatcaacaacaaatgaatcattacttattcactatctaattgaaaatgaaaaggatgaaaagaaaaaattatatttaataaatcaagaattggaacaaataagaacaactgtatttagacaactgatgtttgcagaatttgagttatatacacatgagactctagaaaaaggaataccattaacagcagaagattacaataaggcttggcatgatctaaatgttaagtactttggaaatgaaattgttatagataaagaagtagatgtcgaatggtcaagaattcctcatttttattcagacttttacgtttatcaatatgctacaggttacgcagcagcatcagctttttctaaggctatcttagatggtaaagaaaatgcagtagaaaaatataaaggattcttaaaatctggtggaagtgattatccaataaatattttaagaaatgcaggagtagatatgacaacagatgcaccaatagaagctacaataaagagatttaatgagcttttagatatgatagataattagggtttacaaggtaattcagaaacccaagatgtatttcaataaggcatatgaaagaaaataacgagtcacaaatgccatgattatttttcattaggagaagaagcagattggactcatagcgagtctattactgcaatctgctgatgaagtataatggaaaatgggcacttatgaaaagagtagctatgctgcaacaaggaacttttcttggcagatagacttgttatttttttgattatgcctaatatatatatgttgcaattcacaatgcacatttcacaattacggctaaaattcttgcaatagttttagaatcatgatgaagaattatttttgcgatatatatagaatgtgaaattcacaattgtgacataaaataaaattgtctataattgtgaatttgcattataaaataataagttatgaatttttatataagaataggtaaggtattatgaataactttaaagaagaattttataaaattttagtaaatgcagagaatttctatatgaaacaatattatagtgattttcataaaagagaaatatttcttgcaattaaagagttatcaaatggaatatactgcgttttgataagcgaggatgaaaatgaaaatatagactttttagaagcttttgaatatataaaaaccttaggaaaagacttttctctaaatatgatagttttatctaaaggcgaatatacaaatgtaaataaaacagttatggtaaataaacttattgtggataaagaaaactatacagttattaagtatgatgaatcatgtcttcccttaaaagaaatacttgaactatatataaataaaagtaaagtgaaaaatattgataataagagagaattttttaggtataaaattccaactatgattttaatattgataaatgtaataatatttataataatgcaaattgatatttataatattaaacattcattaggttcatctcagttgttgtcagaggaaattataaatgcaataaataattcagtactagtgacctttggagctaaatataatgcacttataaataatggagaagtatggcggttattaacttgtgcctttttacattctagcattatacatatagcatttaatatgtattctttatatatagtaggtccacaaattcagcagatttatggggctaaaaagtatctagttatttacatcacttcttgtataacagcatcaatattaagttatctagcaagtccatatactatatcagtaggagcatcaggcggcatatttggtcttttgggagctttgttagcttttgcaattatggaaagacatagattgcagaaaaaatatatatctagcttactacagataatacttataaatttatttataggattaagtgtgaaaaatattgataattatgcacacataggtggacttattggaggagcattgattggatatgtctcttacaaaatattaaataaacagttgaaaaattagataaatttatatatttttattgcttgggaaatatcatgaattgagctagaaaaaatcaaatgtaaaggattttattaaggcaatattaattttatcttaagaaaatagggttgattttttatttttattgaaatattattaaataggtatagtatgatgatagatataaaataataaatgggaatatatctcattaaatattaggagtgaatgtaatgggaaaatacatttttaccataacagcattttttcaaatttttgtttttgcaataacatgttactatttagctttaggacttatagggcttttcagaaagaaagaaaataagaactatgaacctaaaaataaatttgcattgttaatagcagcacataatgaagaagttgttattggtagtctcatagagagtatgctaaaactagattatcctaaggaaatgtatgatgttttcgttattgcagataattgtacagatgatacagctaagatatctaaaggttacggggtaaatgtttgtgaaagatttgcaaaagataaaagaggaaaaggttatgcgttagagtggatgtttgcaaagttatttgcaatggaaaaacaatatgatgctattgctatcttcgatgcagataatcttgtacataaagatttcttaaaagagattaattcaaagatgcaggaaggttacaaagttgttcaaggatatatagacagtaagaatccagatgattcatggattgctgctgcttattcaatagctttttggactcaaaatagaatgttccagttagctagagctaatataggattttctaatcaaattggtggaacaggatttgctattgaaactaagacattgaagaagttaggctggggtgccacttgtttgacagaggatttagaattctcatgtaagcttgtactaaatggagaaaaagttggttgggctcatgatgcgattatatatgatgaaaaaccactaaagcttaaacaatcatggactcaaagaaaaagatggatgcaaggttttacagatgttgcttcaagatatttctttaagcttgttaagaagtcaataatggaaagaaagttttatatatttgactgcgcactatatgtattgcagccttttgtaacgttattacttggtatttcagcagttttaactttaatacaggcaaatactacaggcgtaaatatatttattataaattatttgtttagtgatgttggatttaagacatttgcggctattcaatttttgattactccgttaatattaacaattgataaaaaaattacaaaaccattcttagttatgatggtattatattctagtaatgttttcgtagttccttatttaacagctaatatggataattggattattgcttgggtgagtggcttagcttataacttagcattcttgatattaacaggaatattactaggaaagaaagaattaattttattctttagattctggttatatgcgttatatacattaacatggataccaattacaattcaaggtatattaaataagaataataaagagtggagtcatactaagcatgttagaaagatagaaatatgtgatgtgtaatactctaaacaaaagtataaattagaaatcaggatgtcgtaaaatggttaaaagacctttttgacatcctatttttattaggataaggtatatgttttatgaaaatgtcaaataaatatatataagtagtaagtattgttagaaatatatattttaatataaatattaatgagatataataatgaaatattgtttgtttcatgcaatgcaaggaacagagatcttagaagattaaaaaaataagaaatgtcagagcgttttttataaggaggctcgactcacgtttgcttatttagggctcacagagtaagcgaccatcataaaattatagattagagatgtctgcttaagttttttttgacattaaagcagaaaggcagtatattttatagagcgaaataattacgaaaaaataagaactggtgttcagatggaggagttttatggaattaaaaaatactaatgcttatgatgtaacagatttaacatcacttgaaaagctagaacctgtaagaataagaccgggtatgtatataggatctacaggtagtaaggggttacatcactgtatatgggaaataatagataactccatagatgaaatagctaacggatatggtaacaaagtaaccataacgttaaatgaagataaaagtgtaaccgtattggataacggaagaggtatccctacaggaattcatccaatcaaaaagaaatctggagttgaaatggtatttactgaacttcatacaggaggaaagtttgataataaaaattataaaacatctggaggacttcatggagttggagcagcagtagtaaatgccttatcagaatggttagaggttgaagtttaccaaaacgggaatatatacagacaaagatttgaatatgcttttgataaagaattaaaaagagaaatgccaggaacatctgttggcagcttgaaggtgattggaaaaacagataaagttggaacaaagatcacatttaagccggataaagaaatcttctcaactactgattttaaatttgatataatagatagccgattacaggaactggcattccaaaataaagggataagattagaattaatagataaaagaaaaggacaagaaatcactaaagaatattactcagaaaatggtcttttagatttcataaattatctaaatgaaagtaaaacaccaattcatgaagagcccataatttttgacggtgaaagaactgttggggaacttcaattatatggtgaagtatgtattcaatttacagattcaactactgaatatattgcaagttatgtaaataacattccaacaacagaagcagggactcatgaaactggatttaagactggaatgacaagatcttttaaagaatggtctaaaaagttaggattggttaaggaaaaagataaggaatttgaaggcgatgatttaagagaaggtatgactgctattgtaagaattaaaatcacgaatcctatctttgaaggtcaaactaagactaaacttggaaataatgaagcatatactatgatgaatgatttagtgtatactaaattttctgaatggatagaagataataaaactttagcaacaagtataattaataacgcattagaagcagctaaaagaagagacaagattaagaaaataaatgaagcagaaaaaaagaaaataggaaaaggtacagcaccgcttgcaggaaaagttgctgtgtgtacattgaaagataaaactgtgaatgaatttatagttgtggaaggagattcggcaggaggatctgcaaagcaagccagagatagaagatttcaaactatcatgccttcaaagggtaagataatgaatactgaaaaacaaaaacttgaaaatgtattggcttctgaagaattaaaaatatttaacactgctgttggaacaggtactttggataattatagagaagaagatttaaaatatgacaagataataataatgagtgatgctgatgtggatggatatcatattaggacattatggatgacttatatttatagatatatgagaccgcttattgctaatggacatttatatttagcgcagcccccattgtataaagtgtatagggaaactaaaggaaaaactatagttaagtatgcgtatagtgatgacgaacttgaaaatacaaagaaacaagttggaaaaggtgcactgattcaaagatataaaggactaggagaaatgaatcccgatcaattatgggatacaacactaaatccagaaagtagaactctgcttcaagtaaccatagaagatgcggcaaaagcagaaaagatggtttcgttacttatgggagatattgttgaacctagaaagaactatatgtataaatacggagaattttaaatcaattcacaattaacaatttgaacaagttcccatggaacttgaaaaatttatatactttaaaaagttactaactacaggaaaaactttcttatttagaaatagagagttatgaattaaaagaaattccataggaatttcaccattaattgtgaactgtgcattatgcatcaaaaaaggagaagagtatggcaaaaaagaatgaaaatattatacctaaagataataatataattggtattcctctagaagaagcaatgccagagaattatttaccatatgctatagaagttgctaaagatagagcacttcctgatgttagagatggtcttaagcctgtgcatagaagaattttatatggttcatatatgcttaaggcctttccagatagaccttattataaatctgcaagaatagttggagatatcttaggtaagtatcaccctcatggtgattcatctgtatacgaatctatggtaatactagctcaagatttctcaactagggcaccgttaattgaaggtcacgggaactggggatctatcgatggtgatggggctgcagctatgaggtatacagaggctagattatctcctattgcaatggaaatgctaagagatattgaaaaggatacggtagaaatggttccaaactattctgatagtgaaatggaacctaaagtattaccaagtagatatcctaatttacttgtaaatggggcgtttggtatagctgtagggcttgcaaccaatatacctccacataatttgggagaggtaacagaaggagtactggcatatattgataataatgaaataactacttctgaacttatgaaatatataaagggaccagatttacctactggtggaattttgataggagaaaaatccattttatcagcatatgaaactggtgaaggaaaagtagcttatagagcaaagacttcaattgaaaaattagaaaatggaagaatcggaataattataacagaattcccatacagaagaaataagtctaggattctccaaacaatatctgaaatgactggtgataagaggcatgcaaaagcattggaatctataacagatattagagatgaatctgatagaagtggaataagagctgtaattgaattaaagaaaaatgcagatgaagatgttgcagataaagtgctaaagtatctgtttaaaaaaactgatttacaatgtaacataagttttaacatggtagcccttgcaaatggaaagccagaaactatgagtttaaaggctataataagatattatgtagagcaccagaaagaaataataactagaagaacccaaaaagaacttgatgtggcaaaaaagaggcatcatattgttgaaggatttattaaagctataagtgttttagatgaagttatagcaaccattagaagttcaaagtctaaaaaggatgcatcggaaaatttgataagcaaatttgggttttctgaggctcaagcacaagctatattggaacttatgttatataggttgacaggtcttgaaatagaaatatttgaaaaagaatatgcgcaacttgagaaacttataaaaaaacttgagaagattttatctagtgaaaaagaacttttgaaagttgttaaaagtgaattaaaagaaataagcgataagtacggaaatgatagaagaactgaaattatacatgatgataatgaaagtaaaattgatgttgaagaattaattattgtagaagaagttatggtaacaatatctaaagacggatttgtaaagagaataccattaaaaaattacactagatctagctctaatccagaagatattgagtatagagaaggagattctttaaaatatttaataaattcgaatactaaggatacacttcttgtatttacagataaaggttttatgtatcaaacaaaaggtattaatattcctgaaatgagatggaaagaaaaaggggatagattggatgagattattaaatctttaaatcttgataatgagaagataattgcagctatatccatagataatttcaatcctagcaaggcatttagatttataacaaaacatggaggaattaagttaagttctttagataaattccaaactgcatatggtaaacttcaagcgttaaaacttagagatggtgatgagttgattgacgtatccatgagagaattggaagaagaagagaagttcctaaaagttaagagtaaactagggttagaattcactcttgaaataaaaaatctagaggaaacggctagaaatattttacctactcagctatttaatttctcagaagaagatgaaattagccaagtagaagatactaatgaaattgaatattttgaattaagtgttggagttactgataagaataagtttaaattctatgagaggataaaagaagactcattaaaagttaaaacaaattctttaaaagaattgcttatctttagcaacagaggatatgtatataaaataccagtatttttaatgagaaatgttttgaataaagaaataaatgtagaagcatttataggtaaaatggaaaagggagaaaagataataagtctgatttccattgattcttatgatgaagacttaggagtatacacgtttacgaaaaaaggaatggttaagaaaacattgttaaaagaatttgaaggtgactttctaaagcaagcatgctataagtttaagtttgaagatgatgaagttgtatctgtagaaatgaatcaaataaagattggtcacttgatcatgataactaaaaaaggaatggcaataagatttccggttgaaaatgtaaatattatgggtaaaatagcttcaggggtaactggaataagtctgagggatgaagatcaagtcatttttggaaagtatcatagtaattacaagaaaagtgatgataataccgtaatgttatcttcggatgatacaaaaattacacttgtttctaaaggcaaggagagatcagtaatggatataagtgatattaagttacaaaatagggctggaagaggaacaagtataatgatggtttcacttgatgatgaaataaaagatgtacacctataaaaaaagtgcgaagcacaattaagaacctagcacctataaaaaggtgcgaagcacaattaagaacttataactataaaaaaagtgcgcactcctaagaagagtgagaagcacaatacggaacttattaagcacaaccaagaacttataattataaaaaagtgaaaagtacaaataagaacatattgcccataaaaaaagtgcgcactgcagaacttactaaacataacaagttatgttgtatataaaataaaaatttctgattcttactttttagcaaagtgaatgtctcacacaaaatatatcattatgtgtgaatcgtttatggcaggtggttggaagaaagtaaagaaaattatagattggaaagttccaattctgacaattaagttgtggtagttaaacaataaatggggtataatgtaggtataaattgaagagaagcagaatgagggtgttctaaaaaatagtttaggatatcctcattgtttagatttaaggaggaattgatatgaagaaagtatgcgttttattagcagaaggttttgaggaaatagaggctttaactgtatctgatataataagaagggcggatgtaacttgtgatttagtatcaattgcagaaaagcaagttaagtcaagtcatggcgtggtagttcaagcagataagctttttgatgagaagatggaatatgatttagtggtaataccaggaggtattccaggagctactaacttaagagatgatgagagagtaataaaatttgttaaaaagcaaaacaaagatggaaaattaattggagcgatttgtgcaggaccaatagttcttggaagagcgggaatcacagaaggaagaaatataacttcttatcctggatatgaagatgaattaccaaattgtgaatatttagaagatgctgtagtagttgataagaatatagtaaccagcagaggtccagcaacagcaatggcatttgcatataagttgttagatattcttggatatgggaataaagtagaaagtatttcatctggtatgttatataagatgtttatagggtaaaagttatcaaatttactgggaaagttttcactttatttcagtataagagaaatgaaaaatatagaaatctaaagtatataacctctaggatcaaaggtcttaggggtattgttgcggcatgctgtgaggggagaagaaatggcagaaagatggtttataaaaaatataaaagctgattataaatacatatctaaaaaatatgcactttcagaattggttagtaggcttatagtaaacaggaatattataagcgatgaaatgataagaagttatattaacccggattttgataaatttcatgaggctagagaaatgaaagatttagaaaaatcggttgatatactgcgtgagaaaataaaagctcagaataagatacgaattgttggagattacgatgttgatggtgtaataagtatttatattttatactcagctttaaaaaggtgcaatgcaaatgtagattatgaaattccagatagaataaaagatggatatggaattaatatgaatattataaagcaggcaaaagaagatggggttgataccatactgacttgcgataatggtatatccgctatagaccaaataaaatacgcaaaagaattaggaattaccgtaatagttacagatcatcatgatataccatttgttgagaaagaaaataacgtcagagaatttataagtttaagtgctgatgctgtagtaaatccaaagcaaagtgaatgcaattataaatttaaacaattgtgtggagcgggtgtagcatttaagcttgtagaaattctttatgagacttttaatatagataaaaaagaatgctacaaattcatagaatttttggcaatagcgacagtttgcgatgttgtagatttagttgatgagaataggatatttgttaaaaagggattagaacttattaacagtacaactaacttaggactacaagaattaataagagaatgcgaattaacagaaaaaactttatcggtatatcatcttggatttattatagggccatgcataaatgcttcaggaaggctagattcggctaaaagaggattgaaattattgctctcagatgatgaagaggaagcagtaaggctcgcaaaagaattagttaaattaaatgaagatagaaaagatatgaccatgaatggcgtcgaggctgctgttgaaatcatagagaaaagtggaatgataaatgataaagtatttgttatctatattcctgatatacatgaaagtttagcaggtataatagcaggaagaataaaagaaaaatataatgttccaactttagttataacaaaagcagaacatggtgtgaagggttcaggaagatcaatagaagaatacaatatgtttgaagaacttattaagtgcaaggatctgcttgaaaagtttggcgggcaccctatggctgcaggtttttcattaaaagaagaaaatatagatgaatttaggcgaagattaaatgaaaatacaattttaaaagacgaggatttattgagaaaagttactatagactcggttttgccgcttgatgctataaactatgatgtgataaatgatttagaaagattagagccttttggtaaatcaaactctaaaccattgtttgctgagaaaaatattaatttattaagggcaacaatacttggaaagaataggaatgtgctaaaattaaaactcaagaccaggatgaataaagctctggatgctatttattttggtgatattgaaaagtttgaagaagaagttagcagtaaatatggaaatgaagaattgcaaaaactctataatggagaatataatcatgtgaaccttgatttagtattttatccaaatgttaatgaatataatggtaatactactatacaaatagtaatacaaaactataggtaaaagaatagagttttcggttaagtataaaaagatgttgtgaatttaagatcatatattttgagttattataagaaaggatgatagtttttggctaagtataaaataataatgacagggggaggaactgctggtcacgttactcctaatcttgctttagttcctaaactaaagcaaaaggactttgagataaaatatatcggaagttttgacggcattgaaaaagaaataataactaaaaacaatataccttttttcggaatttcgtgcgggaaattacgaagatattttgatgtgaaaaattttactgatccattcaaaattttaaagggaattgctcaagcactaaaaatattatcaaaagaaaaaccagatgtgattttttcaaagggtggtttcgtagctgttccagttgtaatagcagcatctattaaaaaaataccagtggttgcgcatgaatcagatatgactccagggcttgcaaataaactttcggcaccattttgtgataaactatgtgtcacatttagagaaagtctaaagtttataaaggatgataaaggagtacttacaggaagcccaatcagagaagaaatacttaacggagataagactagaggaaaaaagatatgtgaattttctgacaataaggagattctctttattatggggggaagtctgggttctaagctcataaatgaagaaataagaaaaaatctagataagcttttaaaagattttaatataattcatatttgcggaaaaggtaatgtggataataattttttaaataaaaaagggtataagcaatttgaatatgtaaccgaagaattgcctgaccttatgaaggcttgtgactatataatttcaagagcaggtgctaattctatatttgaatttttagcattaaaaaaaccaacactattaataccactttcaaaaaaggcaagtagaggagatcaaatattaaatgctaagtcgtttgaaaaagaagggtattcattaatgctgcaagaagaagaaattaaaaataatgtattatatgaaaaagttcttgagctaaaaaaaagaaaagatgaattaattaataatatggaaaagagtcaagctaaaagcggtgttgaagcaataataaatgtattattaagaagtgttaaggtaaaaaaataaattattaaatttgtaattattatttaaataaagcacaaattatacaatcaaatcttgcaaaaaaaaatatgtgagatataataaaagagtaagttcattttagtgaaaacataagttaattatttaacaagaagatgaggtgcattacaatgaaaaaagtttcaatcatttattggagttgtggaggaaatatagaagcacttgcgaacactatggcagatggtgctagggagcagggagcggaagtaagtgtgaagcacgttgcagatgccacattggaagatgttttagaagctgattctattgcttttggaagtccagcagtagatgccactaaaatcgagcaggaagaaatgaaaccatttttagatcaattacaaaactatagagatgtaaacataaataaaaattgtattttatttgcaacttacgggtggattgaagatacttttatgaaattatggaaagatgaaatgtcatcttatggttttaatgtaattggagatttaacaattaaagattcaccaactaaaacgcaggcaaacattattaaacaattaggaaaaaaactagttaattaatataaggtttgtcatattgtttcgtgcgtctattgttaaaaatctcttaagctaaatattaatatgtttattaggtggtctttaagactaacttattaataaatttaaattactaatttatgtttaaaattagaaagaggggtcaacgcgatgagaaaaatgaaaactatggacggtaatactgcagcagctcatatatcttatgcatttacagaagtttctgcaatattcccaattacaccatcatcaccaatggcagaacatgtagatgaatgggtagcacaaggaagaaagaacatatttggacaacctgtaaaagttatggaaatgcaatcagaagctggagcagctggtgcagttcatggatctttacaagctggagctttaacaacaacttatacagcttcacaaggtttattattaatgataccaaacatgtacaaaatttctggtgaaatgttaccaggagtattccacgtatcagctagagcattagctacttctgctttaaacatatttggagatcaccaagatgttatggcagcaagacaaactggttttgcaatgcttgcagaaggatcagttcaagaagttatggacttagcagcagtagcacatttaactgctattaagacaagaattccattcttaaacttctttgatggattcagaacttctcatgaagtacaaaaaattgaagttttagaatatgatgaattagcaagtttacttgattgggattcagttaaagctttcagagaaagagcattaaacccaaatcatcctgtaactagaggaactgctcaaaatgcagatatctatttccaagaaagagaatctgttaataaattctataatgaattaccagaaacagttgaaaattacatggctgaaatcactaagttaactggtagagaatatcactgtttcgattactatggagcaccagatgctgatagagtaattatagctatgggttctgctacagacgtttgtgaagaaactatagattacttaaatgctaatggacaaaaagttggtgttattaaagtaagattattcagaccattctcaaatgaaagattattagctgctattccaaagacagttaagaaaattgctgttttagatagaactaaggaaccaggatcaactggagaaccattgtacttagatgtaagaaatgcattctatggacaagctgatgcaccacttattgttggtggaagatttggtttaggttcaaaagatccaaatccaggacatattgctgcagtttatgctaacttagcacaagatgctcctaagaacggattcacaatcggaatcgttgatgacgttacaaatacttcattagaagtaactgaagatatagatgctactccagaaggaactacatcttgtaagttctggggattaggatcagatggtactgttggagcaaacaagagtgcaatcaagatcattggggataatacagacatgtatgctcaagcgtacttcttctatgattcaaagaaatcaggtggaattacagtatctcacttaagatttggtaagaaagcaattaagtcaccatacttaataaacaaagcagactttgtttcatgttctaaccaatcatacatccacaaatacaatgtacttgaaggtttaaaaccaggttctactttcttattaaatactatctggtctccagaagatttagaagaaaaattaccagcttcatataagagattcttagcaaacaacaacattaagttctacactatcaatgctgtaggtattgctcaagaaatcggtcttggtggaagaatcaacatgataatgcaatcagctttcttcaagttagctaacattattccagttgaagatgctattaagcacttaaaagattcagttgtaacttcttacggtaagaagggtgaaaaagttgttaacatgaacaacgctgctatcgataaaggtgttgaatcaattgttgcaatagacattccagaagcttggaagacagttgcagatgaagctccagtagaaattaaacatgctactaagtttgttaaagatatagttattccaatgaacagacaagaaggagatcaacttccagtttcagcatttgcaggtatggaagatggtacttttgaaaatggtactgctgctttcgaaaagagaggaattgcagtaaatgttcctgaatgggataaagataaatgtattcaatgtaaccaatgttcaatggtatgtccacatgcttctataagaccattcttattaactgaagcagaaaagaatgctgcgccaagtgcaaataaggctgtagctgctaaaggattaaagacagaagaaccattattctatacaatgggtgtaacaccacttgactgttcaggttgtggaaactgtgctcaagtatgtccagcaccaggaaaagcattagttatgaaaccacaagaatctcaacatgatcaaatagaagcttgggattacttaactcatgatatatcagctaagaagaacccaatgaacaagaagacagttaaaggcagccaatttgagcaaccattacttgagttctcaggagcttgtgcaggttgtggagaaactccatatgttaaagctataactcaattagttggtgatagaatgatggttgctaatgcaactggatgtacatcaatctggggaggatcagctccttcaactccatacactaagaataaaaatggacatggtccagcttgggctaactcattattcgaagataatgctgaatatggattaggtatgttcttaggagttaaggctataagagaaagaattgcagaaaaagctgaagctgctatagctgcaaatgatccagcaaaagctgaattacaagaatggttagataacgtagatgaaggtgaaggaactagagaaagagctgataaattaacagctgctttagaagcatctaatactgaattagctaaagaaatattagctgaaaaagactacttcgttaagagatcacaatggatcttcggaggagacggatgggcttacgatatcggatacggtggagttgaccatgtattagcttcaggagaagatgtaaatatactagtagtagatacagaagtttactcaaacactggtggtcaatcatctaaagctactccaactgctgcaatcgctaagtttgctgcaagtggtaagaagactaagaagaaagatcttggaatgatggctatgagttatggttatgtatatgtagctcaaattaacatgggtgctgataagaaccaagttatgaaagctattgcagaagcagaagcttataaaggaccatcattaataatagcttatgcaccatgtataaatcatggattaagaattggtatgggtaacagccaagaagaagctaagagagctactgcatgtggttactggcaaatgtacagattcaacccagaattaaaagatgctggaaagaatccatttacattagattcaaaagaaccaactgcagacttcaaggaattcttaatgggagaagttagatactcttcacttgctaaggcattcccagaacaagctgatgctttatttgaaaagactaagaaagatgctatggaaagattagaaggatacaagaaattagctaatcaacaatagtaaagtaattaaaatattgaaataactaaatttgcgcaaaaagaggagtcacttctttgtagaaattattctataggaagtggcttctttttacatgcattcgaaaaagcagatccttaaaagatccaaatccaaagtgatctgagatctaatttttagaagaaacttaatataatggttgaaataataaaattatattttcttgtaagaactgtttattttctaataaatcgtaatttgaattgaattttgatgaataaaatgttctagaacatatataattagaatatttattaaaattactttacaatttttttatttaagggttttaatttttatgatttaagggtaaaattaattaagaaccaaaaggaggttgaaacatggaaaaagatttagaaaaatgtggatgcaatagtgaagaaggaagttgtggatgcggtggacatcaccatgatgaagatcatgaatgtggatgtggatgcaatgatgaagaaaacttcgttatagatttagaagatgaaaatggaaatgtagttacatgccctataatcgacgaatttgaatatgaaggaaaagcatattatttagctcaaaatccagaagaagattcagtttatcttttcagacttgatgaagatgaacttgttgttccggatgaagaagaatttgatagagtatcagcttattatcaaaatgagttagtaggcgaagaataagaagttaaagactttagtaatttattactaaggtcttttgtttaatatgtcttagggacattcaaaaaaataacaagtgaatctgctaagaaaagttccttattgcagcatagctgctcttttcataagtgcccattttccattatactgcttcagcagattgtcctaataggcccactatgagaccaatctgcttcattgtctaatgaaaaataatcattgcattttgacttgttattttccttcatgtcccttaaatattccatattgtttacaattcaatatattaatgatatatttttattatgcgacaaaagtatatataaatgaattagaacattttttataattcattttaaggtcaaaattggagggaaaaagcaatgcaattatctaaaaaagcggggaatatcacaccatcaattacattagcaatcacagctaaagctaatgaactaaaaagtcaaggggttgatgtagtaagttttggagcaggggaaccagactttaatacaccagaaaacataattcaagcagctataaaagctatgaatgacgggaaaactaagtatactccagcaggaggtttgttagaattaaaaactactatatgcagtaagtttaaaaatgataataacttagaatataagccaagtcaaataataatttctacaggtgcaaaacaatgtcttgcaaatgtatttatggcaactttgaatccaggagatgaagtattaattcctgtaccatattgggttagttatcctgaattagttaagttagctgatggagttccagtgtttgttgaaacattaaaagaaaataattataaatatacagttgctgatctagaaaaagctttaactagtaaaactaaagcgcttttattaaatagccctaataatcctacaggaacaatttatcacgaagatgaattgttagaaattgctaattttgcaaaagaacatgatttaataattatatcagatgaaatttatgaaaaactaatatatgatggagaaaagcatataagtatagcagcattaaatgaggatgcctatgaaagaaccatagtaataaacggcgtttctaagacatatgcaatgacagggtggaggctaggatatgcagctgcaagtgaaagcataactaagcttatgacaagcattcaaagtcacatgacatctaatgtgaatacaatagcccaatatgctgcaatagaggcattaaatggtccagtagaagatttaaacaatatgattaaagaatttgagaatagaagaaatttcatgatatataaattagaaaagttaaatgaaatatcaattataaagcctaatggtgcattttatataatggttaatatatcttcgtacttgaatactacatttaaggatcaaactattaacaactctgtagattttgcaaaggtattactagaagaagagaaagttgcagtaataccaggttctggttttggcttagatgattatataagattatcatatgcgacatctatggatataatagaaactggaatagatagaatttcaatatttttaagcaaaattaaataatgtatatagataatccaactaagacctgaacttatgcatataactcgccgaaatgagaattatgctgttgttccagtttctaaggaaattatgatggatgattctaagctcacaagttgcacccaagatgctagcctcaaaggcaagctttgaactagcatacttggaacaacttttaatctaagaatcaaagccatcaaattcctaatgaaacatttcacaaaagcataattcttatttctagttgggatatatttcatagtataaatctaacttaaagttgggttatctatagaataaaacaactataatctatacttatgtatattaatcatttcttatttctgattggaatatatttcatagtctaagtatagttatagtttatgatttaggtaagttatcacgtaaatctagttttaaagttgtttatttatactaaatatgaagaaagaatatttagttagaatttatttctaatttttgtatatatgttgcaaagatagttcttcatcataattctaaaaatgttgtgagaattttagctgtaattgtgcattgcgaaatgtgcattgtgaattgcaatatatacatttacgattttgttgtaataattaaggttattattacttaaaataaacgagtgataaaaaataataacgggattaagtttaaagaaagaaaagcctaagaatttttaatcgaaattaatcattataatatttagctctaaacacttaatgatttaaagcaaagttaaatcatatgcttgagtgttaagaattaaatattaaaaaggtaggtatttgtgttttgaagaaacttgctatatttgacatagattataccattactaaaaaagaaaccttaatggaattatttaagtatgtaattaagaaaaataaaaaaaatctaagatttttaccaagagctatatactgtggaattatgtacgcaattggaatatatgatgagagaaaagtaaaagagacatttttaaggtttatagatggaataaaagaagaggagttagctgaacttgttaaagcgttttatgatgagaggctaaaaaatattttatatgatgatgcattggaaatgatgaaaaaacttaaaaatgagggatatgatatatacctgatttcagcatctcctgaattttacgttaatgaattttacaatataaaagaagttaataaagtaataggaactaaatttggatttgaaaatggaactttcgtaagaaaaatggtagggaataactgcaagggagaagagaaggttagaagattgaaagaagtacttaaagatgaaaaaattgaggtggattttaaggaatcgtatatgttttctgattccttatcagataaaccattattggatctagtaggtaagccatatttaataaactataaaaagaatcatgatatagagatactaagatggaaataaaatataaattaagatatcagtcttattaagaaataaaattgatttgattacatagtataagctgtgttaaagaatttacattagtatatgattaaagtttagacttatgcaattaataatattaatttaatattacagattatatatataatatatacattgcaaaaatgattctttatcatgattctaaaatattgcaggaattttagcaatgattctgaattgtgaaatgtgcattgtgaattgcaatatctatataataatagaaagggatggcaaggcatggaagataaaataatttatgaagttttaagagtaatagatagaaagtcaatttttctagaaagtcatttaaaaagaatgaaaaattcttttaatttaataaatgaagaatttttagtaagttacgaagaaataagtaaggaaattgaggaactaatagaaagtgaaaatagatctgaaggaaatataaaaataacatttggagtaaatgaaaaaaagctaagagtattttttattgaacactcatatccatctgatgaaatgtatatgaatggggttaacactatactttattttggagaaagagaaaatcctaatgcgaaaataataaatgatacctttagagaaagagttaataaagagataaaggataataatgcgtatgaagctattttagtcgattcaaatgggcatgtaacagaaggcagcagatcaaatattttcatggttaaaggaaataaacttcttacatcacctgtaaaagctgtactaccgggagtaactagaggagaaataatagatattgcaaataaggttggggttgaagtcgaggaagtagaatataaatattctgatatagataaattggatggaatgtttatttcgggtacatcccctaaaatattacccataaaaacagtaaatagcataaattttaatgcagataataacttgattagaaaattgatgaaagaatatgatgatgagatagaaaaatatataaaaaatcattaaaattaagttaatttgtattttcatgtaaaataatatagattaatataaataatggatataaaattaaaataggctgtggtatacttagataaaggagtattttagggggagatatttatggacttgaagttttctggagcatccttaaatgaatgtcttgaaaaagcatcttctgaattaaatctttcgaaagaagttttaaaatatagaataattaaggaagaaaagaagttttttagaaagaaagtagagatagaaataatagaagttgacgaaaataagagcagcattgaagaaaaggaaataattgaagaattaccagaaactaaagaagaatttggagctaagattgagaatgggaaaataataataacagaatatgataataaagatgaaattattactataaaaacttgtccgggtgtaattttaattattaatgggcaaaaatgtgatggaataacgcctgtaacatcacgagataaaattgaatataaatttgaagagaacgagccgacaagaaacataaatatatcaattacagatgataaaatggaggcatatgttgatataaaatcaaccccagctcatatatatgaattagttaaccaagaatatcaaaaaaatttaacaatcaaaaagaagaatgttgatgataaatatccaccaaaatatacagtaaaagaattaaaagagttgctaaagagtaatggaattaaatatggaattattgaaaaagaattagaaagtatatgcaatgaacataatatagaaaaaaagttagttgcaaaaggagtgcctgctgtagatgacattccagatgagattcaagttctatttcacgattcagaagaattaattcattacaaagactcagaagaaaaagttgattatagaaatagatttctaattgcaaatgttaaagttggagacgttataggcgaaataatacctggaaaatcgggaaatgatggacaagatatatatggtgttcctgttaaaagaaagacttttaaaaagacgggagtaagacttggagagggatgtaaacttgaaaacaatagtattatagcaacgtctgagggtaagccagcttataaagcaaatacatttgtagtaaataaattatacaaggtagatcaagtagatttaaaaagcggaaacatagattttgttggcaatgttgaagttgttggtaatattttagaaggaatggaagttaaagcagggaatgagcttcatgttggcaaaaatgtagaatctgcaatgatcaggtcttcaggagaaatttttataggcggaaatatattgaattcaacagtgacagctggatgtgagaatgttgagaaaaagcagtatttagaaagtttgaagagtctggctcatattattgatgatttagttgattcaacagtgcaagtaaaagaacataacttactaggttcaaaaaaagatggagaaataattaaaatattaatagagaataagttgaaatcattacctaaaatatgtagaaatattttgaattataatatgtctgaaggaattcagcatagtgacgttacaacatttataataaataagctattgggcttaggcccacttaaaataaataatattaatgaatttgatatttttaaggaattgttagatgaagaaatttgcgaaatggaagatttgatggtaattcctacaaacgtgcatttagcgtatgctcaagggtctaccatagaagcatcagggagtgtttttgttacaggtaaaggacagtatacctgtaacataatagcattggaaaatatagagtttaccagtgaaaaagctgtttgtagaggtggcacactttcagcaggatctgaaataaagttaaagacagtgggaagtgcagctggagttagtactgttttaaaagtctctaaaaaaggaagaattacagctgatatagcttataacaatactattttctgctttggagaaaaacaaattatgttagaggtttcttctaaaaatgtagaggcatatatagataaaactggagaaataacaattgataaatttatactataggagggttcaaagtaatgtcaagtaatgaagtgaaaattttaatatttggattaaatggagaacattacgcaacagatataaaagaagttgagaggattttaggatatgaagaaccaacaattcttcctgattcgcctagttttgtaaagggagtaataaattatgaacaaagtatacttccaataattagcttatccaaaaagtttaattttggagaagatgaagaaaatgaaaatagaaaaataatagttgtaaaaagagatgaaaataaattcggaattattgtagaaaatgtttacgaagtgcgagatgttagtagtgatttaatggaagaagcacctcctataacagcaacaatagacaaaagatatatagcaggtctaataaaattaaaagataatatagttattttattagacttagaaaagatactgtcttcagaggatgaagaaaaaatcttttagggggtaaagatggtaagtgcagaagtaaaagttggaatagctgatctaaatttagtactcgacccaggaacaataatgacaataggactcggatcatgtataggaattgccttatatgataggacagttaaggtggcaggattagcacatataatgcttcctgatagtacacaatttaaaagtagtacaaaccccatgaaatttgcagatttagctattccactattaattgataaaatggaaaagcaagggtgtaaaaagagaaatctcgtggctaaaatagctggtggagcttcaatgtttaatttttctgataagagcataataagcgatattggaaaaaggaatagtgatgcagtgaagaaaagtttaaaagaagaatctatacctataattgctgaggagacaggtggaaataaaggtagaactatgatcctttatgcaagtgatggaaaagtaatacttaaagttgtagggcttggaattgtagaattgtagaataaagagagaggtgtgattaggtgggtaagataaagattattgttgttgatgattcggcttttatgaggaaggcgatatcagatatgatagaatcagaaagtaattttgaagttgtagctaaatttagagatggtagagaattagttgagaaggtagagaagtacaatccggaccttatcacattagatgtacatatgagggatttagacggacttgcaactcttaaagaattaaaaagacttgggaaaagttatcctgtaataatgcttagtagttcaactacagaaggatcggaactaactttagaatgtttagataatggagctattagctttataactaagccatcaggaagtatttcgctagatatagcaaaagttaaaaataacttaatagaacaaataaaaagtataactagcaatgttaattctagaaagaagttaacaagtttagaagctaataaaaataacccaataactaataatgagattggtttaaataatcccaatataataaaagaaaaaactatacatagggtgaatagtatacctaaaaataaaaagatagatgcagttgtaattggggcatctactggaggccctaaggctcttcaggaggtgttaaccaaattacctaaaaatttaggtgtaccagtttttgtagttcagcacatgccagaaggttttacaaaagtattttctgaaagactagataaagcttgcaatatgaaagtggttgaggcaacggaaggtatgaggattagtaatgatacaatatatattgctaagggtggtcaacatatgactgtaggatcaaataatttaattcacttaaatgaagagccgcctatatggggagtaagaccagcagttgacaagttatttaattctgctataaaagtgtacagaggaaatttaatatctgtaattcttacaggaatgggcagagatggtgctgatggaactgcaaacataaaagataatggtggtataacaatttcagaggataaatctacatgtacaatttatggtatgccaaaggctgcgtttgaaactggaaaagtagatttagtggctccgcttaatgaaatagctgaaaatatagtaaaaataattaaacagttataggaggaaatatggattttaatgaatttcacaaatgggttcataaagagttgggtataaatttatcagcatataagccagaacagctaaatagaagaataaacagcttaatgacaagggttggtataaaaacattagatgaatattccaagtctataaaaagtaatccagagcaaagacaaaagtttttagatttcataacaataaacgtaacagaattttttagaaatccagaattatttactgatttagaaaaacaaattgcaaaggagttactaccaaataattcaagtctaaaaatttggagtgcagcttgttcaataggctgtgaaccatattcattaggaataatattggataagttagcgccaaatggaagacataatataatagctacagatatagatgatactatactttctagagcaaagcttggagaatatactcaaaatgaaatgaaaggtgtaaataatacagatttaagtaaatattttaaagtaagggacgataaatactatgtagagtctaaaattaagaatatggtaacttttaagaaacatgatttgattttagatcgatatgatactggctttgatttaattgtttgtagaaatgtagttatttattttaataatgatgttaaacaggaaatttataaaaaattcagtaactcattaaaaaagggtgggcttttatttgtaggagctacagagagcatttataattatagagactatggatttgaaaaagcatcaacctttatttataaaaagatatagaggaggagtaaggatggatacatctcaatatatgtcaatgtttttagaggagtcattagaaaatttacaaacattgaatgaatcactattagatttagaacaaaatccagatgatacagataaggttaatgaaatatttagagttgctcacacaattaagggaatggcagcgactatgggatttactgatttagcagaacttacccataagatggaagatgtattagctgaattcagagaaggaaaactaaaagtaactcaggatgtagtgacagtattgtttgattgtcttgatacattagaaaagatggttgacaatgttcaagaaggttctgaggaaaaaatagatatagatggaataatgaaagctttagctgatataaaagaaaatggaaacaagagtaacgtacaagaagaaacacaagctagtgaaattaagtcagaagatgaaaataaaatgatatcaggtgatgaatttgatttagatttaaatcaatatgacacatctgttattagacaagctagagaaaaaggatttaactctattgagttaaaagtaacattaagtgaaaacactttattaaaatcagcaagagcatttttaatagttaaagatcttgaagatcacggagaaatattaaaatcagacccatcaactcaagaaattgaaaatgaagagtttgattttgaattgaaatttatcttagtaactaaaaatactgtagatgaaatattaactgttgtaaatggaatttcagaagttgcaaaagttgaagcttctttaatagaattagaaatttcagatatagctccaaaagaagcagaagtaaaagaagtgccacagctaccagagctaccggttatagaaaaggctccagtagaaaagccagctgaagcaaaagttgagacaaagcaaccagctgctaaaaagtctactcaaaagaaagaagttaagaaagcacatcaatcagtaagagttgacttagagagaatagataatttaatgaatatggtttctgagcttgtaatttatagaactcgattagaacaaatcgtaaatgttcataaatcacaagagttaaatgaaacattggaacaagtaggaagaacaacatctgatcttcaagatttggttatgaagattagaatgcttccattagatacagtattcaatagattcccaagaatgataagggatatatcagtagaattaaataaggaaattaactttgttatagaaggtgctgatactgaacttgatagaactgttattgatgaaataggtgaaccattaatacatttattaagaaatgcagcggatcatggtatagaatctgctgaaaagagaattgcacaaggcaagcctccagttggaacagttaagcttattgcataccaagaaggaacaaaagcattaataaaggtatcagatgatggtgcaggaataaatcttgaaagagtaaaagctaaagcagagcaaaagggaataaacacagaaggattatcagatagtgatattaagaacttgatttttgctcaaggatttagtactaatgaagttgtaacagatatctcaggaagaggagttggaatggatgttgttaaaacaaaaattgcagcactcggtggtactgtagatctactaagtgaagaaggcaaaggttcaacttttgtaattaagcttccgcttacattacaaataatacaagctttacttgtaaaggtaggagaggaaacattagcaatatcattaggatttattgatagagtaattgactataaagaggaaaatataaagaaaagtaatggaaaagaagttattatttatagagaaaatgtaattccattagtaagattaaatgaaactttagatatagaggctagtaatactgataagaaatttgttataatagttaatgtaggtgataaaactataggtttattagtcgattcattacttggacaacaagaaatagttataaaaccactcggaaaaacattaaagaatttagatcagtatattggtgcgactatacttggtaatggtttagtaacgctgatactagatgtaggggcattattataaagtgaaatttttaagtaagatttttaaatctaattaaaattagtttgacttataattccataaaaatgagcaaaaggctaaaggtttggagtggacaagatatattattattgttatgttataaaggcaataataatatataaatgtgagatgattggccctttagggtgaaaaattttaaaggagggttataagtggagtattctaatttaagcactttgcaattagatgcacttaaagaagtttctaacataggtgcaggtaatgcagcaactgctctttctatgatgatgggaaaaaaagtagatatgacagtaccagcagtaaatgtagtaaaactagaagaagtatttcaagaaagtggagaatgtgctgtagctggaacagttgtaagagtgctaggcgatatttcaggaaatatgcttttagtattcgaacaggaaacagctgaaaatgtaataaaaaaattagttggaagcaagcagtctccagaaagtgaaatgggaagttctgtattatgctagatagcaaatataatatcagcatcatatatgaatgctattgcacagttaactaatcttgttatggcaccatcagtgcctgcaacttcatttgatatgttaggtgcaatactcacaactacatttattgagtccaatcaatatgatgaatatatactagatattgaaactgtattcttagacagtgatacagaagagaatataggtggacatttttattatatccctatgccgggttcgttagagaaaatattgaaatctataggaataaattaaattttggaggtaaaattgtatggctagagttttaattgtggatgatgcagcgttcatgagaatgatgataaaggatatcttagaaaaaaatgattttgaaatagtaggtgaagcaaataacgggatagttgcagtagatctttataaaaaagaaaaaccagacgtagtaacaatggatataactatgccagatatggatggaattgaagcagttaaacaaataaaagcattcgatccagatgctaaagtaatcatgtgttcagcaatgggacaacaatcaatggttatggatgcaataagagctggagcaaaagactttatagtaaaaccattccaagcggatagagttttagaagctataaagaaagttgtaggttaatataaaagcaataatacaagaaatgaattataacatgctataaataaatctttgcaaattttaaagaaattttaatttaagtgtcaattattaatggttgattgtatattattgtagaggaggagtatgaatgcaaatagtagtattcaaactaggagaagaacattttgcagtagaaacagatagagtccaaagtatcaatgatactatggggattacaaaagttcctaaggctccgagttatattaaagggttgataaatttacgtgggagcattaaatctcttgttgacataaatttattacttgatgtaactcctgggaaagaacaaaataatataattattttaacagtagaagatgaagaaatcggaatatcagtggatgaggttgaagaagttttagatatagatgagaaaaatatacaaaaaatagaaaaagatgcaggtaaagcacagccttatattaaaggtatattaaattatgatgaaaaacttcttacaataatagatatcgacaaattattaaattagtttattgaaatgagggaaaaatatggcagatgtcttatcgcaaagtgaaatagatgccttattatctgccttatctacaggtgaaatagagtcagaagatgttggtaaagatgaagaaaaacataaagttaaggtttatgattttaggagtcctcaaaaattttcaaaagagcatataaggacacttgaattagttcatgataattatgcgagaattatttccaactacttaacaggtcaaactaggcaaaatgttaaggtgaagatagaatctgtagagcagataacatatgaggaatttattcactctgtgcaaaaccctaccattattacaatatttaaaatggctccattatcagggacaataatattcgaaactaatcctcaattttctcttcaagtaatagatgttttacttgggggaaagggaaatagaaaagctgaaacaaaagaatttacagatatagacaagaatataatgcgacaagtaactaccggaatgataagcaatttaaagttagcatgggattcggtaatagaagttgagccagaagtagaagcaattgaaactaatccggcaatcaatcaaacactagcacctaatgatcctgtggcattaataacattttcagtagaaatgaataagagaagcacatttattaatatgtgtcttccttatttaagcgtagagaaaatactagataaattagtggtacaatatgcatttaagaatgataatgaggcttcgatcgctgaatcgagagaaaaaatagaaaaaggaatcaataaagttgatgttgaaattgtagcagaacttggaactgctaatataacagtagatgatttcttgaaactaacagtaggtgatgtaattaaacttgataataaaagttcatcaccaataaaagtatatgtaggtaatgaagaatgttattatgctaagccgggtgtagtaggaaaaaatgcaggtgttatgattttagatataacggataaggaagtgaatgggtatgggcaataactttttatcgcaagaagaaataaatgcgttattagcaggtgaagatttagcttctactgaagctgaaagtgcagatgcatcagctgatgataataaaatagatactggagttataactgatattgataaggatctgcttggagagatcggaaatatttctatgggatcagcttcaactgccttatatcagcttataaatcaacaagttaacataactactccagtagttagtgtaactaccttgaaggaaataaaagaaggttttgaaacaccgaatattgtattggatattgaatatgtagcgggaataataggaagaaatattttaatcataaagacattagatggcttggttatatctaaccttatgatgggcggagatggaaatgtaactgagactcatgagttatctgaaatagagattagtgcagtttcagaagctatgaatcaaatgataggatctgcggctacatctatggctactatgtttggaagaaaagtagatatatcaccaccatcagctaaggttgtggttgatggatctataccgatttctgatgcaataccagaagatcaaccaatagtaagagtgtcatttagaatgactattggagacattgtagatagtaatataatgcaaatatttccaatagagacagctaaaaatattgttgcaataatgactggagaagataaggcaaaagaagtggcagcatcagaaccagcaaaagacaataaaaaagatacaattgtaaataaggaaatatacgaacagccagcgcctgttcaacagcagccacaacaacaatatcaaccagaacctcaatatcagcagcaataccaacaaccacaatatgagcagccaagaatgcaacagccggtagaagttcatgcggcaacgtttgaaccattagtaccgcaaaatagcgttccgccaataaagaatattgacttaatattagatgttcctttagatatatccgtagttctaggaagaacaaagaaaagtatacaggatatcttaaatttaggaacaggttctttaatagagttagataaacttgcagaagaaccagttgaaatattagttaatggaaaacaaatagctttaggtgaagttgttgtagttgatgaaaactttggaataagaataactaatatagtaagtagtgttgaaagaataaagagactaaaataaaaactcccgagagggagtttttatttttggatatagataaaccaactaagacctaaaattatgcatatagctcgccgaaatgaataacatacttttgttccagtttctaggtaattgtgatgggtgattctaaggctataaagttgcacccaaagtgctagcctcaaagaacaagcgctcacagagaaagttcgaagaacgaaatataaaatttcgattctcactttttgaacgagcacatttggaacagttcaaaggaaactcgactcacttcgttcactgagtaatttcaattgaccaaatcatagatttggaatttcaattaagaatcacatccatcacaattaccaatgaaacattccacaaaagtatattactcatttctgattgaaaaatatttaatagtttaagtatagtttatgattgttttatctatactttgaaaattaaacatatgcggaaaaaacgaaattagatacaaatctgttccggtggactaatgaaattttcgatggatagatctaagtggaaggttgaacccatttcagcatgctccaaaaacaagtttaggacaagcaaaaaatggaacaaccttcaaccaataactatcataactcaatttcaaatgccgctttcacaaacatgtatctaatttctagtataattcacaaaaattaaagtataagtatatcgtttgatttgaatatccatatgttgcaattcacaattacgactaaaatttttaaatatttttgaattatgatgaaagattatttttggactttttgcaatatgtatacattaaaaataatagtagaactaatataaaattatgatataattaatttacttactaataaatatgtgaggtgagaaagtggaggataaagttttagatatccttgaaaggcttgaactaagatttacatcaatggaaaataaaattattgggatagaaactaaaattagtggaatcgaagaagatgttaaggtacttaaacaagatgttagagagctaaaagaaggtcaagagagaattgagaagaaattagaatcaacacatgaacaagtggaaagaactgcggaagatataacaagcataaagcatgatcttaatagtgttgaaatgataacatctaaaaattggtatgatatagctaaaataaaagcaattaaataatagtgtgatttaaaaaattaaatctgcttagtgttatatggcactgagcttttttttgcgtttgaataattacccgtaacccaattataaaattataatttaataaaaaaattttgttagaaccctttatatatttctttttttgcgtatatattaattagaaggataaatatacacttataaaaagagtagctatgcactactgaaaagagcagctatgctgcaatgtggaacttttctgcatataataacatttttgtgaattaacttgttgtggtatataaattatgaagggaagcggtatatatgagagaaagaaagtatgttaaatttagagttgatatgtatgaggacacaaaatttaaaataatagataggatgactaatagagatcttattcattatgtttggaacaggatggttgtcttggctggaaaggtaaatcaagagggagaattatatatgtcaagaaatattccatacacaatagagactttatcaatagaatttaatagagatatcgaagaaataaaagcagcattagatgtgctaatgaatttggaaatgattgaaatcatagataataatatatacaaggtgaaaaatttcgtaaagcatcaaaatattaaagttaaagaaaaaaatgaaattgtgaaaaaagatagtgagattggccattcgaaaagtagtaaaatagaagctactgaggaggagttaaaaaatataaatggtattgaaatagaaagcaatagtgaaattgcggaaaacttaagaaatagtaaaatagatagagatattgaaactccagaaagtttaaataagggtgtaatgtttaaagaagaaaaggttgatgtttataatggagttaataatgaaaataatataagaaaaaaccaagataaagacgagaaaaataatattagtcaacataacaattctcctgtaattttagaaatgaagaaaagtcaaaatacagataaaaagaataaaagagcaaggaagaagaaaattagagatgatatcgttgaaactaatgaaaatgatgaatttagtaatgtagctgaagaagaaaaagagatattctgttggttaactgaagacgagatgattcctaaggagggagaaaaagtaatatttgaaatgtcattttaattagtgaaaatgtctataataatatataattacattaaggtgctctaaaaaacaatttagaatacttacaaaatattaaacgaaacttattataatttaaaagttataaatagtgaatataaaattaaataaggtataaaaaattgaaaggaaggagaaggtggtttaagtgagaaaaactatacaaataggaacatctgattttaaaaagctaatagaaggaaaaaattatttcgtagataaaagcttattaataaaagaattcatagaaaatagtgctgatataatattaactccaaggccaaggcgctttggtaaaactttaaatttaagtatgctgagatatttttttgatataagaactaagaatgaaactaaagatctgtttaaggacttaaaaatagagaatgaaaaagaaataatgaagcttcaaggagaatatccagtaatttttattacatttaaaaatcaaaaacatttgtcttatgatgactttaaaattggaattcaaatgctgctatctaatttgtataaggaacatgagtatttattagaaagtaataatttatcagagtttgataaagcggattttaaagagataatatccagaaaggcaccagttggaattttttcggaagctataagtaatttgatgatgtatatgaataaacattatggaaaaaaagtaatgctattcatagatgaatatgatgtaccaatccaagaggcatatttgcgtgggttttacgataatatgattgttttaattagaaatttactaacatcagcccttaaagataatccatatgttgaaaaatcattgataacaggaatacttagggttgtaaaagaaagcattttttcaggcttaaataatttagaagtaaatactcttttaagaaaaacttttaacgacaaattcggctttactaaaaatgaaattagagaattgctaagttattataaatgtgaagatgatatgcagaatataaaaaaatggtataacggctatatttttggtggagaagttatatataatccatggtctgttttaaattatttaaaaaatactagagaaggctttatgccttattggattaatagcagtagcaatgatctaattaaaagattattgctaaaaggtgataataatataaagcttgaacttgaagaactcatagaagggaattcaataaataaaaagattgatgacagtatagtaatggcagaggtcgaggattcaaatgagaatatttggagttttttattgatgagtgggtatttaaaagcggtaaaaactgaaaatatagaaggaattttaaattgtgagcttaaaattcccaataaagaagttctaattttttatagaaacttgattgagaaatggtttaaagaagctttaacaaatcagaaatatgagttaatgttaaataccttgataactggtaatataaaaatttttgcgggattatttaaagaatttgtgataaataacttgagttattttgatatatccggtaaagagccagaaagagtttatcatgcttttgttcttggaatgcttgtgtctctttcaaatgagtatgaagtaaagtcaaataaagaaagtggatatggcaggtatgacgttatgataattccaaaagatatttcaaaaataggaattataattgaatttaaaaaaatcgattatttcttggatgatactatagaagaagcaaccaaagaagctttaaggcaaatagaagaaaaaaattatgctcaggaattgttccaaaaagaagtaaagaatataataaagcttgctattgtatttaaaggaaaagaggttagagttactcaaggagagaatttggattattgacaaggtgaaagctaaaataagagaatttatatagataaatgataagttaataatttgaagatatttaggatgatttttaaattagcagtagaatatatttggagatggtagaaaaaaatctaagattcgcttagtgttatataacactgagcttttttcatatctaattattttcttaaaatagttgcacaaattattttttattgacttttctataaacttataaaagaaaagtacgataagtatattaatgaagtagtaaggcgcaattaaaaaataacaagtgttattttctttcaggagcctaagaaatggagaaatgtattatgagtattgatagaataagtagatcgacatatataaatgcgtataactcaaatagcagtaaagcagtagaaaagacaaagaaaactaatgatgtagatagaattgaaatttcagaactaggaaaaagccttaaaggctactcattagatagtaatatacaaaatgcaaaaaaaatagctgatattaaaaataaaatagatagtgggacatacaatgttgatgcaagattaactgcaaaaagtatgttaaatgcaatgaaggagagtaaggcataagtatgataaatgaacttattacattaatacaaagccaagaggaagaattacaaagacttttagaattgttagaaactcaatataaaatgataatgagtaaagatgtatttggtttagagggattagttgataagattaatgaatgcggtaagaagattgcaaaacaagagatagagagaagaaatatacttggagataatgggatagtagaagttgtgaataattcaaataatgatgaattaagagaaaactacaataagataaaaagaacattaaattcagttatttctcaaaaagaaacaaatgatatgttattaaagcaacaaataatatttaataataaaatgttagaaataataaatccgagaagagaaataaagacatataactcatatggaaatttatctagatagattaaacatttggattgcacataaacttttggcaatttaataaatgttgtaaaagcagcaatcacaaatttttaaatggattatttctatactaatagcttataagtgaaaaataataaggatgttacaatatataaaacatggaagttggtattattgaaaggtaggaaagaaatacatggcaggactatttgatacgtttactattgctaaaagagggttaaatgttcagcaaggaaatataaatacaacatctcataatatagcaaatgcaaatactacagggttttcaagacagagggctgtagctgagacaacaaaaccatttggtggaatgtcgagatttgatacagcaggcgttggacaagttggaacaggtgctgaaattacatcaatacaaagaatcagagattattttattgattatcaagttagaagcgagtcaggaacatcaggatattatacacaggcaagtgagaccttatctaaagttgaagatgtatttggggaaccatctgacacaggaattcaagaacttacaaatcaattttttaatgcatttcaggaagtatctaaaagtccagataaatctgatgttaaaacggtagctattaaagatgcttcagcacttgcagatgcattaaattatacttacaatcaattaaaaaagtctcaagaagatagtcaagcacttattcaaactaatattactgatgtaaatagctatcttgatcaaataaatgaactaaataagcagataagaagtatttcttcagttggacaaacagcgaatgatttaatggataaaagagataatcttttagatcaattaagctataaatttggaataaaagttgatagagatagcctcgatactataaatctttcgtcaacagagtatccggatgcggctttagtaaaatcagatccaaatgatacagactattctaggctttcgtatgttaagagtgcagtagccacaaaagatgcatctggaaatttcactggagaggttacagtagagtattatcctttaggaaatgaaaattctccaactaagtcatttaaaatatcaacagatcctagtaaagctaaagatttagcagataatttgatgcaaaatagagttttaattgcagataaagatggaaatgcagtgggaatgactaaaactacagctaaagatccaaaccctgcgcctacagttggaacaacaacgtcaacagtaaatggtgtgacaacagttacaaatgtaacagctataaaaaatacagatggatcaacaacatatactacattagtaaaatcaacaccaccggcaaccgatacacaattgaagggtggcgtttttcaaacttataaatatgatagcgaaagtggagttaataatgtagatgataatcatataagaggggaaatagctgcaaaccaatcagtgcagcaaactatacaaggatatatggatagtttggacagacttgcagcaggtctagcttattccgttaatgcaattcaaactggaaatattgatgcagatgctactactctttcacaggggttatctaaaaatttaattttcacaaatgcgggaaatacagcaacagatacaggaattacagcggctactataaaagtgaatgatgctttagtaaaagatcctactttgctaaattgtaatacaacttcaaccagtggagtaggggatggaaagagagccaatgcaatagcaaatcttaactcgatgaagatgaatttaagtaacgtaaaatctacagaagatttaaatacaatgactagaaagaaatttctggaggagatgggaatagatgatacatctggaacaggcttttcagatagtacttgtctaaatttaaatgctggaacaaacggatcaacagtagatagctactataaaactataataaataatcttgcgacaactactcaagaggctagcaggcaggttgataatcaggaggcggtattatcgaacttggaagatcagaaagcatcagtttcaggagtatctcttgatgaagaaatgactaatttaatacaatttcaacatgcttatcaagcaaatgcaaagatgatatcaacaatagacgagttattagatgtggtaataaacggattaaagagataggaggtatttagatgtcgtttagaataacaaatagcatgctaagcagcaattatttgaaaaatatgaaaagaaatatgaataatatgcaagcgttgcaaaatcaattagcgtcaggaaaagaaataaataaagcatcagataatccatatgtagcatcaagaagtatgcagttaaatgcagaaatatcttacaataagcaatatgatgagaatattaaagatacatcaaattggcttgatacaacagacacagcattatcacaaatggggaatattttcggaaggatagaaactttgcttgtgaattctggaaatgggacttatggagatgatgaaaaatcagctattcaagatgaaattaaggaaaaagttaatgaattatctcaagttttaaataccagttttgatggttcttatatatttggagggacaaaaactagttctaagccgactacagtggtggatggtaagctggaatatgctgataagaatggaaatggaatagctaaaacaagtactggtatgagcatagatttatctactaacccgattgtaagtagtattaaaccttcaaataatatgaaaattgaaggcattgataaatcagggagtaatataacagtaatggttaaggattatactaacactcctgcaacgcaagtgactccatcgccgacaatcgatcttactaaagttggaactgtaacgccaccttcaaatactcccgaaactttagaatcattattcacaactgcgctagctccaaattttaattctaatgacgctaaagaagcagtatcttcatatagtgcactggatcaaattagctcaagtttagaggttgatatatcacaaggtgttaaaagcatatacaataaaacagctgtcgatgtgttagagtttaaagataaaaatggaaagagtataaacgtttctaatctgctatcagacataatcaataatttgggatcgtcaggagattctagtaatttaattactggtaatttaactgacatacaatctgtcactgctaatttattgcaaaagagatcagaagttggaactatgcaaaacagaatggattcagctcaatcaaataatgaaacacaaaattataatatgacagatattttatctaagacagaagatatagattttgcggataagaccatggaatattcaatgatgcagacagtatatacagctgcactgcagactagtgctaagatattaccgatgacaatattaagttacttatagttaggagaacagcagtatgaaatttatttcaaaaattcatggtgaaattgaatatgaaaaagataatataattacctttaataaagggcttccgggctttaacgaattaagaaagtttattcttattgatttagaggaatactatccatttaaattgttgttatcattagaagatggcgaaattgcactcattgttacttcaccatatgaattctttaaagattatgaaattaagttaagcgaagaaactattaaaaatttgaaaatagattctccaaagcaagtaaatattattactacagtaacgataaattcagatgtaagaaaaatcactaccaatctacaaggacctatagttataaatacttctaataatttaggggaacaaataatactagataatactaaatacaaagttaagaatcctttaatttagggaggtaagttatgctaattataactagaaaaaaaggtgaatctcttatgattggagatgatatagaaattgttataagtaagattgatgatggaagcgtaaaaattggaataaaagctcccaaagatatatcaatactcagaaaagaattatatgacgaagtagagaaggaaaataaggaagcaacgaaatttgatatcagcattttaaaggatataaataaaaaataaatattaaagtcataaataacaaggaggcaggattaacatggaagttaataacataggacaaagcacaattaatacaaattcatacaatgtaaatccagatgtatcccaatatactaatgctaatacaggggtatcgattacccaagttcaaaaagttgaaactcaatcttcagaagagaataatgctaaaaatcaagaatatagcaaaaaagatctagatgatgcagtgaagaaaataaataactttttaaaagatgataaaactcacgcagaatatacttataacgaagaaatgaagacaatgatggtaaaagtaatagatgaaaatactaaggaagttgtattagaaattccaccgaaaaagattttggatatggtagctagtatgttgaggcaggtaggtttgttagataagaaagcttaattcaatataaaatttaaaggagaaaatatttatttggaatttaaattaaataaaattgatacggatattagaaaaaaaatgcaagaagaaatcaaggaagataaagtgcattcaggtaagaacataagcataaaaaaagatataaaagatgaaccacatcaagaaacgcaaaaattaaacgatgaagaaataaaaaatagatatataacaatagacggagtaaaggataaacataaaaatatagatattaaagcagaaaaaatagaaaatataaatgaagataattccaaaggtagaagtttagatacaagaaaataggaggagttaccatgtattctaatggatataatgtatataaaaataattccgtaaattatgcatcaaaagaacaattattattaatgttaactgaaggtgcagttaaattttgtaaaatagctagacaagctatagtagatagagatgtaaaaaaagcacatgatgcactagtaaaaactcaggatatattctcagaactcatggttagtttagatacaagtgcaggtgagtgggcagttcagttattgagagtatatacttttattaaagatagattgattgaggctaatatgactaaaaaattagaaataatagatgaaattcttccacttatagaagatattaatgagacatggaaagaagcgtataagagagctaaaaaataaataagaggtgatataatatgacaagtatttatccaagtagtagtactagttcaagcagcagtacttcaagcaaaaatttattgagaatatcaggtatggcaagtggtattgatacagattctgtggttaaatctatggtttcaaactatcaaactaagatagataaagagaatcaggcgaaacaaatattacaatggaaacaggagagttatagagatattataaaaggtgtgaaaggccttcaagaatattttgatccactttcaagcaagtatattcttggtgatagtgccatgaatattaatacagccacaagtgatacaagttcagtggtgtcagcaacgacagattcaacagctaaagcaggaacttattcaatagaagtaagtcaattggcggaacaggcaaagattactggaacttcaaaaaactctatggtagaagtttctaactctactactatttctgattggagcggagctaaatttacattaacaatagatggaaaagcaactgatataacattaggaactataactagtagtaattccaatggtactgttttagatgaagttgtttctgatataaatagtcaaatggcatcaaaagggttaagtggaattaccgcctcttatgtaaatgacggattaacttatataaaatttactaacacaagtggaaagtcagcgagcatatctgatattactaaatcaagtgacagtactaaattaggagcaggacaaagtatcggtgggaatatttcagcaacttcaaaattatcggatttaggaattaatgatagtaagggtataagttttgaattatcgtatgattcaacaacaatagctaagccgatagctattacagcaacaagctcagatacattacaaagtctgatggataaagttaaaagtgcaacaaatggttcagttataatgaatatagatgatactactggaaaaatttcattccaatcaaaaaatactggatcagcttcaagtattacaattaaagatacaagtgaaggggttaatagtatttctgatttaggtataaaaatagatgtagataccaagagtgctagtgcaacaggtaaagatgcaatggtaaaaataactgagccaggaaaatctgctacaacaacaactcaaagctcgaataaatttacaattaatggagttagttataatatttcgaacactaatattggggatccagctaatataacagtaactgccaatacagatcaagttgttactaattttaaaaattttataacagattataatactataatttcaacaattaatacaaaattaacagaaaagaaaaatactgattatgctccgcttactgatgatcaaaaatcaagtatgagtgaaagtcaaattactgcatgggaaactaaagctaaagttggattgcttagaaatgatgactatttaaatggtgtaatgactcaactaagaggaatattttcatcacccgtgtacagcagttacagtagttcaacagtcaatacaaaaataccattaagtttaggaaaatatggttctaatgctataggaattgatacttcatctgatgttactgatggaggtaagcttgttattacagatgaaacaaaactaaaagatgttattactaacaatttagataattttaaaaaaatgtttagtggagcatcaagtactccattagataaaaatgcgtcaggtcaagaggaggcttatattggctcaaaaaaatatatggaagatggattatttaagagaatgagtactgtacttagtagttatgtggcaacgccaggattaggtaaagatggtacttacacattatctggtagcatgaatatatttgtaaataaacaatatgattatagcgcttcaggatccgcaagtaaaaacacattacctgatcaggtttatagtaaaactttaagtatcagcaagcttaagactcaaatgtcagatgctgaaaccagatattacgctaaatttacggcattagaaacagctatgaataagttgaattctcaacagagtcagcttagctcgatgcttggaacatcataattaataaaaaataattgacaacaagcatttatgatgacttgttgtcaaattttatacaacaaagtgggtgaagaattggaaatagatgaacaatttaaaaaatataaaaacatcactttaattattatggaaatagttaaagcagaaaactatgaaaagttagatgagctttttttacaaaggcaattaattttgaataatataaatgaattggattactcaaaagaagaattaaataagctttatatagaacatgatgtaggcaaaatagataagatattagaagaagaaatgaagaatagaaaatatgagttgttaaacaaaataaaagaaaatcaaaaaagaaaagtaggaatgaatggatataatagttttcaaactaaagccgtctttttaagtaaagagttataaaaaaatattaagtatacgcgttgtgctagttaaaatttaataaagaaaactctaacaaaatttaatcatcccaattataattaaattaacactaaaagtataataaggagatgattaaaatgttagagttcacttattataatactgaaaaaattgctaatttaaaagatttttttacagtttcttttgtgttaatcgatgatgtttacaatgaagtaattcctgaatccatcaaaaatagaagaaatatttctgaatctaagctctcagactcagaaataataacaattagtatcgtaggcgaagcccttacaattgattctgaaaaagcttggttctattttgttaaaaagaattattcagatttatttcctaatatttgcgatagaacaagatttaacagaaccaaaagaaatttatacaaagtaattttagaaatccaaagatacttttcaagtctggcaatatttagtgatgatgatactagaattattgacagtatgcctatcccagtatgcaaattcggaagagcctactttagtaaattattcaaggacatatcaacttatagttattgcgcttcaaaaaaggaaacttattttggattgaaacttcacgctttaattactactgatggtttcataacagattttcttttaacgactgctaatactgatgatagagatgctgtattcgaactcattcaaacaaacaccaatataaagatactcgctgataaaggatacgtcggcaatgagcttaaagtatcattagctaaagaaaaagaaatcttgtttttatcgctgaagagaaaaaatagtaaaacaccgctagaaaaacgacttcgtaacgctttatcaaaagcgcgtcggagagttgaaactagtttttctcaattagctggccaatttaatattgcaagagttctagctaagtcaaagtgggggttaatgctgagaattactctaaaaatacttactcataatatatcatttgtactaaatgcaattacaggaaatactattcatatagctcaaattaaacatcttgcatttggttaaaatttattaaattttactcaaggatattttgcgcatttttatactacaataattgcaatacaaaaattagcacaacgcgttaagtatataaaattttaaattactataaagtattaaaatttatagtcgaatatataaatatgagattaagtatttattattttgtatagttaaaaaagataataaaaaaacttgaaaatttaaaataaactataaagttatatttaattaaatcgaatatataaatatatagcttataagctattaactcttaagagttgatataaataaaaaaactaaaatggacagggaagtccaaaacttaaaaatcaaggaggaatatattatgataattaatcacaacttagcaggtgctaatgctattagacaaatgaatgttaactcaggtaatgcaagtaaatcaatgcaaaaactttcttcaggtcttagaattaatagtgcagctgatgatgcagcaggactagctatatctgaaaaaatgagaggacaaatcagaggtcttgaccaagcatcagctaattctcaagatggtatatcaatgatacaaactgcagaaggtgctttaggggaaactcaaagtattcttcaaagaatgagagaactagcagttcaatctggtaatgatacaaatgtatcagttgatagaagtgaaatccaaaaagaaatgaatcaattaacttctgaaataaacagaataggtaacacaactgaattcaatactcaaaatttacttgatggtggtgcatcagcgagtggcgttaaaacttcaagcactgaagctagtggtatagcagctaaaggagcaactattacttccattgaaaagttgaatttaacagctggtacaattactacacttgcgggaacatcagatgcggtaacttttactgtaggtggttcgtcatttagtttagctggagatgcgtttggagtattatggaatgcaagtggtaaaacaagcgatgatttaaagactatattgcttaataatgctcaaactagtaatggtactaaattatcaacaaaagcagatattaatgtctctgaagagggggtcatgtcatttacaaataaaactgctggaacaggtaccctagaggttactgcagctactgtttggaatgctgtgttaggaattacaaatggtacccatgtagatcttactgcaacaggaacagcagaaacaaatgctgttatcacaggatctaaaacagttgcaggtacagatacaattactgcatctgactgggctggtaaaacatttactgtagataataatggaacaacagcgaacgtaactatatcagctacttttgctgggacatcattaagtaacttagttactgcatttaatgcttcatctactgctactttcggaactgaccatcctgttatggcaatatcagctagtcatattactataacatctgatatatcatctacagaggcaggtacgggtgaaaagccttatgtaagtattacaggagataatttaaatactgtattaggagattttgtgccaggttcatcagcttcgggtggaactttctcagctaagttccaaataggtgctaatcaaggacaaagttttgagatagacattaaagacatgagatcaaaagcattaaaaatttcaggaactactgctggaaacgatcagggagttgttgagggcgctaaatttgtttcaacaaaagatgtaactgatggaactacaagtactggaacagaatatgcacttgatgtatcttctcatgacactgcaacagcagcaattaaggttataaataatgctattgaagctgtatcaggacaaagatcaactcttggcgcatatcaaaacagattagagcatacaatagctaacctaggaacatcaagtgaaaacttaacttccgcagaatctagaataagagatgttgatatggcaaaagaaatgtcaacattctcaaagaataacattcttagccaagctgcacaagcaatgcttgctcaagctaaccaacaacctcaacaagtacttcaattattgagataagtagaagcttaaatttatgaattaataataaagggtcagagtaattaactctggccctttaaatttacctaatatctaagtggggatgtaatattggttttgcttgtaagtgattacgctatattcatagatatatctaaagtaatggataaatagtgcgataattatattagtatcactttagatgaatgagaggaagcataaatatgaaacttagtatttgtatgatggtaaaagatgaagaaacaaaccttgaaaggtgtttaacaagtttaaataatatagttaattctatagattcagaaataataattgtagatactggatctaaggataatacagtagaaatagctaaaaagtatacagataagatttattttcatctgtggaacaataatttttcggaaatgaggaatatttcgattaagtatgcaaaaggagaatggattttaattattgatgcagatgaggaagtaagaaatagtgatgagcttgttggtttcttaaaaagtaaagattcagataaatttaatacaataatagtaacagtaaataacattgttgatatgaataatagatatgcagataccctattaaaatcaaccagattatttagaagaagtttagattttaagtatgttggtgcagtgcataatcaaccagtatttaagaaaccaatagttgaggtgaaaacagtctttgatcattatggatatataactactgataaagaattaatgaaaaagaagtttgaaagaacttggaagttgttggaaagtgaattagaaaaagaaccggataatatttataatagatctcagttgtcagttacatatggaatgcatggagaccatgaaaagggattagaagaaatactaaaagcatacgatgtactaaaaaataaagcattagatgaaactataaactacatttatgtttataatagattagcaacagcatattatacaaataataagtttgaagaaacagaagaaatatgtaaaaaagcagtgaagatagatagtgaaaatatagatttatattattttttggccaaatctcaatatttattaaataaatacgatgattcaataaagaattattctaaatattttgaattgatttatagctattataataatacaaaagtaactgatataattgcattagtttatacgattaataggcaaccggaggcacattttgatatgttcaaaatgtatactcatcttgataatatggaaagagcaatagaacatatagagtttgttgatgatataagaattattatttcagtttataatgaagtggttaagtgttattttaaaattaaaaaatacaaagaattactagattattttgatagacttaagataagccagtttgatagtttagaaataacttttttatctgcaatagaagaagaaatgaaattaataaacgttgatgaaaggataaatctttatgataagctttgttgttatggcaatgaaaattattcattactaaattctattagaagtgattattttaataaagcaaatatggatgaagggaaaattaataaattaattaataatatagatttgaacgagtgttttgattattatggtgatgtcttttactatttgatatcattaaaaaaaccaattcagaacttattcttaaaaatgagcgaaagcaatatagaagcatattttaaatatattaaggaatcttataatgatttgtatgataaaattgaagaatacgtatctgtatatgaaaaaaatcaagagtttaaggatttgaaaacaaataaaattctaagtagaattttactttcgtcagagtcattaaatgatgatacttatttgcttgtttttaagcgttatattaattatggagtaaattatatagttaatatatacaacgaaggttttctgcaaaatgaatttatttatgatgtaaaaaatgatgaggaaatattcttcttatatatgtataaggctgaaattctatttaaaggtaacgaactagagcatataaaatatttaagaaaagctttagaaaaagttcctatgatgaaaaagggaattggattattgttaaatgaaatgaaagagaaagaatcatttgaaagtatagaaatgaaagagcttaaaatccaactaaaaaacaatataagaaattttatcaaaagtggcaatatagatgtggctgaatcattaataaaagaatacgaaagtatagttagtaacgatatggaaatagttttatttaaatctgaaatttcaattgagagattaagggaaaaaagtaatagtaattataagatgtagactaaacaaagtcacaataattcaaaaggtaggaagtgataatgtgtctgatgaaagagagataatgaaaaaacagataaaagaaaatatacaagtacttattaatgataataaattagatgatgcaatagttttaattgatgaatatttgaaaatagatttatatgatatggaattatactcgatgttatctgttgtttatataatgcagcagaaaataaatgaagcaaaaaaagtattaaaagaggcacttaatatttatgatcaaagtttcgatttaaattataatttggcttatatatatgaacaagagggagaaattagatattctttaaagtactataaaaaagctttagaaaattgtaatgatgaaaaaataaaattaaatataataaattctattaaaaaaatatccaataagcatagtagtatggtaacagatgataaaacaaaagtgattttctttgtgaagcaaggtatggatagttttcttgatgatataataaataatttatcagaagaatatgaaactaaaaagatcattacgacggaatataaacaaatagatgaaggtatggaatgggccgacatttgctggtttgaatggtgcgatgaacttgtggcttatggaagtaagcacaagttggctaaagaaaagaaaataatatgtagattgcatagatatgaagtttttactaactatcctaaaaatgtagagtggaataatgttgataaattaattttagtgacagagcaccttggaaaattcttagcatctcagatacaagatattgaggaaaaagtcgatattattactatacataatggagtcaatttaaataaatttcaactaaaattaagaaaatcaggttataatattgcttatataggttatatacaccaaagaaaaaatccagttttattacttcaaataataaataatcttgtaaaaatcgataaaagatacaaattatatattgcagggcaatttcaagattcgttaattgaactatattggaattatcagatacaacaaatgggattaaataataatattatatttcaaggttggcaaaaagatataagtaaatggttagaaaataagaattatattctatcttcaagtatacatgaaagttttggctacggtattgcagaagctatgtcaagggggataaaacctgtaatacatgattttgtcttcgcagatgaaatatgggataaaaagtatctttttaattctattgatgaagctgttaatatgattactgaaaaagattataattcacaagaatatagaaagtttattgaagataactattcattaaataagcaagtagatgaaataaaggaacttattaatttaactcgaagcaaggaagaattaagtaaaatagagaaggaagaacttacattggattatatctatagaagatttaatgaatttataagttacccaaatatctattttgaaagttacgattttaaatctgcagatataactattggaaaaagggaaagagtaagtaatgagtacgagttaatagagtttattcttaaaaataataaaaataaaagtcttatatttaataatatttggtacaacataaaagatgaaaatattgttctgccggaaccaatgaagaagaatggaaatataaaatatattactaagtttttgaggaatatattagaattagaagtagaattcgttaataatattgcaggatttatttttgataaaggtatagttgatgatgtaaataagaattcagtgatatatagttgggaaagggctataccagcatcacagtttatgccaatgctaggatatttaaaaatagctgagaggtatatatttgctgcaagctttattaaaagtagtgacaaagttttagaatctccttgtggttttgggtatggagcagcttatttttctaaaatttgttcgaatgtagaagcattagatatagcagaagacaatattaaatttggaaaagatatatatggtttcgataatataaattgggtgaatggagatgtaacaaatcttccatataaagataatgagtttgatatttatgtttcatatgaagtgtttgaacatttaccattagagttaattgaacaatatttacatgaatcaaaaagagtaataaaaggaaatggaaagtttataatttcaactccaaatgcagaaatgagaaaacatataaataatccatttcatataaaagaatatagttttcaagaatttagaaatataattgaaaaacagtatagtaagattgaatattattctgttagtgattacaaagttaattttggtatgaagcataatgcttttactatgattgcagtatgtgaaaaataaaatttatattataattatatttactcaaacatattaaatccacttgtatttattatgttagtgaaattatttgagggaaatatcaaatctaaggaaatgttataatattttgagtttgtaagtaaatgtattttataataaacgtgaagaaagaaatacagcgaaaattctactagaaattataatatttgtactgcagaatgccgatatcatatttttttaggaaaggtctatgcaagtgattggtacttatggggagtaatacagataattggtttttgtaaaaggtggaatttatcaatagtgttttaatttacaagaatagattaaaatactatatgaaagaagcataaatggttactagaggagttaagaagatgttgagtttatgtatgatagttaaaaacgaaggacaaaatattaaaagttgtctatctaaagtagaaaccttcgtagatgaaataattatagtagatacaggttctgatgataatacaaagattattgcatcagaattcacagataaaatttatgattttaaatggtgtaatgatttttcgaaagctagaaacttttcaatatcaaaagcttcaaatgattgggtacttgtattagatgcagatgaatttattataaattttaataaagatatgttatatgaatttataagtaaggtaacgaatagaaataaagttggtagaatccaaagaattaatattatggatgattctaatggaaataagaaatatacagaaagaggaaatagactttttaacaaaaattattttcactatgaaggaattattcatgagcagatagtagctttagataataaggactatgaaacagaaatattagaaatattagctgaacatataggttataaaaaggaaatattaaacagaacagataaacttaaaagaaatatatatttgttagaagtggcattgaaagatgagtcaaaagatccatatatttattttcaactaggaaagtcttattatatgttaaaggattatgaaacttctattgagtattttgaaaatgcattatcatttcaattagattttagattggaatatgtagaggatttggttgaaacttatggatattctttaattaacagctgcagatattctgatgctcttattttggagaattgtcttggaacttattcaaagtatgctgattttctatttcttatgggcttaatatatatgaataatgccaaatttacagaggcaataaatagtttcttagagtgtactaaattctcagacagtaaagcggacggaataacttcatatatttcctattataatataggggtgatatatgaagttttggattttaaagagaaggctatagagtattataatatgtgcaatgattatgaactagcaaaaaatagacttaaggtatttttaaatcaagtttagaaaatattaaatataacgataatttagaaaaattaataaatattggaggagtaaatatggatatagcagaattatcaacggtaatgagtcaatcaagtgtaaaacaatcagctggtgtacaattggcaaaaatgatgatgaatgctgaaaaagaaagtgctgctcaaatgactgaagtactaaagaatgttacagtagatcctaatttaggaaataacttggatgctagagtttagtttagatggatgagagagaggagttaaagaaagaattagaacaagaacttcagtggataatttatagacaaagactgctggatattatggaacaaaaattattacaaatgaaaaagttaacagagaaggctaagtatgataatcttattgaaaaggaattggaactgataaacgttaaattaaatgatttagctatgcaagttaaagctttagatagtgaaagtagaaaaagtgaagattggaaaatgattagatgagcatcaatagctagcaaaatagatatggatactcatttttctttttagtaaatatagcgccaaatttatttagaacgaataaagtttcatttttgcatagtaaagctgtaagcgtcaaaaaatcgacgcgtagcagcagcctaaacttaagtgataaaataaacccaacagaaaaacttatattttctgttgggtacaattttatataggggctgctccaaattggcttaagtgtttggaatagtattatgtatgatattttatggaatactaagtgcatagatattttaaatatagggtaaaaacccttgcacttaggagtgaatttatatg
